United States Patent Application Publication US 2018/0126003 A1 - sequence listing, part 113

SEQ ID NO: 199569 - DNA, 5337 bp, Artificial Sequence
  derived and/or modified sequence
atgtccatcgttattcctctgggcgtcgacactgccgaaactagctatctggaaatggctgctggaagcgagcccgagagtgttgaggccagtcctgtcgtagtcgagaagagcaacagctatccccatcagctctatacaagtagcagtcatcactcacacagctatatcgggctgccttacgcggatcacaactacggcgcccggccacctcccacgccgcctgcgagcccacctccctccgtgcttatttccaagaacgaggttgggatttttactacacctaactttgacgagacaagttctgctaccacaatctctacttcggaggacggaagttatggtacagatgtgacacggtgcatttgtgggttcacccacgatgacggttacatgatctgttgtgacaagtgcagtgtgtggcaacacatcgactgtatgggaattgacaggcaacatatccctgatacctacttatgcgagcgttgccagccacgcaacctggacaaggagcgggccgtgttgctacaacgtcggaaaagagaaaacatgagcgatggcgatacatccgcgactgagagtggggatgaggtgcccgtggagctgtacacggctttccagcacactcctacttccatcacactcaccgcctctcgagtcagtaaggtgaacgacaaacggagaaaaaaatctggagaaaaggagcagcatatcagtaaatgcaagaaggctttcagggaggggtctaggaagagttctagagtgaagggcagtgcccccgagatcgatccatcttccgatggttctaactttggctgggagacaaaaattaaggcctggatggacagatacgaagaagctaacaacaaccagtactccgagggcgttcagcgggaagcccaacggatcgccctgcgactgggtaatggaaacgataaaaaagaaatgaataagagtgacctgaataccaataacctgctgtttaaacctcccgtcgaatctcacatacagaaaaataaaaagatcctgaagagcgccaaggacttgccccccgatgcattaatcattgaatatcgaggaaagtttatgctgagagagcagttcgaagctaatgggtacttttttaaaagaccttatccctttgttcttttttactccaagtttcacgggctcgagatgtgtgttgacgctcgcactttcggtaatgaggctcgctttatccgcaggagttgcacccctaacgcggaggtgcgccacgaaattcaagatggtactatccacctctatatttactcaatacactcaatcccaaagggtaccgagatcacaatcgcctttgactttgattacggcaattgtaagtataaggtcgattgcgcctgtctgaaagagaatcctgaatgcccggtccttaagcgcagcagcgagtctatggagaatattaactctgggtacgagacaagacgtaagaagggaaagaagacccgcgaagagagaaaaatggaagcaatcctacaggcgttcgcccgcttggagaaaagagagaaacgaagggaacaggcgctcgagagaatatccactgccaaaacggaggtgaaaacagagtgcaaagatacccaaatcgtgagtgatgcagaggtcatccaggaacaggccaaagaagagaatgcgtccaaaccaactccagcaaaggtaaacaggacgaaacagaggaagtcattctcacggagcagaacccatattggacagcagcgacggagacataggacagtttcaatgtgcagcgatatccagccctcttccccagatattgaagtcacctctcagcagaacgatatcgagaacactgttctgacaatagaacccgaaacagaaaccgctctggcagaaatcattacagagaccgaagttcctgcactgaacaagtgtcctacaaaataccctaagacaaagaaacatctggtgaacgaatggctctctgagaaaaacgaaaaaaccggcaaaccatccgacggcctctcggagcgcccgctgcgcataaccacagatccagaagtgctggccacacagctgaacagtctgcccggcttgacttacagcccgcatgtgtactcgacacccaagcactatattcggtttacttctccattcctctctgaaaaacgaaggcgcaaagaacctactgagaacatttcaggcagctgtaagaaaagatggcttaagcaggcccttgaagaagagaactcggccattctgcatagattcaactccccgtgtcaagaacgctcaaggtccccagccgtgaatggcgaaaataagtcccctctgctgctgaacgattcatgcagcctccctgatctgaccacacctctgaaaaaaagaagattttaccagctgttggattctgtttatagcgagaccagcaccccaaccccatcaccttacgccaccccaacacatacagacatcacgcccatggacccatcattcgcaactcccccacgcattaagtctgatgatgagacctgcagaaatggctataagccgatttatagcccagtgactcccgtcacgccaggaacgcctggaaataccatgcactttgaaaacatcagtagccctgaatctagtcctgaaatcaaacgccgcacctacagccaggagggatacgatcgctcaagcaccatgctcaccttgggtccatttcggaactctaatcttacagaactcgggctccaagagatcaaaacaattggatacaccagtccccggtccagaacagaggttaaccggcaatgtccaggggaaaaggaacccgttagtgacctgcagctgggcctggacgctgttgaaccgactgctctgcacaagacactcgagactccagctcacgatcgggcggagcccaacagccagctagattccacacactccggtcggggcacaatgtacagctcctgggtaaagtctcccgaccgcacaggtgtcaatttctccgtgaattcgaaccttcgcgatctcacaccctcccatcaattggaggtgggcgggggtttccgcatcagcgagagcaaatgcctaatgcaggatgatacacgcgggatgtttatggaaacgacagtgttttgcacgtccgaagatggattagtgtcaggctttggaagaaccgtgaatgacaatcttatagatggcaactgtacccctcagaatccaccccagaagaaaaaagtgagcctcctggagtaccgtaagcgacagcgggaggcaaggaagtcaggctctaagactgagaattttcccctgattagcgtctcaccccacgcttcagggtctctgagtaataacggcgacggctgcgcaagctcaaacgataatggtgaacaggtagatcacactgctagcctgccattgccgactcctgctacggtgtacaacgccacatcagaggaaactagtaataactgcccagtgaaggatgccaccgcatctgagaagaatgaaccagaagtgcaatggactgccagcacatctgtagagcaagtcagagagagatcttaccagagagctctgctgctcagcgaccatcggaaagataaagactcagggggagagagcccgtgcgtctcctgctcgcctagccatgtgcagagcagcccatcctctcactccaatcatataccccaactgcaggccaagggtcccgtgccaagcttctccgaacttatggaggaccctgatcctgagaaccccgaacccacgactacgaacgaatgccctagcccagacacatctcagaacacatgtaaatcccctccaaagatgagtaagccagggtccccagggtcggttattcctgcccaggcacacggaaaaatattcacaaagcccgatcctcagtgggatagtaccgtgtccgcaagcgaggctgaaaatggggtccacctcaaaacagaactccagcagaaacaacttagcaataataatcaagcgttatccaagaatcatccgccccaaacacatgtgcggaactctagtgagcagctcagccagaaattacctagtgttccaactaaactacactgcccgccgagcccacacctggagaacccgcccaagtccagtacgccccatactcccgtacaacacggctacctaagtcccaaaccccctagtcaacaattgggttctccatatcgcccacaccactctcagtccccacaggtcggcactccacaaagggaacctcagaggaatttctaccctgccgcccagaacctgccagccaatacccagcaagcaacaagtggaactctgttcactcagaccccctctggccagtctagcgccacatatagtcaattcaatcaacaaagccttaattcgacggccccacccccaccccccccaccgccaccaagcagcagctactaccagaaccagcagccctcagcaaactttcagaactataaccagcttaagggatccctgtcacagcagacagtgtttacatcaggacctaaccaggccctgccaggtaccacctcacagcagaccgtgcctggacaccatgtcacacctggccattttttgcccagccagaatcccaccatacatcatcaaaccgcggccgccgtcgtcccgcctccacctccgcccccccctgccccaggtccacatctcgtccaacagcccaactcccatcagcagcactccgtggcacatgttgtcggtcccgttcacgccgtgacaccaggtagccatatccactcccaaaccgcaggtcaccaccttcccccccccccaccccctcccgggccggctcctcaccatcatcctcctccacacccttctacggggctacagggcctgcaggcacaacaccagcacgtggttaacagcgctccgccgccaccaccccccccaccaccatcatcggtgttggcatctggtcaccacacgacaagcgcgcaggccctccaccatcccccgcaccagggccctcctctgttccctagctcagcacacccaaccgtaccaccctatccatcccaggcaacacatcacacgactctggggcctggcccgcagcaccagccaagcggcacaggaccgcactgcccattacctgttaccggacctcatctgcagccacagggacccaatagcatccctactcctactgcctcgggcttttgcccgcaccctggttcggttgccctcccacacggagtgcagggtccccagcaagcatcccccgtcccagggcagatcccaattcatcgggcccaggtgccgcctacttttcaaaacaactatcacggaagtggttggcattag

SEQ ID NO: 199570 - DNA, 4962 bp, Artificial Sequence
  derived and/or modified sequence
atgtctatcgttataccactgggggtggacaccgcagagaccagttatctcgagatggcagcggggagcgaacctgaatcagttgaagccagccctgtcgtggtggagaagagcaattcttacccacaccagctttataccagcagttctcaccatagccacagttacatcgggctgccatatgctgatcacaattacggtgcgaggccacctcctacaccgcccgcatccccccctccttcggttcttataagtaagaatgaggtcggaatcttcacaaccccaaactttgacgaaacctcctccgccacaacaattagcacatcggaggatggtagctatggtacggacgtcacacgctgtatctgcgggtttacccatgacgatggttatatgatttgttgcgataagtgcagcgtgtggcagcatatcgattgcatggggattgataggcagcatattccagatacctacttatgtgaacgctgccagccccgaaatctggacaaagagcgcgctgtcctcctccagcggcgaaagcgggagaacatgtccgatggggacacctcggccaccgagtcaggggatgaggtgcctgtggagttgtatactgcatttcagcacacccccactagcatcactctgacagcttcaagggtatctaaagtgaacgataaaagacggaaaaaatctggtgaaaaagagcagcacatcagcaagtgtaagaaagctttcagagaaggctcgaggaaaagtagccgagtgaaaggttccgctcctgaaatcgatccctcaagtgacgggagtaatttcggctgggagactaaaataaaggcttggatggatcggtacgaggaagcaaacaataaccagtacagtgagggagtgcagcgggaagctcagcggatcgccctccgactaggtaacggcaacgacaagaaggaaatgaataagtccgacctcaacactaataatctgttgttcaaacctcccgtcgagagtcacatccaaaagaataagaagatcctaaagagcgctaaggatcttccacctgatgctcttattattgaataccgaggcaaatttatgctgagggaacaattcgaggccaacggatatttcttcaagaggccatacccgttcgtgttattctattcaaaattccacggattggagatgtgcgtcgatgcccggaccttcggcaacgaagcacgatttatccgccgtagctgtacccccaacgccgaagtgcggcatgaaatacaggatgggactattcacttgtacatctatagtattcactcaatccccaaagggaccgaaatcacgatagcctttgattttgactatggcaactgcaaatacaaggtagactgcgcctgtctgaaagagaaccccgagtgccctgtcctgaagagatcatctgagtccatggaaaacataaattcaggttacgaaacccgcaggaagaagggaaagaaggacaaggacattagcaaggaaaaggatacacagaatcaaaatatcacactggactgtgaaggaactacaaataaaatgaaatctccggagactaaacagcgcaagctttcacctctcagactctccgtgagtaataaccaggagcccgacttcattgacgacatcgaggagaaaacacccatctcaaacgaggtggagatggagtccgaggaacagatagccgagcggaaaaggaaaatgacgcgtgaagagaggaaaatggaagctatacttcaggccttcgcgcgactcgagaagagagaaaagcggcgggaacaggccctggagcggatcagcactgctaagaccgaggtaaagaccgagtgtaaggacacacaaattgtctctgacgctgaggtcattcaggagcaggctaaagaggaaaacgcatctaagccaacccccgcaaaagtcaaccggacaaagcagaggaaaagcttctctagaagcaggacccacatcggccagcagcgtaggcgccatcggacagtttccatgtgctctgacattcaaccaagttctccagacatagaagttaccagtcagcagaacgatatagagaacaccgtgctgaccattgagccggagacagagaccgccctggcagagattataactgaaaccgaggttcctgccctcaataaatgccccactaaatatccaaagacaaagaaacacctcgtcaatgaatggctctccgaaaagaatgagaaaactggaaagccctctgatggactgagtgagaggccactcagaattactacagacccagaagttttggctacacaactaaattctctgcctgggctcacctactccccccacgtgtactccacccctaagcattacatcaggttcactagtccattcctttctgagaagagaaggagaaaggaacccaccgaaaacatttcaggctcttgtaagaaaaggtggcttaagcaggcccttgaagaagagaactcagccattctgcacagatttaattctccatgccaagaacgatctcgcagccccgcggtcaatggtgagaacaagtcccccctgttgctgaacgattcctgcagtttacccgacctgaccacaccactgaaaaaacgacggttttaccagctgcttgactccgtttactcggaaacctccacgcccactccaagcccttatgccacaccaactcatacggatattacacccatggatccgtccttcgcgacccccccacgaattaagtccgatgatgagacatgtcggaacgggtataaacccatctactcgccagttacccccgttacccctgggacacctgggaatacaatgcacttcgaaaacatctcatccccggagtcctcacccgagatcaaacgccggacgtacagccaagagggatacgacaggagctcaaccatgctgaccctggggccttttagaaacagcaacctcaccgaactgggtttgcaggagattaaaaccattggatatacttcgcccaggtccaggaccgaagtgaacagacagtgccccggagaaaaagagccagtcagtgacctccaattgggactggatgcagtcgagccaacggccctccacaagacgctggagacgcctgctcatgatcgagctgagccaaactcacagctggatagcacacattctgggagaggtactatgtactcctcctgggttaaaagcccagatagaacaggtgtgaactttagcgtcaattctaacctccgcgatttgactccctctcatcagctggaggtaggcggaggtttccgcatttctgagtcaaaatgcctgatgcaggatgacacgcgcggcatgttcatggagacaactgtgttttgcacaagtgaggacgggttggtctctggatttggaaggacagtgaatgataatttgatagacgggaattgcacgccacagaatcccccccagaaaaaaaaagtgtcactgctggagtatcgcaaacggcagcgagaggcccgcaagtctggttccaagaccgagaactttcccctgatcagcgtgtcacctcatgcatctggtagtctgtctaataatggagatgggtgtgcaagctccaatgataacggagaacaggtggatcacacagcatctctgccactaccgaccccagccacagtctataacgccacatctgaggagacctcaaacaattgcccagtgaaggacgctactgcttccgaaaaaaatgaacccgaggtgcagtggactgcttcaacaagcgtcgagcaggttcgagagcgcagctatcagcgggccctcctattgtccgatcaccgcaaggacaaagatagtggcggagagtccccatgcgtcagctgctcgccttctcatgtgcagagttcaccttcatcgcattctaaccacataccacagcttcaggcaaaggggcccgtcccctcattctcagaattgatggaggaccccgatccagagaaccctgagccaaccacaactaatgagtgcccctctcctgacacgagccagaacacatgtaagtccccccccaaaatgtctaaacctggctcccccggcagcgtcatccctgctcaagcacatggtaagatctttacaaaacctgatccccaatgggactccacagtctccgctagcgaggctgagaacggcgtccacttgaagaccgaattgcagcagaaacaactgagcaacaataaccaggccttgagcaaaaatcacccgccacagacccacgtacgaaattcctctgaacagctcagccagaaactgccttctgtgccaacaaaactccactgtcccccttcaccccatctcgagaatccccccaagtcctccacccctcatactcccgtccaacacggttacctctcgccgaagccgccctctcagcagctgggatcgccctatagacctcatcattctcagtcccctcaggtcggaacccctcaacgagaaccacagagaaatttctatccagctgcccagaacctccctgtgttttggctcctgggcataatccctcaccaacttaagccgtacacgactcaccttatcaaagacctgcatttcttcttgagggttctaatccagttgtatcaccggataccacataagctgcacataatacccctgtgggatagagacccttcaacaagtctactggaacagggtcacattgtgcactacttgtcccaagtcctgatctcctcaccaaaggaccagactgtgttccagcatctccttctgcagggttctgtgttgatcttggcactgtggccctgccatatgggctttaaggacttgagcaggcacctccagtgcctggaccgttttcagttcactgagcacaggtgtcaccagcacttcaaaacaataaccatggggcaaggcggcatcaaaatggacagcaaaaatatttttttgaacgtgctctag

SEQ ID NO: 199571 - DNA, 1830 bp, Artificial Sequence
  derived and/or modified sequence
atgtccatcgtgatccctctaggtgtggacactgctgaaacctcctacttggagatggctgcaggaagtgaaccagaatccgtggaggcatcgccggtcgtggtggagaagagcaacagttatccccatcagctgtacactagttcttcccatcactctcattcatacatcgggttgccatatgctgaccataactatggtgcaagacctcctcccaccccaccagcatcccctcctccgagcgtgctgatcagcaaaaacgaggtgggaatcttcacgaccccaaacttcgatgaaacatcctctgctacaacaatttcaacttctgaagatggcagctacgggacagacgtgacccggtgcatttgcgggttcacacatgatgacggctacatgatttgctgcgataagtgctctgtgtggcaacacatagattgcatgggaatcgatagacagcatatccccgacacctacctttgtgagagatgtcagcctcgcaaccttgacaaggaacgcgccgtattgctgcagaggagaaaacgagaaaacatgtcagatggcgataccagtgctaccgagagtggcgacgaggtgccagtggaactttacacagcctttcagcacacgccaactagcataactctgactgcttctcgcgtctccaaggtgaacgacaaacgccggaagaagtctggagagaaagagcaacacatcagcaagtgcaagaaggcctttagggaaggcagtaggaagtcatcaagggtcaagggaagcgcaccagagattgacccaagctctgatggtagcaactttggctgggagactaagatcaaggcctggatggatcggtacgaggaggcaaacaataatcaatattcagagggagtgcagagggaggcccaacgcattgccctgcgccttggaaatggaaatgataaaaaggagatgaacaaaagcgatctcaatactaacaacctgttgttcaaaccacctgtagagtcacacattcaaaaaaacaaaaaaatcctgaagtccgccaaagatctacctcctgatgccctgataatcgagtaccgcggcaaatttatgctccgggaacaattcgaggctaatggatatttttttaaacggccctacccgtttgttttattctactccaagttccacggacttgaaatgtgtgtggatgcaagaaccttcggtaacgaggcaaggttcataagaagatcttgtacgccaaacgcagaagtgagacatgaaattcaggacgggactattcacttatatatctacagtatccatagcatcccaaagggcactgagatcaccatcgctttcgactttgactatggtaattgcaaatacaaggtggactgcgcctgtctgaaggaaaaccctgagtgtcctgtgttaaaacgaagctccgaaagcatggagaatatcaacagtggctacgagacccgccgcaagaaaggtaagaaagacaaagatatttcaaaagaaaaagatacccagaaccagaacataaccttggactgtgaagggactaccaacaagatgaaaagccctgagacaaaacagagaaagctgagcccactgagactgtctgtctctaacaatcaagaacctgacttcatcgatgatatcgaagagaaaaccccaatatctaatgaggtggagatggaatccgaggagcaaattgctgagcgcaagagaaagatggtgtcttgggaggctagcagtctcgggctcgtgacggccgctctccacatggtgatcgtggccgccttcacttgggctttcaccctcttctttgaggtgtctgagtag

SEQ ID NO: 199572 - DNA, 5577 bp, Artificial Sequence
  derived and/or modified sequence
atgagcatcgtcatccccctgggcgtggacacagctgagaccagctacctggagatggctgctggcagcgagcctgagagcgtggaggccagccctgtggtggtggagaagagcaacagctacccccaccagctgtacaccagcagcagccaccacagccacagctacatcggcctgccctatgctgaccacaactacggggcccggcccccacccaccccaccagccagccccccaccttctgtgctgatcagcaagaatgaggtgggcatcttcaccacccccaactttgatgagaccagcagcgccaccaccatcagcaccagtgaagatggcagctatggaacagatgtgacccgctgcatctgtggcttcacccatgatgatggctacatgatctgctgtgacaagtgcagcgtgtggcagcacatcgactgcatgggcatcgaccggcagcacatcccagacacctacctgtgtgagcgctgccagcccaggaacctggacaaggagagagctgtgctgctgcagaggaggaagcgggagaacatgtctgatggagacaccagcgccacagagagcggagatgaggtgcctgtggagctgtacacagccttccagcacacccccaccagcatcaccctgacagccagccgggtgtccaaggtgaatgacaagaggaggaagaagtctggagagaaggagcagcacatcagcaagtgcaagaaggccttccgggagggcagcaggaagagcagccgggtgaagggcagcgcccctgagattgaccccagcagtgatggcagcaactttggctgggagaccaagatcaaggcctggatggacagatatgaggaggccaacaacaaccagtacagcgagggcgtgcagcgggaggcccagagaattgccctgcggctgggcaatggaaatgacaagaaggagatgaacaagagtgacctgaacaccaacaacctgctcttcaagccccctgtggagagccacatccagaagaacaagaagatcctgaagagcgccaaggacctgcccccagatgccctgatcatcgagtaccggggcaagttcatgctgcgggagcagtttgaggccaacggctacttcttcaagaggccctacccctttgtgctcttctacagcaagttccacggcctggagatgtgtgtggatgcccggacctttggaaatgaggcccgcttcatccgccgcagctgcaccccaaatgctgaggtgagacatgagatccaggacggcaccatccacctgtacatctacagcatccacagcatccccaagggcacagagatcaccatcgcctttgattttgattatggcaactgcaagtacaaggtggactgtgcctgcctgaaggagaacccagaatgtcctgtgctgaagaggagcagcgagagcatggagaacatcaacagcggctatgagaccaggaggaagaagggcaagaaggacaaggacatcagcaaggagaaggacacccagaaccagaacatcaccctggactgtgagggcaccaccaacaagatgaagagccctgagaccaagcagaggaagctgagccccctgcggctgtctgtgagcaacaaccaggagccagacttcattgatgacatcgaggagaagacccccatcagcaatgaggtggagatggagagcgaggagcagattgctgagaggaagaggaagatgacccgggaggagaggaagatggaggccatcctgcaggcctttgcccggctggagaagcgggagaagagaagagagcaggccctggagcgcatcagcacagccaagacagaggtgaagacagagtgcaaggacacccagatcgtgtctgatgctgaggtgatccaggagcaggccaaggaggagaatgccagcaagcccaccccagccaaggtgaacagaaccaagcagaggaagagcttcagccgcagcaggacccacatcggccagcagaggcggcggcacaggacagtgtccatgtgcagcgacatccagcccagcagcccagacatcgaggtgaccagccagcagaatgacatcgagaacacagtgctgaccatcgagcctgagacagaaacagccctggccgagatcatcacagaaacagaggtgcctgccctgaacaagtgccccaccaagtaccccaagaccaagaagcacctggtgaatgagtggctgtctgagaagaatgagaagacaggcaagcccagtgatggcctgtctgagcggcccctgcgcatcaccacagatcctgaggtgctggccacccagctgaacagcctgcccggcctgacctacagcccccacgtgtacagcacccccaagcactacatccgcttcaccagccccttcctgtctgagaagagaagaaggaaggagcccacagagaacatcagcggcagctgcaagaagcgctggctgaagcaggccctggaggaggagaacagcgccatcctgcaccgcttcaacagcccctgccaggagaggagccgcagccctgctgtgaatggagagaacaagagccccctgctgctgaatgacagctgcagcctgcctgacctgaccacccccctgaagaagaggcgcttctaccagctgctggacagcgtgtacagcgagaccagcacccccacccccagcccctatgccacccccacccacacagacatcacccccatggaccccagctttgccaccccaccccgcatcaagagtgatgatgagacctgcagaaatggctacaagcccatctacagccctgtgacccctgtgaccccaggcaccccaggcaacaccatgcactttgagaacatcagcagccctgagagcagccctgagatcaagaggaggacctacagccaggagggctatgacaggagcagcaccatgctgaccctgggccccttcaggaacagcaacctgacagagctgggcctgcaggagatcaagaccatcggctacaccagccccaggagcaggacagaggtgaaccggcagtgccctggagagaaggagcctgtgtctgacctgcagctgggcctggatgctgtggagcccacagccctgcacaagaccctggagaccccagcccatgacagagctgagcccaacagccagctggacagcacccacagcggccggggcaccatgtacagctcctgggtgaagagcccagacagaactggagtgaacttctctgtgaacagcaacctgcgggacctgacccccagccaccagctggaggtgggcggcggcttccgcatcagcgagagcaagtgcctgatgcaggatgacacccggggcatgttcatggagaccaccgtcttctgcaccagtgaagatggcctggtgtctggctttggaagaacagtgaatgacaacctgattgatggcaactgcaccccccagaaccccccccagaagaagaaggtgtccctgctggagtacaggaagaggcagcgggaggccaggaagagcggcagcaagacagagaacttccccctcatctctgtgagcccccacgccagcggcagcctgagcaacaatggagatggctgtgccagcagcaatgacaatggagagcaggtggaccacacagccagcctgcccctgcccaccccagccaccgtgtacaatgccaccagcgaggagaccagcaacaactgccctgtgaaggatgccacagccagcgagaagaatgaacctgaggtgcagtggacagccagcacctctgtggagcaggtgcgggagaggagctaccagagggccctgctgctgagtgaccacaggaaggacaaggacagcggcggggagagcccctgtgtgtcctgcagccccagccacgtgcagagcagccccagcagccacagcaaccacatcccccagctgcaggccaagggccctgtgcccagcttcagcgagctgatggaggaccctgaccctgagaaccctgagcccaccaccaccaatgaatgtcccagcccagacaccagccagaacacctgcaagagcccccccaagatgagcaagccaggcagccctggcagcgtcatcccagcccaggcccacggcaagatcttcaccaagccagacccccagtgggacagcacagtgtctgccagcgaggccgagaatggagtgcacctgaagacagagctgcagcagaagcagctgagcaacaacaaccaggccctgagcaagaaccaccccccccagacccacgtgaggaacagcagcgagcagctgagccagaagctgcccagcgtgcccaccaagctgcactgcccccccagcccccacctggagaacccccccaagagcagcaccccccacacccctgtgcagcacggctacctgagccccaagccacccagccagcagctgggcagcccctaccggccccaccacagccagagcccccaggtgggcaccccccagcgggagccccagaggaacttctacccagctgcccagaacctgcctgccaacacccagcaggccaccagcggcaccctcttcacccagacccccagcggccagagcagcgccacctacagccagttcaaccagcagagcctgaacagcacagcccctcctcctcctcctcctcctccacccagcagcagctactaccagaaccagcagcccagcgccaacttccagaactacaaccagctgaagggcagcctgagccagcagaccgtcttcaccagcggccccaaccaggccctgcccggcaccaccagccagcagacagtgcccggccaccacgtgaccccaggccacttcctgcccagccagaaccccaccatccaccaccagacagctgctgctgtggtgcccccacctcctcctcctcctccagcccctggcccccacctggtgcagcagcccaacagccaccagcagcacagcgtggcccacgtggtgggccctgtgcatgctgtgaccccaggcagccacatccacagccagacagctggccaccacctgcccccacctcctcctcctcctggccctgccccccaccaccaccccccaccccaccccagcacaggcctgcagggcctgcaggcccagcaccagcacgtggtgaacagcgcccctcctcctcctcctcctcctccacccagctctgtgctggccagcggccaccacaccaccagcgcccaggccctgcaccaccccccccaccagggccccccactcttccccagcagcgcccaccccaccgtgcccccctaccccagccaggccacccaccacaccaccctgggccctggcccccagcaccagcccagcggcaccggcccccactgccccctgcctgtgacaggcccccacctgcagccccagggccccaacagcatccccacccccacagccagcggcttctgcccccaccctggctctgtggccctgccccacggcgtgcagggcccccagcaggccagccctgtgcccggccagatccccatccaccgggcccaggtgccccccaccttccagaacaactaccacggcagcggctggcactag

SEQ ID NO: 199573 - DNA, 1770 bp, Artificial Sequence
  derived and/or modified sequence
atgcactttgagaacatcagcagccctgagagcagccctgagatcaagaggaggacctacagccaggagggctatgacaggagcagcaccatgctgaccctgggccccttcaggaacagcaacctgacagagctgggcctgcaggagatcaagaccatcggctacaccagccccaggagcaggacagaggtgaaccggcagtgccctggagagaaggagcctgtgtctgacctgcagctgggcctggatgctgtggagcccacagccctgcacaagaccctggagaccccagcccatgacagagctgagcccaacagccagctggacagcacccacagcggccggggcaccatgtacagctcctgggtgaagagcccagacagaactggagtgaacttctctgtgaacagcaacctgcgggacctgacccccagccaccagctggaggtgggcggcggcttccgcatcagcgagagcaagtgcctgatgcaggatgacacccggggcatgttcatggagaccaccgtcttctgcaccagtgaagatggcctggtgtctggcttcggccgcacagtgaatgacaacctgattgatggcaactgcaccccccagaaccccccccagaagaagaaggtgtccctgctggagtacaggaagaggcagcgggaggccaggaagagcggcagcaagacagagaacttccccctcatctctgtgagcccccacgccagcggcagcctgagcaacaatggagatggctgtgccagcagcaatgacaacggggagcaggtggaccacacagccagcctgcccctgcccaccccagccaccgtgtacaatgccaccagcgaggagaccagcaacaactgccctgtgaaggatgccacagccagcgagaagaatgaacctgaggtgcagtggacagccagcacctctgtggagcaggtgcgggagaggagctaccagagggccctgctgctgagtgaccacaggaaggacaaggacagcggcggggagagcccctgtgtgtcctgcagccccagccacgtgcagagcagccccagcagccacagcaaccacatcccccagctgcaggccaagggccctgtgcccagcttcagcgagctgatggaggaccctgaccctgaaaatcctgagcccaccaccaccaatgaatgtcccagcccagacaccagccagaacacctgcaagagcccccccaagatgagcaagccaggcagccctggcagcgtcatcccagcccaggcccacggcaagatcttcaccaagccagacccccagtgggacagcacagtgtctgccagcgaggctgaaaatggagtgcacctgaagacagagctgcagcagaagcagctgagcaacaacaaccaggccctgagcaagaaccaccccccccagacccacgtgaggaacagcagcgagcagctgagccagaagctgcccagcgtgcccaccaagctgcactgcccccccagcccccacctggagaacccccccaagagcagcaccccccacacccctgtgcagcacggctacctgagccccaagccacccagccagcagctgggcagcccctaccggccccaccacagccagagcccccaggtgggcaccccccagcgggagccccagaggaacttctacccagctgcccagaacctgcctgccaacacccagcaggccaccagcggcaccctcttcacccagaccccatctggccagagcagcgccacctacacccagaggtag

SEQ ID NO: 199574 - DNA, 5337 bp, Artificial Sequence
  derived and/or modified sequence
atgagcatcgtcatccccctgggcgtggacacagctgagaccagctacctggagatggctgctggcagcgagcctgagagcgtggaggccagccctgtggtggtggagaagagcaacagctacccccaccagctgtacaccagcagcagccaccacagccacagctacatcggcctgccctatgctgaccacaactacggggcccggcccccacccaccccaccagccagccccccaccttctgtgctgatcagcaagaatgaggtgggcatcttcaccacccccaactttgatgagaccagcagcgccaccaccatcagcaccagtgaagatggcagctatggaacagatgtgacccgctgcatctgtggcttcacccatgatgatggctacatgatctgctgtgacaagtgcagcgtgtggcagcacatcgactgcatgggcatcgaccggcagcacatcccagacacctacctgtgtgagcgctgccagcccaggaacctggacaaggagagagctgtgctgctgcagaggaggaagcgggagaacatgtctgatggagacaccagcgccacagagagcggagatgaggtgcctgtggagctgtacacagccttccagcacacccccaccagcatcaccctgacagccagccgggtgtccaaggtgaatgacaagaggaggaagaagtctggagagaaggagcagcacatcagcaagtgcaagaaggccttccgggagggcagcaggaagagcagccgggtgaagggcagcgcccctgagattgaccccagcagtgatggcagcaactttggctgggagaccaagatcaaggcctggatggacagatatgaggaggccaacaacaaccagtacagcgagggcgtgcagcgggaggcccagagaattgccctgcggctgggcaatggaaatgacaagaaggagatgaacaagagtgacctgaacaccaacaacctgctcttcaagccccctgtggagagccacatccagaagaacaagaagatcctgaagagcgccaaggacctgcccccagatgccctgatcatcgagtaccggggcaagttcatgctgcgggagcagtttgaggccaacggctacttcttcaagaggccctacccctttgtgctcttctacagcaagttccacggcctggagatgtgtgtggatgcccggacctttggaaatgaggcccgcttcatccgccgcagctgcaccccaaatgctgaggtgagacatgagatccaggacggcaccatccacctgtacatctacagcatccacagcatccccaagggcacagagatcaccatcgcctttgattttgattatggcaactgcaagtacaaggtggactgtgcctgcctgaaggagaacccagaatgtcctgtgctgaagaggagcagcgagagcatggagaacatcaacagcggctatgagaccaggaggaagaagggcaagaagacccgggaggagaggaagatggaggccatcctgcaggcctttgcccggctggagaagcgggagaagagaagagagcaggccctggagcgcatcagcacagccaagacagaggtgaagacagagtgcaaggacacccagatcgtgtctgatgctgaggtgatccaggagcaggccaaggaggagaatgccagcaagcccaccccagccaaggtgaacagaaccaagcagaggaagagcttcagccgcagcaggacccacatcggccagcagaggcggcggcacaggacagtgtccatgtgcagcgacatccagcccagcagcccagacatcgaggtgaccagccagcagaatgacatcgagaacacagtgctgaccatcgagcctgagacagaaacagccctggccgagatcatcacagaaacagaggtgcctgccctgaacaagtgccccaccaagtaccccaagaccaagaagcacctggtgaatgagtggctgtctgagaagaatgagaagacaggcaagcccagtgatggcctgtctgagcggcccctgcgcatcaccacagatcctgaggtgctggccacccagctgaacagcctgcccggcctgacctacagcccccacgtgtacagcacccccaagcactacatccgcttcaccagccccttcctgtctgagaagagaagaaggaaggagcccacagagaacatcagcggcagctgcaagaagcgctggctgaagcaggccctggaggaggagaacagcgccatcctgcaccgcttcaacagcccctgccaggagaggagccgcagccctgctgtgaatggagagaacaagagccccctgctgctgaatgacagctgcagcctgcctgacctgaccacccccctgaagaagaggcgcttctaccagctgctggacagcgtgtacagcgagaccagcacccccacccccagcccctatgccacccccacccacacagacatcacccccatggaccccagctttgccaccccaccccgcatcaagagtgatgatgagacctgcagaaatggctacaagcccatctacagccctgtgacccctgtgaccccaggcaccccaggcaacaccatgcactttgagaacatcagcagccctgagagcagccctgagatcaagaggaggacctacagccaggagggctatgacaggagcagcaccatgctgaccctgggccccttcaggaacagcaacctgacagagctgggcctgcaggagatcaagaccatcggctacaccagccccaggagcaggacagaggtgaaccggcagtgccctggagagaaggagcctgtgtctgacctgcagctgggcctggatgctgtggagcccacagccctgcacaagaccctggagaccccagcccatgacagagctgagcccaacagccagctggacagcacccacagcggccggggcaccatgtacagctcctgggtgaagagcccagacagaactggagtgaacttctctgtgaacagcaacctgcgggacctgacccccagccaccagctggaggtgggcggcggcttccgcatcagcgagagcaagtgcctgatgcaggatgacacccggggcatgttcatggagaccaccgtcttctgcaccagtgaagatggcctggtgtctggctttggaagaacagtgaatgacaacctgattgatggcaactgcaccccccagaaccccccccagaagaagaaggtgtccctgctggagtacaggaagaggcagcgggaggccaggaagagcggcagcaagacagagaacttccccctcatctctgtgagcccccacgccagcggcagcctgagcaacaatggagatggctgtgccagcagcaatgacaatggagagcaggtggaccacacagccagcctgcccctgcccaccccagccaccgtgtacaatgccaccagcgaggagaccagcaacaactgccctgtgaaggatgccacagccagcgagaagaatgaacctgaggtgcagtggacagccagcacctctgtggagcaggtgcgggagaggagctaccagagggccctgctgctgagtgaccacaggaaggacaaggacagcggcggggagagcccctgtgtgtcctgcagccccagccacgtgcagagcagccccagcagccacagcaaccacatcccccagctgcaggccaagggccctgtgcccagcttcagcgagctgatggaggaccctgaccctgagaaccctgagcccaccaccaccaatgaatgtcccagcccagacaccagccagaacacctgcaagagcccccccaagatgagcaagccaggcagccctggcagcgtcatcccagcccaggcccacggcaagatcttcaccaagccagacccccagtgggacagcacagtgtctgccagcgaggccgagaatggagtgcacctgaagacagagctgcagcagaagcagctgagcaacaacaaccaggccctgagcaagaaccaccccccccagacccacgtgaggaacagcagcgagcagctgagccagaagctgcccagcgtgcccaccaagctgcactgcccccccagcccccacctggagaacccccccaagagcagcaccccccacacccctgtgcagcacggctacctgagccccaagccacccagccagcagctgggcagcccctaccggccccaccacagccagagcccccaggtgggcaccccccagcgggagccccagaggaacttctacccagctgcccagaacctgcctgccaacacccagcaggccaccagcggcaccctcttcacccagacccccagcggccagagcagcgccacctacagccagttcaaccagcagagcctgaacagcacagcccctcctcctcctcctcctcctccacccagcagcagctactaccagaaccagcagcccagcgccaacttccagaactacaaccagctgaagggcagcctgagccagcagaccgtcttcaccagcggccccaaccaggccctgcccggcaccaccagccagcagacagtgcccggccaccacgtgaccccaggccacttcctgcccagccagaaccccaccatccaccaccagacagctgctgctgtggtgcccccacctcctcctcctcctccagcccctggcccccacctggtgcagcagcccaacagccaccagcagcacagcgtggcccacgtggtgggccctgtgcatgctgtgaccccaggcagccacatccacagccagacagctggccaccacctgcccccacctcctcctcctcctggccctgccccccaccaccaccccccaccccaccccagcacaggcctgcagggcctgcaggcccagcaccagcacgtggtgaacagcgcccctcctcctcctcctcctcctccacccagctctgtgctggccagcggccaccacaccaccagcgcccaggccctgcaccaccccccccaccagggccccccactcttccccagcagcgcccaccccaccgtgcccccctaccccagccaggccacccaccacaccaccctgggccctggcccccagcaccagcccagcggcaccggcccccactgccccctgcctgtgacaggcccccacctgcagccccagggccccaacagcatccccacccccacagccagcggcttctgcccccaccctggctctgtggccctgccccacggcgtgcagggcccccagcaggccagccctgtgcccggccagatccccatccaccgggcccaggtgccccccaccttccagaacaactaccacggcagcggctggcactag

SEQ ID NO: 199575 - DNA, 4962 bp, Artificial Sequence
  derived and/or modified sequence
atgagcatcgtcatccccctgggcgtggacacagctgagaccagctacctggagatggctgctggcagcgagcctgagagcgtggaggccagccctgtggtggtggagaagagcaacagctacccccaccagctgtacaccagcagcagccaccacagccacagctacatcggcctgccctatgctgaccacaactacggggcccggcccccacccaccccaccagccagccccccaccttctgtgctgatcagcaagaatgaggtgggcatcttcaccacccccaactttgatgagaccagcagcgccaccaccatcagcaccagtgaagatggcagctatggaacagatgtgacccgctgcatctgtggcttcacccatgatgatggctacatgatctgctgtgacaagtgcagcgtgtggcagcacatcgactgcatgggcatcgaccggcagcacatcccagacacctacctgtgtgagcgctgccagcccaggaacctggacaaggagagagctgtgctgctgcagaggaggaagcgggagaacatgtctgatggagacaccagcgccacagagagcggagatgaggtgcctgtggagctgtacacagccttccagcacacccccaccagcatcaccctgacagccagccgggtgtccaaggtgaatgacaagaggaggaagaagtctggagagaaggagcagcacatcagcaagtgcaagaaggccttccgggagggcagcaggaagagcagccgggtgaagggcagcgcccctgagattgaccccagcagtgatggcagcaactttggctgggagaccaagatcaaggcctggatggacagatatgaggaggccaacaacaaccagtacagcgagggcgtgcagcgggaggcccagagaattgccctgcggctgggcaatggaaatgacaagaaggagatgaacaagagtgacctgaacaccaacaacctgctcttcaagccccctgtggagagccacatccagaagaacaagaagatcctgaagagcgccaaggacctgcccccagatgccctgatcatcgagtaccggggcaagttcatgctgcgggagcagtttgaggccaacggctacttcttcaagaggccctacccctttgtgctcttctacagcaagttccacggcctggagatgtgtgtggatgcccggacctttggaaatgaggcccgcttcatccgccgcagctgcaccccaaatgctgaggtgagacatgagatccaggacggcaccatccacctgtacatctacagcatccacagcatccccaagggcacagagatcaccatcgcctttgattttgattatggcaactgcaagtacaaggtggactgtgcctgcctgaaggagaacccagaatgtcctgtgctgaagaggagcagcgagagcatggagaacatcaacagcggctatgagaccaggaggaagaagggcaagaaggacaaggacatcagcaaggagaaggacacccagaaccagaacatcaccctggactgtgagggcaccaccaacaagatgaagagccctgagaccaagcagaggaagctgagccccctgcggctgtctgtgagcaacaaccaggagccagacttcattgatgacatcgaggagaagacccccatcagcaatgaggtggagatggagagcgaggagcagattgctgagaggaagaggaagatgacccgggaggagaggaagatggaggccatcctgcaggcctttgcccggctggagaagcgggagaagagaagagagcaggccctggagcgcatcagcacagccaagacagaggtgaagacagagtgcaaggacacccagatcgtgtctgatgctgaggtgatccaggagcaggccaaggaggagaatgccagcaagcccaccccagccaaggtgaacagaaccaagcagaggaagagcttcagccgcagcaggacccacatcggccagcagaggcggcggcacaggacagtgtccatgtgcagcgacatccagcccagcagcccagacatcgaggtgaccagccagcagaatgacatcgagaacacagtgctgaccatcgagcctgagacagaaacagccctggccgagatcatcacagaaacagaggtgcctgccctgaacaagtgccccaccaagtaccccaagaccaagaagcacctggtgaatgagtggctgtctgagaagaatgagaagacaggcaagcccagtgatggcctgtctgagcggcccctgcgcatcaccacagatcctgaggtgctggccacccagctgaacagcctgcccggcctgacctacagcccccacgtgtacagcacccccaagcactacatccgcttcaccagccccttcctgtctgagaagagaagaaggaaggagcccacagagaacatcagcggcagctgcaagaagcgctggctgaagcaggccctggaggaggagaacagcgccatcctgcaccgcttcaacagcccctgccaggagaggagccgcagccctgctgtgaatggagagaacaagagccccctgctgctgaatgacagctgcagcctgcctgacctgaccacccccctgaagaagaggcgcttctaccagctgctggacagcgtgtacagcgagaccagcacccccacccccagcccctatgccacccccacccacacagacatcacccccatggaccccagctttgccaccccaccccgcatcaagagtgatgatgagacctgcagaaatggctacaagcccatctacagccctgtgacccctgtgaccccaggcaccccaggcaacaccatgcactttgagaacatcagcagccctgagagcagccctgagatcaagaggaggacctacagccaggagggctatgacaggagcagcaccatgctgaccctgggccccttcaggaacagcaacctgacagagctgggcctgcaggagatcaagaccatcggctacaccagccccaggagcaggacagaggtgaaccggcagtgccctggagagaaggagcctgtgtctgacctgcagctgggcctggatgctgtggagcccacagccctgcacaagaccctggagaccccagcccatgacagagctgagcccaacagccagctggacagcacccacagcggccggggcaccatgtacagctcctgggtgaagagcccagacagaactggagtgaacttctctgtgaacagcaacctgcgggacctgacccccagccaccagctggaggtgggcggcggcttccgcatcagcgagagcaagtgcctgatgcaggatgacacccggggcatgttcatggagaccaccgtcttctgcaccagtgaagatggcctggtgtctggctttggaagaacagtgaatgacaacctgattgatggcaactgcaccccccagaaccccccccagaagaagaaggtgtccctgctggagtacaggaagaggcagcgggaggccaggaagagcggcagcaagacagagaacttccccctcatctctgtgagcccccacgccagcggcagcctgagcaacaatggagatggctgtgccagcagcaatgacaatggagagcaggtggaccacacagccagcctgcccctgcccaccccagccaccgtgtacaatgccaccagcgaggagaccagcaacaactgccctgtgaaggatgccacagccagcgagaagaatgaacctgaggtgcagtggacagccagcacctctgtggagcaggtgcgggagaggagctaccagagggccctgctgctgagtgaccacaggaaggacaaggacagcggcggggagagcccctgtgtgtcctgcagccccagccacgtgcagagcagccccagcagccacagcaaccacatcccccagctgcaggccaagggccctgtgcccagcttcagcgagctgatggaggaccctgaccctgagaaccctgagcccaccaccaccaatgaatgtcccagcccagacaccagccagaacacctgcaagagcccccccaagatgagcaagccaggcagccctggcagcgtcatcccagcccaggcccacggcaagatcttcaccaagccagacccccagtgggacagcacagtgtctgccagcgaggccgagaatggagtgcacctgaagacagagctgcagcagaagcagctgagcaacaacaaccaggccctgagcaagaaccaccccccccagacccacgtgaggaacagcagcgagcagctgagccagaagctgcccagcgtgcccaccaagctgcactgcccccccagcccccacctggagaacccccccaagagcagcaccccccacacccctgtgcagcacggctacctgagccccaagccacccagccagcagctgggcagcccctaccggccccaccacagccagagcccccaggtgggcaccccccagcgggagccccagaggaacttctacccagctgcccagaacctgcctgtgttctggctgctgggcatcatcccccaccagctgaagccctacaccacccacctgatcaaggacctgcacttcttcctgcgggtgctgatccagctgtaccaccgcatcccccacaagctgcacatcatccccctgtgggaccgggaccccagcaccagcctgctggagcagggccacatcgtgcactacctgagccaggtgctgatcagcagccccaaggaccagaccgtcttccagcacctgctgctgcagggctctgtgctgatcctggccctgtggccctgccacatgggcttcaaggacctgagccgccacctgcagtgcctggaccgcttccagttcacagagcaccgctgccaccagcacttcaagaccatcaccatgggccagggcggcatcaagatggacagcaagaacatcttcctgaatgtgctgtag

SEQ ID NO: 199576 - DNA, 1830 bp, Artificial Sequence
  derived and/or modified sequence
atgagcatcgtcatccccctgggcgtggacacagctgagaccagctacctggagatggctgctggcagcgagcctgagagcgtggaggccagccctgtggtggtggagaagagcaacagctacccccaccagctgtacaccagcagcagccaccacagccacagctacatcggcctgccctatgctgaccacaactacggggcccggcccccacccaccccaccagccagccccccaccttctgtgctgatcagcaagaatgaggtgggcatcttcaccacccccaactttgatgagaccagcagcgccaccaccatcagcaccagtgaagatggcagctatggaacagatgtgacccgctgcatctgtggcttcacccatgatgatggctacatgatctgctgtgacaagtgcagcgtgtggcagcacatcgactgcatgggcatcgaccggcagcacatcccagacacctacctgtgtgagcgctgccagcccaggaacctggacaaggagagagctgtgctgctgcagaggaggaagcgggagaacatgtctgatggagacaccagcgccacagagagcggagatgaggtgcctgtggagctgtacacagccttccagcacacccccaccagcatcaccctgacagccagccgggtgtccaaggtgaatgacaagaggaggaagaagtctggagagaaggagcagcacatcagcaagtgcaagaaggccttccgggagggcagcaggaagagcagccgggtgaagggcagcgcccctgagattgaccccagcagtgatggcagcaactttggctgggagaccaagatcaaggcctggatggacagatatgaggaggccaacaacaaccagtacagcgagggcgtgcagcgggaggcccagagaattgccctgcggctgggcaatggaaatgacaagaaggagatgaacaagagtgacctgaacaccaacaacctgctcttcaagccccctgtggagagccacatccagaagaacaagaagatcctgaagagcgccaaggacctgcccccagatgccctgatcatcgagtaccggggcaagttcatgctgcgggagcagtttgaggccaacggctacttcttcaagaggccctacccctttgtgctcttctacagcaagttccacggcctggagatgtgtgtggatgcccggacctttggaaatgaggcccgcttcatccgccgcagctgcaccccaaatgctgaggtgagacatgagatccaggacggcaccatccacctgtacatctacagcatccacagcatccccaagggcacagagatcaccatcgcctttgattttgattatggcaactgcaagtacaaggtggactgtgcctgcctgaaggagaacccagaatgtcctgtgctgaagaggagcagcgagagcatggagaacatcaacagcggctatgagaccaggaggaagaagggcaagaaggacaaggacatcagcaaggagaaggacacccagaaccagaacatcaccctggactgtgagggcaccaccaacaagatgaagagccctgagaccaagcagaggaagctgagccccctgcggctgtctgtgagcaacaaccaggagccagacttcattgatgacatcgaggagaagacccccatcagcaatgaggtggagatggagagcgaggagcagattgctgagaggaagaggaagatggtgtcctgggaggccagcagcctgggcctggtgacagctgccctgcacatggtgattgtggccgccttcacctgggccttcaccctcttctttgaggtgtctgagtag

SEQ ID NO: 199577 - DNA, 6714 bp, Artificial Sequence
  derived and/or modified sequence
cgccgccattttcccagagcgagaggcagtgacactgagcgggcgcagggggccgagtcggagaccgtgccggagttcgggagcggcaacagagtgggcatagacactccgagcagcctcgccgtcgtctctgcgttcctgttgactgcctggctgccccctcccctactcctcggttcctggtgaagaggctgcgcgctgctgtttggggagggggtgtgtggagccgggtcctgtgtccgcagtggctgctgtcggggggtcgcctgttcgcggaggtgcggagagactccttgggggtcgagcactgtggctggcatgccccagtgttttggataccaatgcataggactccatagtaatcgaatttaccagaggcgaacgtcatgagcatagtgatcccattgggggttgatacagcagagacgtcatacttggaaatggctgcaggttcagaaccagaatccgtagaagctagccctgtggtagttgagaaatccaacagttatccccaccagttatataccagcagctcacatcattcacacagttacattggtttgccctatgcggaccataattatggtgctcgtcctcctccgacacctccggcttcccctcctccatcagtccttattagcaaaaatgaagtaggcatatttaccactcctaattttgatgaaacttccagtgctactacaatcagcacatctgaggatggaagttatggtactgatgtaaccaggtgcatatgtggttttacacatgatgatggatacatgatctgttgtgacaaatgcagcgtttggcaacatattgactgcatggggattgataggcagcatattcctgatacatatctatgtgaacgttgtcagcctaggaatttggataaagagagggcagtgctactacaacgccggaaaagggaaaatatgtcagatggtgataccagtgcaactgagagtggtgatgaggttcctgtggaattatatactgcatttcagcatactccaacatcaattactttaactgcttcaagagtttccaaagttaatgataaaagaaggaaaaaaagcggggagaaagaacaacacatttcaaaatgtaaaaaggcatttcgtgaaggatctaggaagtcatcaagagttaagggttcagctccagagattgatccttcatctgatggttcaaattttggatgggagacaaagatcaaagcatggatggatcgatatgaagaagcaaataacaaccagtacagtgagggtgttcagagggaggcacaaagaatagctctgagattaggcaatggaaatgacaaaaaagagatgaataaatccgatttgaataccaacaatttgctcttcaaacctcctgtagagagccatatacaaaagaataagaaaattcttaaatctgcaaaagatttgcctcctgatgcacttatcattgaatacagagggaagtttatgctgagagaacagtttgaagcaaatgggtatttctttaaaagaccatacccttttgtgttattctactctaaatttcatgggctagaaatgtgtgttgatgcaaggacttttgggaatgaggctcgattcatcaggcggtcttgtacacccaatgcagaggtgaggcatgaaattcaagatggaaccatacatctttatatttattctatacacagtattccaaagggaactgaaattactattgcctttgattttgactatggaaattgtaagtacaaggtggactgtgcatgcctcaaagaaaacccagagtgccctgttctaaaacgtagttctgaatccatggaaaatatcaatagtggttatgagaccagacggaaaaaaggaaaaaaagacaaagatatttcaaaagaaaaagatacacaaaatcagaatattactttggattgtgaaggaacgaccaacaaaatgaagagcccagaaactaaacaaagaaagctttctccactgagactatcagtatcaaataatcaggaaccagattttattgatgatatagaagaaaaaactcctattagtaatgaagtagaaatggaatcagaggagcagattgcagaaaggaaaaggaagatgacaagagaagaaagaaaaatggaagcaattttgcaagcttttgccagacttgaaaagagagagaaaagaagagaacaagctttggaaaggatcagcacagccaaaactgaagttaaaactgaatgtaaagatacacagattgtcagtgatgctgaagttattcaggaacaagcaaaagaagaaaatgctagcaagccaacccctgccaaagtaaatagaactaaacagagaaaaagtttttctcggagtaggactcacattggacagcagcgtcggagacacagaactgtcagcatgtgttcagatatccagccatcttctcctgatatagaagttacttcacaacaaaatgatattgaaaatactgtacttacaatagaaccagaaactgaaactgcactagcagaaataattactgaaactgaagttccagcacttaataaatgtcctaccaagtaccccaaaacaaagaagcacttggttaatgaatggttaagtgagaagaatgagaagacaggaaaaccttcagatggcctttcagaaaggcctctacgcataactacagatcctgaagtgttagctacacaactcaattctttaccaggtctcacttacagcccccatgtatactccactcctaagcattatattagatttacttcaccattcctttcagaaaaaaggagaagaaaagaacctactgaaaacatttctggttcatgcaagaagcgatggttgaaacaagctctggaagaagaaaattcagcaattttacatagatttaattcaccctgtcaagaaagatccagaagtcctgcagtcaatggtgaaaataaaagtccactactattaaatgacagctgttcccttccagatttaactacaccactaaaaaaacgaagattttatcagttgctagattcggtttactcagaaacctccacacctactccttccccgtatgctacaccaactcacaccgatattactcctatggacccatcttttgccacgcctccacggataaaatcagatgatgaaacttgtagaaatggttataaacccatatattcaccagttaccccagtaactcctggtacaccaggaaataccatgcactttgagaatatttcttccccagaaagttctccagaaataaagagacgcacttatagtcaagagggatatgacagatcttcaaccatgttaacattggggccttttagaaattctaatttaactgaactgggtctgcaagaaataaagactattggttatacgagccctaggagtaggactgaagtcaacaggcagtgtcctggagaaaaggaacctgtgtcagaccttcagctaggactcgatgcagttgagccaactgccctacataaaaccctggaaacgcctgcacatgacagggctgagcccaacagccaactggactcgactcactctggacggggcacaatgtattcttcctgggtaaagagccctgacagaacaggagttaacttctcagtgaactccaacttgagggacctgacaccctcgcatcagttggaggttggaggaggcttccgaataagtgagtcaaagtgcctgatgcaggatgatactagaggcatgtttatggaaacaactgtgttttgtacttccgaagatgggcttgtatctggtttcggacggactgttaatgacaatttgatcgacgggaattgcacaccccagaatccaccacaaaagaaaaaggtttctctattagaataccgtaagagacaacgtgaagctaggaaaagtggctctaagacagagaactttccactcattagtgtatcaccccatgcaagtggaagcttgagcaacaatggtgatggctgtgccagcagtaatgacaatggggagcaggtggaccacactgctagcctacctttaccaacaccagctacagtttataatgccacttctgaagaaactagcaataactgccctgttaaggatgctactgctagtgagaagaatgaaccagaagttcaatggactgcctcaacttcagtggaacaagtcagagaaaggagttatcagagagctttacttctcagtgatcaccgaaaagataaagatagtgggggagaatcaccatgtgtctcatgttcaccgagtcatgttcagtcttcaccttcatctcattcaaatcacataccccagttgcaagctaagggcccagtcccttctttcagtgaacttatggaagaccctgatcctgaaaatccagaacccacaactacgaatgaatgtccatccccagatacttctcaaaatacttgtaaaagtcctccaaaaatgagcaagcctggttcacctggatctgtaattcctgctcaagcacacgggaaaatattcacaaaaccagatccccaatgggactccacagttagtgcatccgaagctgaaaatggtgttcacctaaaaacagagctccaacaaaaacagctatcaaataacaaccaagcactttcaaagaatcatcctcctcagacacacgttcgtaattcatctgagcaactttcacaaaagctgccttctgtgccaacaaagttgcactgtcctccatcacctcacctagaaaatcctccaaagtcatccacgcctcacacacctgtacagcatggttatctttcaccaaagcctccttcacagcagttaggatctccctacaggcctcatcattcacagtcacctcaagttggaacacctcagcgagagcctcaaagaaacttttatccagcagcacagaaccttccagccaatactcagcaggcaacttctggaacattatttacacagacaccctcaggacaatcttcagcaacatacagtcagtttaaccaacaaagtctgaacagcacggcaccaccccctccacctcctccacctccttcttcgtcttactatcaaaaccagcagccctctgcaaactttcagaattataatcagctcaaaggtagtctttctcaacaaactgtgtttacatcaggaccaaatcaagcacttcctggcaccacaagccagcaaacagttccaggacaccacgtgactccagggcattttttgccctctcagaaccctaccattcaccatcaaactgctgctgccgtagtcccccctcctcctccaccaccacctgctccaggaccgcaccttgtacaacagccgaattcccatcagcaacactctgtagcacatgtagtagggcctgttcatgcggtcacccctgggtcgcatattcattctcaaactgctggacaccacttacccccacccccaccccctcctggtcctgcccctcatcaccatccaccaccccatccatccacaggactccaaggtctacaagcacaacaccagcatgttgtaaattcagcacccccaccaccccctccgccgccaccttccagtgttttggcttctgggcatcataccacatcagctcaagccttacaccacccacctcatcaaggacctccactttttccttcgagtgctcatccaactgtaccaccgtatccctcacaagctacacatcataccactttgggaccgggaccccagcaccagccttctggaacagggccacattgtccattacctgtcacaggtcctcatctccagccccaaggaccaaacagtattccaacacctactgcttcagggttctgtcctcatcctggctctgtggccctgccacatggggttcaaggacctcagcaggcatctccagtgcctggacagattccaattcacagagcacaggtgccaccaacatttcaaaacaattaccatgggtcagggtggcattaaaatggactccaaaaacatttttttaaatgttctgtaagataaactgtatatttcatatgtacctgttaaggtactttttaaagcttgtacatgaacctttgtataaaaaacaccagtgctctttcgttgtatttttctcatttttgctttttaaaattcctttaaaaaatgtgctgttaagccagtattaggtatctttattttgtaagtgaacattccagctgtttttttctggcagatctgatgctgatttgatgctgtatgatcttttttttttttttagttaaattcatttagtgaatgttctattattttatacatacacattaagtactcagctaagtaatggcactatgaggattttttttttctttcctgtcagcagcagttctgtgaatgcatcttaggtataaaaatgcaatacagatttttatattttggtgtggacatggctcattttgttttaccagttatttgcaagcaaaatgtaatttaatgtatagatgatttctaatgtctcctgacaaactgtaaatactgcatttcttttgcgtatataattgcttacagcttttctcatttgatatatagcattgtacatatgacaagtcttttgcaaaactgtgtgatctttgtgaaagtagtacagtatatgacctttaatttcttttttattttaaatatactgtcacactgaagcactggttgggcattttaattcatgttaataaatcacaattatgtcagtttt

SEQ ID NO: 199578 - DNA, 6874 bp, Artificial Sequence
  derived and/or modified sequence
gccgccgccgccgccgccattttcccagagcgagaggcagtgacactgagcgggcgcagggggccgagtcggagaccgtgccggagttcgggagcggcaacagagtgggcatagacactccgagcagcctcgccgtcgtctctgcgttcctgttgactgcctggctgccccctcccctactcctcggttcctggtgaagaggctgcgcgctgctgtttggggagggggtgtgtggagccgggtcctgtgtccgcagtggctgctgtcggggggtcgcctgttcgcggaggtgcggagagactccttgggggtcgagcacataacggggttcgggtgtctcgtgtgtgaacatcacaggtctattctggataagcaggttttgtgaagacatttattctttcttggacctcagatttaccagacatctcatgggtttgtggatgcacttagatgtttgcaatgagcactgtggctggcatgccccagtgttttggataccaatgcataggactccatagtaatcgaatttaccagaggcgaacgtcatgagcatagtgatcccattgggggttgatacagcagagacgtcatacttggaaatggctgcaggttcagaaccagaatccgtagaagctagccctgtggtagttgagaaatccaacagttatccccaccagttatataccagcagctcacatcattcacacagttacattggtttgccctatgcggaccataattatggtgctcgtcctcctccgacacctccggcttcccctcctccatcagtccttattagcaaaaatgaagtaggcatatttaccactcctaattttgatgaaacttccagtgctactacaatcagcacatctgaggatggaagttatggtactgatgtaaccaggtgcatatgtggttttacacatgatgatggatacatgatctgttgtgacaaatgcagcgtttggcaacatattgactgcatggggattgataggcagcatattcctgatacatatctatgtgaacgttgtcagcctaggaatttggataaagagagggcagtgctactacaacgccggaaaagggaaaatatgtcagatggtgataccagtgcaactgagagtggtgatgaggttcctgtggaattatatactgcatttcagcatactccaacatcaattactttaactgcttcaagagtttccaaagttaatgataaaagaaggaaaaaaagcggggagaaagaacaacacatttcaaaatgtaaaaaggcatttcgtgaaggatctaggaagtcatcaagagttaagggttcagctccagagattgatccttcatctgatggttcaaattttggatgggagacaaagatcaaagcatggatggatcgatatgaagaagcaaataacaaccagtacagtgagggtgttcagagggaggcacaaagaatagctctgagattaggcaatggaaatgacaaaaaagagatgaataaatccgatttgaataccaacaatttgctcttcaaacctcctgtagagagccatatacaaaagaataagaaaattcttaaatctgcaaaagatttgcctcctgatgcacttatcattgaatacagagggaagtttatgctgagagaacagtttgaagcaaatgggtatttctttaaaagaccatacccttttgtgttattctactctaaatttcatgggctagaaatgtgtgttgatgcaaggacttttgggaatgaggctcgattcatcaggcggtcttgtacacccaatgcagaggtgaggcatgaaattcaagatggaaccatacatctttatatttattctatacacagtattccaaagggaactgaaattactattgcctttgattttgactatggaaattgtaagtacaaggtggactgtgcatgcctcaaagaaaacccagagtgccctgttctaaaacgtagttctgaatccatggaaaatatcaatagtggttatgagaccagacggaaaaaaggaaaaaaagacaaagatatttcaaaagaaaaagatacacaaaatcagaatattactttggattgtgaaggaacgaccaacaaaatgaagagcccagaaactaaacaaagaaagctttctccactgagactatcagtatcaaataatcaggaaccagattttattgatgatatagaagaaaaaactcctattagtaatgaagtagaaatggaatcagaggagcagattgcagaaaggaaaaggaagatgacaagagaagaaagaaaaatggaagcaattttgcaagcttttgccagacttgaaaagagagagaaaagaagagaacaagctttggaaaggatcagcacagccaaaactgaagttaaaactgaatgtaaagatacacagattgtcagtgatgctgaagttattcaggaacaagcaaaagaagaaaatgctagcaagccaacccctgccaaagtaaatagaactaaacagagaaaaagtttttctcggagtaggactcacattggacagcagcgtcggagacacagaactgtcagcatgtgttcagatatccagccatcttctcctgatatagaagttacttcacaacaaaatgatattgaaaatactgtacttacaatagaaccagaaactgaaactgcactagcagaaataattactgaaactgaagttccagcacttaataaatgtcctaccaagtaccccaaaacaaagaagcacttggttaatgaatggttaagtgagaagaatgagaagacaggaaaaccttcagatggcctttcagaaaggcctctacgcataactacagatcctgaagtgttagctacacaactcaattctttaccaggtctcacttacagcccccatgtatactccactcctaagcattatattagatttacttcaccattcctttcagaaaaaaggagaagaaaagaacctactgaaaacatttctggttcatgcaagaagcgatggttgaaacaagctctggaagaagaaaattcagcaattttacatagatttaattcaccctgtcaagaaagatccagaagtcctgcagtcaatggtgaaaataaaagtccactactattaaatgacagctgttcccttccagatttaactacaccactaaaaaaacgaagattttatcagttgctagattcggtttactcagaaacctccacacctactccttccccgtatgctacaccaactcacaccgatattactcctatggacccatcttttgccacgcctccacggataaaatcagatgatgaaacttgtagaaatggttataaacccatatattcaccagttaccccagtaactcctggtacaccaggaaataccatgcactttgagaatatttcttccccagaaagttctccagaaataaagagacgcacttatagtcaagagggatatgacagatcttcaaccatgttaacattggggccttttagaaattctaatttaactgaactgggtctgcaagaaataaagactattggttatacgagccctaggagtaggactgaagtcaacaggcagtgtcctggagaaaaggaacctgtgtcagaccttcagctaggactcgatgcagttgagccaactgccctacataaaaccctggaaacgcctgcacatgacagggctgagcccaacagccaactggactcgactcactctggacggggcacaatgtattcttcctgggtaaagagccctgacagaacaggagttaacttctcagtgaactccaacttgagggacctgacaccctcgcatcagttggaggttggaggaggcttccgaataagtgagtcaaagtgcctgatgcaggatgatactagaggcatgtttatggaaacaactgtgttttgtacttccgaagatgggcttgtatctggtttcggacggactgttaatgacaatttgatcgacgggaattgcacaccccagaatccaccacaaaagaaaaaggtttctctattagaataccgtaagagacaacgtgaagctaggaaaagtggctctaagacagagaactttccactcattagtgtatcaccccatgcaagtggaagcttgagcaacaatggtgatggctgtgccagcagtaatgacaatggggagcaggtggaccacactgctagcctacctttaccaacaccagctacagtttataatgccacttctgaagaaactagcaataactgccctgttaaggatgctactgctagtgagaagaatgaaccagaagttcaatggactgcctcaacttcagtggaacaagtcagagaaaggagttatcagagagctttacttctcagtgatcaccgaaaagataaagatagtgggggagaatcaccatgtgtctcatgttcaccgagtcatgttcagtcttcaccttcatctcattcaaatcacataccccagttgcaagctaagggcccagtcccttctttcagtgaacttatggaagaccctgatcctgaaaatccagaacccacaactacgaatgaatgtccatccccagatacttctcaaaatacttgtaaaagtcctccaaaaatgagcaagcctggttcacctggatctgtaattcctgctcaagcacacgggaaaatattcacaaaaccagatccccaatgggactccacagttagtgcatccgaagctgaaaatggtgttcacctaaaaacagagctccaacaaaaacagctatcaaataacaaccaagcactttcaaagaatcatcctcctcagacacacgttcgtaattcatctgagcaactttcacaaaagctgccttctgtgccaacaaagttgcactgtcctccatcacctcacctagaaaatcctccaaagtcatccacgcctcacacacctgtacagcatggttatctttcaccaaagcctccttcacagcagttaggatctccctacaggcctcatcattcacagtcacctcaagttggaacacctcagcgagagcctcaaagaaacttttatccagcagcacagaaccttccagccaatactcagcaggcaacttctggaacattatttacacagacaccctcaggacaatcttcagcaacatacagtcagtttaaccaacaaagtctgaacagcacggcaccaccccctccacctcctccacctccttcttcgtcttactatcaaaaccagcagccctctgcaaactttcagaattataatcagctcaaaggtagtctttctcaacaaactgtgtttacatcaggaccaaatcaagcacttcctggcaccacaagccagcaaacagttccaggacaccacgtgactccagggcattttttgccctctcagaaccctaccattcaccatcaaactgctgctgccgtagtcccccctcctcctccaccaccacctgctccaggaccgcaccttgtacaacagccgaattcccatcagcaacactctgtagcacatgtagtagggcctgttcatgcggtcacccctgggtcgcatattcattctcaaactgctggacaccacttacccccacccccaccccctcctggtcctgcccctcatcaccatccaccaccccatccatccacaggactccaaggtctacaagcacaacaccagcatgttgtaaattcagcacccccaccaccccctccgccgccaccttccagtgttttggcttctgggcatcataccacatcagctcaagccttacaccacccacctcatcaaggacctccactttttccttcgagtgctcatccaactgtaccaccgtatccctcacaagctacacatcataccactttgggaccgggaccccagcaccagccttctggaacagggccacattgtccattacctgtcacaggtcctcatctccagccccaaggaccaaacagtattccaacacctactgcttcagggttctgtcctcatcctggctctgtggccctgccacatggggttcaaggacctcagcaggcatctccagtgcctggacagattccaattcacagagcacaggtgccaccaacatttcaaaacaattaccatgggtcagggtggcattaaaatggactccaaaaacatttttttaaatgttctgtaagataaactgtatatttcatatgtacctgttaaggtactttttaaagcttgtacatgaacctttgtataaaaaacaccagtgctctttcgttgtatttttctcatttttgctttttaaaattcctttaaaaaatgtgctgttaagccagtattaggtatctttattttgtaagtgaacattccagctgtttttttctggcagatctgatgctgatttgatgctgtatgatcttttttttttttttagttaaattcatttagtgaatgttctattattttatacatacacattaagtactcagctaagtaatggcactatgaggattttttttttctttcctgtcagcagcagttctgtgaatgcatcttaggtataaaaatgcaatacagatttttatattttggtgtggacatggctcattttgttttaccagttatttgcaagcaaaatgtaatttaatgtatagatgatttctaatgtctcctgacaaactgtaaatactgcatttcttttgcgtatataattgcttacagcttttctcatttgatatatagcattgtacatatgacaagtcttttgcaaaactgtgtgatctttgtgaaagtagtacagtatatgacctttaatttcttttttattttaaatatactgtcacactgaagcactggttgggcattttaattcatgttaataaatcacaattatgtcagtttta

SEQ ID NO: 199579 - DNA, 5139 bp, Artificial Sequence
  derived and/or modified sequence
cgccgccattttcccagagcgagaggcagtgacactgagcgggcgcagggggccgagtcggagaccgtgccggagttcgggagcggcaacagagtgggcatagacactccgagcagcctcgccgtcgtctctgcgttcctgttgactgcctggctgccccctcccctactcctcggttcctggtgaagaggctgcgcgctgctgtttggggagggggtgtgtggagccgggtcctgtgtccgcagtggctgctgtcggggggtcgcctgttcgcggaggtgcggagagactccttgggggtcgagcacataacggggttcgggtgtctcgtgtgtgaacatcacaggtctattctggataagcaggttttgtgaagacatttattctttcttggacctcagatttaccagacatctcatgggtttgtggatgcacttagatgtttgcaatgagcactgtggctggcatgccccagtgttttggataccaatgcataggactccatagtaatcgaatttaccagaggcgaacgtcatgagcatagtgatcccattgggggttgatacagcagagacgtcatacttggaaatggctgcaggttcagaaccagaatccgtagaagctagccctgtggtagttgagaaatccaacagttatccccaccagttatataccagcagctcacatcattcacacagttacattggtttgccctatgcggaccataattatggtgctcgtcctcctccgacacctccggcttcccctcctccatcagtccttattagcaaaaatgaagtaggcatatttaccactcctaattttgatgaaacttccagtgctactacaatcagcacatctgaggatggaagttatggtactgatgtaaccaggtgcatatgtggttttacacatgatgatggatacatgatctgttgtgacaaatgcagcgtttggcaacatattgactgcatggggattgataggcagcatattcctgatacatatctatgtgaacgttgtcagcctaggaatttggataaagagagggcagtgctactacaacgccggaaaagggaaaatatgtcagatggtgataccagtgcaactgagagtggtgatgaggttcctgtggaattatatactgcatttcagcatactccaacatcaattactttaactgcttcaagagtttccaaagttaatgataaaagaaggaaaaaaagcggggagaaagaacaacacatttcaaaatgtaaaaaggcatttcgtgaaggatctaggaagtcatcaagagttaagggttcagctccagagattgatccttcatctgatggttcaaattttggatgggagacaaagatcaaagcatggatggatcgatatgaagaagcaaataacaaccagtacagtgagggtgttcagagggaggcacaaagaatagctctgagattaggcaatggaaatgacaaaaaagagatgaataaatccgatttgaataccaacaatttgctcttcaaacctcctgtagagagccatatacaaaagaataagaaaattcttaaatctgcaaaagatttgcctcctgatgcacttatcattgaatacagagggaagtttatgctgagagaacagtttgaagcaaatgggtatttctttaaaagaccatacccttttgtgttattctactctaaatttcatgggctagaaatgtgtgttgatgcaaggacttttgggaatgaggctcgattcatcaggcggtcttgtacacccaatgcagaggtgaggcatgaaattcaagatggaaccatacatctttatatttattctatacacagtattccaaagggaactgaaattactattgcctttgattttgactatggaaattgtaagtacaaggtggactgtgcatgcctcaaagaaaacccagagtgccctgttctaaaacgtagttctgaatccatggaaaatatcaatagtggttatgagaccagacggaaaaaaggaaaaaaagacaaagatatttcaaaagaaaaagatacacaaaatcagaatattactttggattgtgaaggaacgaccaacaaaatgaagagcccagaaactaaacaaagaaagctttctccactgagactatcagtatcaaataatcaggaaccagattttattgatgatatagaagaaaaaactcctattagtaatgaagtagaaatggaatcagaggagcagattgcagaaaggaaaaggaagatgacaagagaagaaagaaaaatggaagcaattttgcaagcttttgccagacttgaaaagagagagaaaagaagagaacaagctttggaaaggatcagcacagccaaaactgaagttaaaactgaatgtaaagatacacagattgtcagtgatgctgaagttattcaggaacaagcaaaagaagaaaatgctagcaagccaacccctgccaaagtaaatagaactaaacagagaaaaagtttttctcggagtaggactcacattggacagcagcgtcggagacacagaactgtcagcatgtgttcagatatccagccatcttctcctgatatagaagttacttcacaacaaaatgatattgaaaatactgtacttacaatagaaccagaaactgaaactgcactagcagaaataattactgaaactgaagttccagcacttaataaatgtcctaccaagtaccccaaaacaaagaagcacttggttaatgaatggttaagtgagaagaatgagaagacaggaaaaccttcagatggcctttcagaaaggcctctacgcataactacagatcctgaagtgttagctacacaactcaattctttaccaggtctcacttacagcccccatgtatactccactcctaagcattatattagatttacttcaccattcctttcagaaaaaaggagaagaaaagaacctactgaaaacatttctggttcatgcaagaagcgatggttgaaacaagctctggaagaagaaaattcagcaattttacatagatttaattcaccctgtcaagaaagatccagaagtcctgcagtcaatggtgaaaataaaagtccactactattaaatgacagctgttcccttccagatttaactacaccactaaaaaaacgaagattttatcagttgctagattcggtttactcagaaacctccacacctactccttccccgtatgctacaccaactcacaccgatattactcctatggacccatcttttgccacgcctccacggataaaatcagatgatgaaacttgtagaaatggttataaacccatatattcaccagttaccccagtaactcctggtacaccaggaaataccatgcactttgagaatatttcttccccagaaagttctccagaaataaagagacgcacttatagtcaagagggatatgacagatcttcaaccatgttaacattggggccttttagaaattctaatttaactgaactgggtctgcaagaaataaagactattggttatacgagccctaggagtaggactgaagtcaacaggcagtgtcctggagaaaaggaacctgtgtcagaccttcagctaggactcgatgcagttgagccaactgccctacataaaaccctggaaacgcctgcacatgacagggctgagcccaacagccaactggactcgactcactctggacggggcacaatgtattcttcctgggtaaagagccctgacagaacaggagttaacttctcagtgaactccaacttgagggacctgacaccctcgcatcagttggaggttggaggaggcttccgaataagtgagtcaaagtgcctgatgcaggatgatactagaggcatgtttatggaaacaactgtgttttgtacttccgaagatgggcttgtatctggtttcggacggactgttaatgacaatttgatcgacgggaattgcacaccccagaatccaccacaaaagaaaaaggtttctctattagaataccgtaagagacaacgtgaagctaggaaaagtggctctaagacagagaactttccactcattagtgtatcaccccatgcaagtggaagcttgagcaacaatggtgatggctgtgccagcagtaatgacaatggggagcaggtggaccacactgctagcctacctttaccaacaccagctacagtttataatgccacttctgaagaaactagcaataactgccctgttaaggatgctactgctagtgagaagaatgaaccagaagttcaatggactgcctcaacttcagtggaacaagtcagagaaaggagttatcagagagctttacttctcagtgatcaccgaaaagataaagatagtgggggagaatcaccatgtgtctcatgttcaccgagtcatgttcagtcttcaccttcatctcattcaaatcacataccccagttgcaagctaagggcccagtcccttctttcagtgaacttatggaagaccctgatcctgaaaatccagaacccacaactacgaatgaatgtccatccccagatacttctcaaaatacttgtaaaagtcctccaaaaatgagcaagcctggttcacctggatctgtaattcctgctcaagcacacgggaaaatattcacaaaaccagatccccaatgggactccacagttagtgcatccgaagctgaaaatggtgttcacctaaaaacagagctccaacaaaaacagctatcaaataacaaccaagcactttcaaagaatcatcctcctcagacacacgttcgtaattcatctgagcaactttcacaaaagctgccttctgtgccaacaaagttgcactgtcctccatcacctcacctagaaaatcctccaaagtcatccacgcctcacacacctgtacagcatggttatctttcaccaaagcctccttcacagcagttaggatctccctacaggcctcatcattcacagtcacctcaagttggaacacctcagcgagagcctcaaagaaacttttatccagcagcacagaaccttccagccaatactcagcaggcaacttctggaacattatttacacagacaccctcaggacaatcttcagcaacatacactcaaaggtag

SEQ ID NO: 199580 - DNA, 6899 bp, Artificial Sequence
  derived and/or modified sequence
cgccgccattttcccagagcgagaggcagtgacactgagcgggcgcagggggccgagtcggagaccgtgccggagttcgggagcggcaacagagtgggcatagacactccgagcagcctcgccgtcgtctctgcgttcctgttgactgcctggctgccccctcccctactcctcggttcctggtgaagaggctgcgcgctgctgtttggggagggggtgtgtggagccgggtcctgtgtccgcagtggctgctgtcggggggtcgcctgttcgcggaggtgcggagagactccttgggggtcgagcacataacggggttcgggtgtctcgtgtgtgaacatcacaggtctattctggataagcaggttttgtgaagacatttattctttcttggacctcagatttaccagacatctcatgggtttgtggatgcacttagatgtttgcaatgagcactgtggctggcatgccccagtgttttggataccaatgcataggactccatagtaatcgaatttaccagaggcgaacgtcatgagcatagtgatcccattgggggttgatacagcagagacgtcatacttggaaatggctgcaggttcagaaccagaatccgtagaagctagccctgtggtagttgagaaatccaacagttatccccaccagttatataccagcagctcacatcattcacacagttacattggtttgccctatgcggaccataattatggtgctcgtcctcctccgacacctccggcttcccctcctccatcagtccttattagcaaaaatgaagtaggcatatttaccactcctaattttgatgaaacttccagtgctactacaatcagcacatctgaggatggaagttatggtactgatgtaaccaggtgcatatgtggttttacacatgatgatggatacatgatctgttgtgacaaatgcagcgtttggcaacatattgactgcatggggattgataggcagcatattcctgatacatatctatgtgaacgttgtcagcctaggaatttggataaagagagggcagtgctactacaacgccggaaaagggaaaatatgtcagatggtgataccagtgcaactgagagtggtgatgaggttcctgtggaattatatactgcatttcagcatactccaacatcaattactttaactgcttcaagagtttccaaagttaatgataaaagaaggaaaaaaagcggggagaaagaacaacacatttcaaaatgtaaaaaggcatttcgtgaaggatctaggaagtcatcaagagttaagggttcagctccagagattgatccttcatctgatggttcaaattttggatgggagacaaagatcaaagcatggatggatcgatatgaagaagcaaataacaaccagtacagtgagggtgttcagagggaggcacaaagaatagctctgagattaggcaatggaaatgacaaaaaagagatgaataaatccgatttgaataccaacaatttgctcttcaaacctcctgtagagagccatatacaaaagaataagaaaattcttaaatctgcaaaagatttgcctcctgatgcacttatcattgaatacagagggaagtttatgctgagagaacagtttgaagcaaatgggtatttctttaaaagaccatacccttttgtgttattctactctaaatttcatgggctagaaatgtgtgttgatgcaaggacttttgggaatgaggctcgattcatcaggcggtcttgtacacccaatgcagaggtgaggcatgaaattcaagatggaaccatacatctttatatttattctatacacagtattccaaagggaactgaaattactattgcctttgattttgactatggaaattgtaagtacaaggtggactgtgcatgcctcaaagaaaacccagagtgccctgttctaaaacgtagttctgaatccatggaaaatatcaatagtggttatgagaccagacggaaaaaaggaaaaaaaacaagagaagaaagaaaaatggaagcaattttgcaagcttttgccagacttgaaaagagagagaaaagaagagaacaagctttggaaaggatcagcacagccaaaactgaagttaaaactgaatgtaaagatacacagattgtcagtgatgctgaagttattcaggaacaagcaaaagaagaaaatgctagcaagccaacccctgccaaagtaaatagaactaaacagagaaaaagtttttctcggagtaggactcacattggacagcagcgtcggagacacagaactgtcagcatgtgttcagatatccagccatcttctcctgatatagaagttacttcacaacaaaatgatattgaaaatactgtacttacaatagaaccagaaactgaaactgcactagcagaaataattactgaaactgaagttccagcacttaataaatgtcctaccaagtaccccaaaacaaagaagcacttggttaatgaatggttaagtgagaagaatgagaagacaggaaaaccttcagatggcctttcagaaaggcctctacgcataactacagatcctgaagtgttagctacacaactcaattctttaccaggtctcacttacagcccccatgtatactccactcctaagcattatattagatttacttcaccattcctttcagaaaaaaggagaagaaaagaacctactgaaaacatttctggttcatgcaagaagcgatggttgaaacaagctctggaagaagaaaattcagcaattttacatagatttaattcaccctgtcaagaaagatccagaagtcctgcagtcaatggtgaaaataaaagtccactactattaaatgacagctgttcccttccagatttaactacaccactaaaaaaacgaagattttatcagttgctagattcggtttactcagaaacctccacacctactccttccccgtatgctacaccaactcacaccgatattactcctatggacccatcttttgccacgcctccacggataaaatcagatgatgaaacttgtagaaatggttataaacccatatattcaccagttaccccagtaactcctggtacaccaggaaataccatgcactttgagaatatttcttccccagaaagttctccagaaataaagagacgcacttatagtcaagagggatatgacagatcttcaaccatgttaacattggggccttttagaaattctaatttaactgaactgggtctgcaagaaataaagactattggttatacgagccctaggagtaggactgaagtcaacaggcagtgtcctggagaaaaggaacctgtgtcagaccttcagctaggactcgatgcagttgagccaactgccctacataaaaccctggaaacgcctgcacatgacagggctgagcccaacagccaactggactcgactcactctggacggggcacaatgtattcttcctgggtaaagagccctgacagaacaggagttaacttctcagtgaactccaacttgagggacctgacaccctcgcatcagttggaggttggaggaggcttccgaataagtgagtcaaagtgcctgatgcaggatgatactagaggcatgtttatggaaacaactgtgttttgtacttccgaagatgggcttgtatctggtttcggacggactgttaatgacaatttgatcgacgggaattgcacaccccagaatccaccacaaaagaaaaaggtttctctattagaataccgtaagagacaacgtgaagctaggaaaagtggctctaagacagagaactttccactcattagtgtatcaccccatgcaagtggaagcttgagcaacaatggtgatggctgtgccagcagtaatgacaatggggagcaggtggaccacactgctagcctacctttaccaacaccagctacagtttataatgccacttctgaagaaactagcaataactgccctgttaaggatgctactgctagtgagaagaatgaaccagaagttcaatggactgcctcaacttcagtggaacaagtcagagaaaggagttatcagagagctttacttctcagtgatcaccgaaaagataaagatagtgggggagaatcaccatgtgtctcatgttcaccgagtcatgttcagtcttcaccttcatctcattcaaatcacataccccagttgcaagctaagggcccagtcccttctttcagtgaacttatggaagaccctgatcctgaaaatccagaacccacaactacgaatgaatgtccatccccagatacttctcaaaatacttgtaaaagtcctccaaaaatgagcaagcctggttcacctggatctgtaattcctgctcaagcacacgggaaaatattcacaaaaccagatccccaatgggactccacagttagtgcatccgaagctgaaaatggtgttcacctaaaaacagagctccaacaaaaacagctatcaaataacaaccaagcactttcaaagaatcatcctcctcagacacacgttcgtaattcatctgagcaactttcacaaaagctgccttctgtgccaacaaagttgcactgtcctccatcacctcacctagaaaatcctccaaagtcatccacgcctcacacacctgtacagcatggttatctttcaccaaagcctccttcacagcagttaggatctccctacaggcctcatcattcacagtcacctcaagttggaacacctcagcgagagcctcaaagaaacttttatccagcagcacagaaccttccagccaatactcagcaggcaacttctggaacattatttacacagacaccctcaggacaatcttcagcaacatacagtcagtttaaccaacaaagtctgaacagcacggcaccaccccctccacctcctccacctccttcttcgtcttactatcaaaaccagcagccctctgcaaactttcagaattataatcagctcaaaggtagtctttctcaacaaactgtgtttacatcaggaccaaatcaagcacttcctggcaccacaagccagcaaacagttccaggacaccacgtgactccagggcattttttgccctctcagaaccctaccattcaccatcaaactgctgctgccgtagtcccccctcctcctccaccaccacctgctccaggaccgcaccttgtacaacagccgaattcccatcagcaacactctgtagcacatgtagtagggcctgttcatgcggtcacccctgggtcgcatattcattctcaaactgctggacaccacttacccccacccccaccccctcctggtcctgcccctcatcaccatccaccaccccatccatccacaggactccaaggtctacaagcacaacaccagcatgttgtaaattcagcacccccaccaccccctccgccgccaccttccagtgttttggcttctgggcatcataccacatcagctcaagccttacaccacccacctcatcaaggacctccactttttccttcgagtgctcatccaactgtaccaccgtatccctcacaagctacacatcataccactttgggaccgggaccccagcaccagccttctggaacagggccacattgtccattacctgtcacaggtcctcatctccagccccaaggaccaaacagtattccaacacctactgcttcagggttctgtcctcatcctggctctgtggccctgccacatggggttcaaggacctcagcaggcatctccagtgcctggacagattccaattcacagagcacaggtgccaccaacatttcaaaacaattaccatgggtcagggtggcattaaaatggactccaaaaacatttttttaaatgttctgtaagataaactgtatatttcatatgtacctgttaaggtactttttaaagcttgtacatgaacctttgtataaaaaacaccagtgctctttcgttgtatttttctcatttttgctttttaaaattcctttaaaaaatgtgctgttaagccagtattaggtatctttattttgtaagtgaacattccagctgtttttttctggcagatctgatgctgatttgatgctgtatgatcttttttttttttttagttaaattcatttagtgaatgttctattattttatacatacacattaagtactcagctaagtaatggcactatgaggattttttttttctttcctgtcagcagcagttctgtgaatgcatcttaggtataaaaatgcaatacagatttttatattttggtgtggacatggctcattttgttttaccagttatttgcaagcaaaatgtaatttaatgtatagatgatttctaatgtctcctgacaaactgtaaatactgcatttcttttgcgtatataattgcttacagcttttctcatttgatatatagcattgtacatatgacaagtcttttgcaaaactgtgtgatctttgtgaaagtagtacagtatatgacctttaatttcttttttattttaaatatactgtcacactgaagcactggttgggcattttaattcatgttaataaatcacaattatgtcagttttaccagattgtcctgtacaacttctaagatcgggatctgtgtgtttctacagaagttctagttttcaaatatagattgtaaggagccttcaattttctttagcgactactacctcagcaacaggaggcagcaaggggctgttcctgtggtggtttctgtttgcatttttgcaggagccataggaaactactgaaatgattgtgctgggtaaattaaggatctggcatcatacaaaatgaagccagaccactaatgcattacagtagttcttgaataca

SEQ ID NO: 199581 - DNA, 5496 bp, Artificial Sequence
  derived and/or modified sequence
cgccgccattttcccagagcgagaggcagtgacactgagcgggcgcagggggccgagtcggagaccgtgccggagttcgggagcggcaacagagtgggcatagacactccgagcagcctcgccgtcgtctctgcgttcctgttgactgcctggctgccccctcccctactcctcggttcctggtgaagaggctgcgcgctgctgtttggggagggggtgtgtggagccgggtcctgtgtccgcagtggctgctgtcggggggtcgcctgttcgcggaggtgcggagagactccttgggggtcgagcacataacggggttcgggtgtctcgtgtgtgaacatcacaggtctattctggataagcaggttttgtgaagacatttattctttcttggacctcagatttaccagacatctcatgggtttgtggatgcacttagatgtttgcaatgagcactgtggctggcatgccccagtgttttggataccaatgcataggactccatagtaatcgaatttaccagaggcgaacgtcatgagcatagtgatcccattgggggttgatacagcagagacgtcatacttggaaatggctgcaggttcagaaccagaatccgtagaagctagccctgtggtagttgagaaatccaacagttatccccaccagttatataccagcagctcacatcattcacacagttacattggtttgccctatgcggaccataattatggtgctcgtcctcctccgacacctccggcttcccctcctccatcagtccttattagcaaaaatgaagtaggcatatttaccactcctaattttgatgaaacttccagtgctactacaatcagcacatctgaggatggaagttatggtactgatgtaaccaggtgcatatgtggttttacacatgatgatggatacatgatctgttgtgacaaatgcagcgtttggcaacatattgactgcatggggattgataggcagcatattcctgatacatatctatgtgaacgttgtcagcctaggaatttggataaagagagggcagtgctactacaacgccggaaaagggaaaatatgtcagatggtgataccagtgcaactgagagtggtgatgaggttcctgtggaattatatactgcatttcagcatactccaacatcaattactttaactgcttcaagagtttccaaagttaatgataaaagaaggaaaaaaagcggggagaaagaacaacacatttcaaaatgtaaaaaggcatttcgtgaaggatctaggaagtcatcaagagttaagggttcagctccagagattgatccttcatctgatggttcaaattttggatgggagacaaagatcaaagcatggatggatcgatatgaagaagcaaataacaaccagtacagtgagggtgttcagagggaggcacaaagaatagctctgagattaggcaatggaaatgacaaaaaagagatgaataaatccgatttgaataccaacaatttgctcttcaaacctcctgtagagagccatatacaaaagaataagaaaattcttaaatctgcaaaagatttgcctcctgatgcacttatcattgaatacagagggaagtttatgctgagagaacagtttgaagcaaatgggtatttctttaaaagaccatacccttttgtgttattctactctaaatttcatgggctagaaatgtgtgttgatgcaaggacttttgggaatgaggctcgattcatcaggcggtcttgtacacccaatgcagaggtgaggcatgaaattcaagatggaaccatacatctttatatttattctatacacagtattccaaagggaactgaaattactattgcctttgattttgactatggaaattgtaagtacaaggtggactgtgcatgcctcaaagaaaacccagagtgccctgttctaaaacgtagttctgaatccatggaaaatatcaatagtggttatgagaccagacggaaaaaaggaaaaaaagacaaagatatttcaaaagaaaaagatacacaaaatcagaatattactttggattgtgaaggaacgaccaacaaaatgaagagcccagaaactaaacaaagaaagctttctccactgagactatcagtatcaaataatcaggaaccagattttattgatgatatagaagaaaaaactcctattagtaatgaagtagaaatggaatcagaggagcagattgcagaaaggaaaaggaagatgacaagagaagaaagaaaaatggaagcaattttgcaagcttttgccagacttgaaaagagagagaaaagaagagaacaagctttggaaaggatcagcacagccaaaactgaagttaaaactgaatgtaaagatacacagattgtcagtgatgctgaagttattcaggaacaagcaaaagaagaaaatgctagcaagccaacccctgccaaagtaaatagaactaaacagagaaaaagtttttctcggagtaggactcacattggacagcagcgtcggagacacagaactgtcagcatgtgttcagatatccagccatcttctcctgatatagaagttacttcacaacaaaatgatattgaaaatactgtacttacaatagaaccagaaactgaaactgcactagcagaaataattactgaaactgaagttccagcacttaataaatgtcctaccaagtaccccaaaacaaagaagcacttggttaatgaatggttaagtgagaagaatgagaagacaggaaaaccttcagatggcctttcagaaaggcctctacgcataactacagatcctgaagtgttagctacacaactcaattctttaccaggtctcacttacagcccccatgtatactccactcctaagcattatattagatttacttcaccattcctttcagaaaaaaggagaagaaaagaacctactgaaaacatttctggttcatgcaagaagcgatggttgaaacaagctctggaagaagaaaattcagcaattttacatagatttaattcaccctgtcaagaaagatccagaagtcctgcagtcaatggtgaaaataaaagtccactactattaaatgacagctgttcccttccagatttaactacaccactaaaaaaacgaagattttatcagttgctagattcggtttactcagaaacctccacacctactccttccccgtatgctacaccaactcacaccgatattactcctatggacccatcttttgccacgcctccacggataaaatcagatgatgaaacttgtagaaatggttataaacccatatattcaccagttaccccagtaactcctggtacaccaggaaataccatgcactttgagaatatttcttccccagaaagttctccagaaataaagagacgcacttatagtcaagagggatatgacagatcttcaaccatgttaacattggggccttttagaaattctaatttaactgaactgggtctgcaagaaataaagactattggttatacgagccctaggagtaggactgaagtcaacaggcagtgtcctggagaaaaggaacctgtgtcagaccttcagctaggactcgatgcagttgagccaactgccctacataaaaccctggaaacgcctgcacatgacagggctgagcccaacagccaactggactcgactcactctggacggggcacaatgtattcttcctgggtaaagagccctgacagaacaggagttaacttctcagtgaactccaacttgagggacctgacaccctcgcatcagttggaggttggaggaggcttccgaataagtgagtcaaagtgcctgatgcaggatgatactagaggcatgtttatggaaacaactgtgttttgtacttccgaagatgggcttgtatctggtttcggacggactgttaatgacaatttgatcgacgggaattgcacaccccagaatccaccacaaaagaaaaaggtttctctattagaataccgtaagagacaacgtgaagctaggaaaagtggctctaagacagagaactttccactcattagtgtatcaccccatgcaagtggaagcttgagcaacaatggtgatggctgtgccagcagtaatgacaatggggagcaggtggaccacactgctagcctacctttaccaacaccagctacagtttataatgccacttctgaagaaactagcaataactgccctgttaaggatgctactgctagtgagaagaatgaaccagaagttcaatggactgcctcaacttcagtggaacaagtcagagaaaggagttatcagagagctttacttctcagtgatcaccgaaaagataaagatagtgggggagaatcaccatgtgtctcatgttcaccgagtcatgttcagtcttcaccttcatctcattcaaatcacataccccagttgcaagctaagggcccagtcccttctttcagtgaacttatggaagaccctgatcctgaaaatccagaacccacaactacgaatgaatgtccatccccagatacttctcaaaatacttgtaaaagtcctccaaaaatgagcaagcctggttcacctggatctgtaattcctgctcaagcacacgggaaaatattcacaaaaccagatccccaatgggactccacagttagtgcatccgaagctgaaaatggtgttcacctaaaaacagagctccaacaaaaacagctatcaaataacaaccaagcactttcaaagaatcatcctcctcagacacacgttcgtaattcatctgagcaactttcacaaaagctgccttctgtgccaacaaagttgcactgtcctccatcacctcacctagaaaatcctccaaagtcatccacgcctcacacacctgtacagcatggttatctttcaccaaagcctccttcacagcagttaggatctccctacaggcctcatcattcacagtcacctcaagttggaacacctcagcgagagcctcaaagaaacttttatccagcagcacagaaccttccagtgttttggcttctgggcatcataccacatcagctcaagccttacaccacccacctcatcaaggacctccactttttccttcgagtgctcatccaactgtaccaccgtatccctcacaagctacacatcataccactttgggaccgggaccccagcaccagccttctggaacagggccacattgtccattacctgtcacaggtcctcatctccagccccaaggaccaaacagtattccaacacctactgcttcagggttctgtcctcatcctggctctgtggccctgccacatggggttcaaggacctcagcaggcatctccagtgcctggacagattccaattcacagagcacaggtgccaccaacatttcaaaacaattaccatgggtcagggtggcattaaaatggactccaaaaacatttttttaaatgttctgtaa

SEQ ID NO: 199582 - DNA, 2520 bp, Artificial Sequence
  derived and/or modified sequence
gtgacactgagcgggcgcagggggccgagtcggagaccgtgccggagttcgggagcggcaacagagtgggcatagacactccgagcagcctcgccgtcgtctctgcgttcctgttgactgcctggctgccccctcccctactcctcggttcctggtgaagaggctgcgcgctgctgtttggggagggggtgtgtggagccgggtcctgtgtccgcagtggctgctgtcggggggtcgcctgttcgcggaggtgcggagagactccttgggggtcgagcacataacggggttcgggtgtctcgtgtgtgaacatcacaggtctattctggataagcaggttttgtgaagacatttattctttcttggacctcagatttaccagacatctcatgggtttgtggatgcacttagatgtttgcaatgagcactgtggctggcatgccccagtgttttggataccaatgcataggactccatagtaatcgaatttaccagaggcgaacgtcatgagcatagtgatcccattgggggttgatacagcagagacgtcatacttggaaatggctgcaggttcagaaccagaatccgtagaagctagccctgtggtagttgagaaatccaacagttatccccaccagttatataccagcagctcacatcattcacacagttacattggtttgccctatgcggaccataattatggtgctcgtcctcctccgacacctccggcttcccctcctccatcagtccttattagcaaaaatgaagtaggcatatttaccactcctaattttgatgaaacttccagtgctactacaatcagcacatctgaggatggaagttatggtactgatgtaaccaggtgcatatgtggttttacacatgatgatggatacatgatctgttgtgacaaatgcagcgtttggcaacatattgactgcatggggattgataggcagcatattcctgatacatatctatgtgaacgttgtcagcctaggaatttggataaagagagggcagtgctactacaacgccggaaaagggaaaatatgtcagatggtgataccagtgcaactgagagtggtgatgaggttcctgtggaattatatactgcatttcagcatactccaacatcaattactttaactgcttcaagagtttccaaagttaatgataaaagaaggaaaaaaagcggggagaaagaacaacacatttcaaaatgtaaaaaggcatttcgtgaaggatctaggaagtcatcaagagttaagggttcagctccagagattgatccttcatctgatggttcaaattttggatgggagacaaagatcaaagcatggatggatcgatatgaagaagcaaataacaaccagtacagtgagggtgttcagagggaggcacaaagaatagctctgagattaggcaatggaaatgacaaaaaagagatgaataaatccgatttgaataccaacaatttgctcttcaaacctcctgtagagagccatatacaaaagaataagaaaattcttaaatctgcaaaagatttgcctcctgatgcacttatcattgaatacagagggaagtttatgctgagagaacagtttgaagcaaatgggtatttctttaaaagaccatacccttttgtgttattctactctaaatttcatgggctagaaatgtgtgttgatgcaaggacttttgggaatgaggctcgattcatcaggcggtcttgtacacccaatgcagaggtgaggcatgaaattcaagatggaaccatacatctttatatttattctatacacagtattccaaagggaactgaaattactattgcctttgattttgactatggaaattgtaagtacaaggtggactgtgcatgcctcaaagaaaacccagagtgccctgttctaaaacgtagttctgaatccatggaaaatatcaatagtggttatgagaccagacggaaaaaaggaaaaaaagacaaagatatttcaaaagaaaaagatacacaaaatcagaatattactttggattgtgaaggaacgaccaacaaaatgaagagcccagaaactaaacaaagaaagctttctccactgagactatcagtatcaaataatcaggaaccagattttattgatgatatagaagaaaaaactcctattagtaatgaagtagaaatggaatcagaggagcagattgcagaaaggaaaaggaagatggtaagttgggaagccagtagtttgggcttagtgacagctgctctgcatatggtaattgttgctgcctttacatgggcttttacattattctttgaagttagcgaatgatgtgccattgagcatttttatttggtttggtcattgccatttaaataaattccattaatcttgtatttttattggttgttcattagagatttaagaatgtatgacatttaagaaatatgaacattttggaagtaataatattttaataatgccacactgaactattaataaattttaatgccac

SEQ ID NO: 199583 - DNA, 5577 bp, Artificial Sequence
  derived and/or modified sequence
atgagcatcgtgatccccctgggcgtggacaccgccgagaccagctatctggaaatggccgctgggtctgagcccgagtcagtggaagcatctcctgtggtggtggaaaagagtaacagctaccctcaccagttgtacactagcagcagccaccattctcactcctacatcggtttgccgtacgcagatcacaattatggcgcccgcccccccccgaccccaccagccagcccccccccgagcgttctgatcagtaagaacgaggtaggaatttttactaccccgaattttgacgagacgagctccgctactactatctctacctccgaagatgggtcgtatgggaccgatgtcacacgctgtatctgcggattcactcacgacgatggctacatgatttgctgtgataagtgctcagtttggcagcatatcgattgcatggggattgaccggcaacatattcctgatacctacctgtgtgaaagatgtcagccccggaacttggacaaggaaagggcggtgctgctacaacgacgcaaaagagagaatatgtctgacggagacacttctgccacggaatccggcgacgaagtccctgtggaactgtacacagcctttcagcacacacccacgtcaattaccttgacagctagcagggtatctaaggttaatgacaagagacggaagaaaagcggggagaaagaacagcacatctctaaatgtaagaaggcattccgggaaggcagccggaagtcgtccagagttaagggttctgcccccgagatcgatccaagtagtgatggtagcaactttggatgggagacgaaaatcaaagcgtggatggaccggtacgaagaagctaataataatcagtatagtgaaggcgtccaacgggaagctcagcggatagcgcttagattgggaaatggaaacgataaaaaggagatgaacaagtctgatctaaacacgaataatctgctgttcaagcccccagtcgagagtcatatccagaagaataaaaaaattctgaaatccgcaaaggatctccctcctgacgcgctcatcatcgaatatagggggaagtttatgcttcgtgagcagttcgaggctaatggatatttctttaaacggccgtaccccttcgttttgttctatagtaagttccacggattagaaatgtgtgtcgatgcgcgcacgtttggtaacgaggcgagattcattcgccggagttgcacaccgaacgccgaagtacgccacgaaattcaggacgggacgatacacttgtatatttacagtattcacagtatccccaagggcacagaaataaccatcgcatttgacttcgattacggaaattgtaagtacaaagttgactgcgcatgcttgaaggaaaatccggaatgccccgtgctcaagcgcagtagtgaatccatggaaaacatcaacagcggctatgagacgaggcggaaaaaaggcaagaaagacaaggacatctcaaaagagaaggatacccagaatcagaacatcacactggactgtgaaggcaccacgaataagatgaaatcccccgagacaaaacagcggaaactcagtcccctgcggctgtctgttagcaataaccaggaaccggactttattgatgatattgaggagaagacacccatctcaaacgaggtggaaatggaaagcgaggaacagattgccgaaagaaaacggaagatgacacgagaggagcgaaaaatggaagccatcctgcaggcctttgcaaggctggagaagagggagaaacggcgagaacaagcgcttgagagaatttctacagcaaaaaccgaggtgaagaccgagtgcaaggatacccaaatcgtgagtgatgctgaagtgattcaggaacaggctaaggaagagaacgcctctaaacccacccccgcgaaggtcaacaggactaagcagaggaaaagcttttcccgcagtcgtacccacataggccagcaacgaaggcggcacagaaccgtgagcatgtgctcagatattcagccttctagcccagacatcgaagtgacttcccagcagaacgacatcgagaataccgtgctgaccatcgaaccagaaaccgaaacagcactggccgagattattactgagacagaggtgcccgcgcttaacaagtgcccaactaaatacccaaagactaagaagcacttggtgaacgaatggctctcagaaaagaacgaaaagaccggtaaaccatcggatggactttccgaaaggccgctgcgcatcactactgatcctgaagttctagctacccaattgaacagcctacccgggttaacttattccccccatgtttactcgactcctaaacactacatcagattcacttccccatttcttagtgagaagagacggcggaaggagccgaccgagaacatcagcggatcctgcaaaaagcgttggctgaagcaggcactagaggaggagaacagtgcgatactacacaggtttaattccccttgccaggagcgcagcaggtccccagctgtcaatggggaaaataagagtccacttttgctcaatgacagctgttccctgccggatctgaccacaccattgaagaagcggagattctatcaactactcgattccgtctacagcgaaaccagcaccccgacaccctccccttacgccacgcctacccataccgacatcactcccatggacccctcctttgccacaccgcctaggatcaagagtgatgatgagacatgcagaaatggctataagcccatctacagtcctgtgacacccgtgacccctggtacccccggaaataccatgcatttcgaaaatatctcaagtcccgagtcttcccccgaaataaaacggcggacctactcccaggagggctacgaccggtcctccactatgttaactctgggcccgttccgtaacagcaacctgaccgaactgggtttgcaagagatcaagactattggctatacaagcccacgcagcaggaccgaggtgaaccggcagtgccccggtgagaaggagcctgtctccgatcttcagcttggtctcgatgccgtggagcctaccgcactgcacaaaacactggaaaccccagcacacgatcgtgctgagcccaactctcagctcgactctactcactctgggaggggcactatgtatagttcctgggtcaaatctcccgatcgtactggcgtcaacttttctgtgaattcaaacttacgcgatttaactccaagccatcagttggaagtgggcggcggcttccgtatcagcgagtccaaatgcctgatgcaggatgacacccgaggaatgtttatggagacaaccgtcttttgcacgagcgaggatgggctggttagcggattcggcaggacagttaacgacaacttgattgacgggaactgtactcctcagaatcccccgcaaaagaaaaaagtgtctctcttagaatacagaaagaggcaacgagaagcccgtaagtccggtagtaagaccgaaaactttcccctgatttctgtcagcccgcacgcgtcgggatcgctctccaacaatggtgatgggtgtgcgagtagcaatgataatggcgagcaggtggatcatactgcatctctacccctcccaacccctgctacggtgtacaatgcgacctcagaagaaaccagcaataattgtcctgtgaaggatgcaacagcttcggaaaaaaatgagcctgaggtacaatggaccgcgtctacatctgtggagcaagttagagaaagatcttatcagcgcgcccttctgctgtccgaccaccgcaaggacaaggacagcgggggcgaaagcccctgtgtgtcttgctcaccctcacacgtccagtcctctccttcaagccacagtaaccatattccacagctgcaggccaaaggacctgtcccctctttttcggaactgatggaggaccctgaccctgaaaatccggagcctaccacaacaaacgagtgcccaagtccagacacatcgcagaatacctgtaagtcacccccgaaaatgtctaaacctgggtcccctggaagcgtgattcctgctcaggctcacggaaagatatttactaaacccgacccacagtgggatagcactgtgtctgcgtcagaggcagagaatggtgtccacctgaagacagaacttcagcagaaacaactttccaataacaaccaggctctgagcaagaatcacccaccccagacacatgtgcgaaactcctccgaacaactctcacagaaacttccctcggtacctactaagctccattgtcccccttcgccacatctcgagaatccaccaaagagctcaacgcctcacaccccggtgcagcacggatatctctcaccgaaaccaccatcacagcagctgggatctccgtatcggcctcaccattctcagtcaccacaggtaggtacaccccaacgggaaccccagcggaacttttaccccgccgcccagaacctcccggctaatacacagcaggcgacttcaggaactctcttcacacaaacgccctccggtcagagctcagccacctacagtcagttcaaccaacagagcctgaattcgactgccccgccccctcctccacccccacctccaagcagctcatactaccagaatcaacagccctcagccaatttccagaattacaatcaactcaaaggttccctatctcagcagacagtgttcacatccgggcccaaccaggcactgccggggactacctctcagcaaactgtgccaggccatcacgttacccctgggcatttcctcccttcccaaaacccgaccatacaccaccagaccgctgctgccgttgtgcccccccctcccccccccccacctgccccaggcccacacctggtgcaacagccgaactctcatcagcagcatagcgttgcacatgtcgtgggcccagtacacgccgtgacaccagggtcgcatatccattctcagacagcaggtcatcacctgcccccaccccctccccctcctggtcctgccccccaccaccatcctccccctcacccatccaccggtctgcagggtctgcaagcacagcatcagcacgtggtgaactcagccccaccgccacctcccccgccaccacccagcagtgtgctggcaagcggtcaccacaccactagcgcccaggcacttcaccacccccctcatcaagggccccctctgtttccatcaagcgctcacccgacggtacctccatacccttcccaagccacacaccataccactttgggccccgggcctcagcatcaaccttccggtaccggcccccactgccctcttcctgtcaccggcccccatttgcagccgcaggggcccaatagtatccctactccaactgcaagcggtttctgcccccaccctggaagtgtggccctgccacacggggtgcaggggcctcaacaggcgtctcctgtgccgggccagattcccattcacagggcacaggttccacccacattccagaataattaccatgggagcggatggcattag

SEQ ID NO: 199584 - DNA, 5577 bp, Artificial Sequence
  derived and/or modified sequence
atgagcatcgtgatccccctgggcgtggacaccgccgagaccagctatttagagatggccgcaggcagcgagcccgaatccgtcgaagcttcacctgtggtggtcgagaagtcaaatagctatccgcatcagctctatacttcatcgagccaccactctcattcttatatcgggcttccgtacgctgatcataactacggagcccgcccacctccgactcctcccgctagcccgcctcccagcgtcctgattagcaagaacgaagttggaatcttcaccacccctaattttgacgagacctcctcagccaccaccatttctacctcagaagatggcagttatggtacagacgtaacaaggtgcatttgtggattcacacatgatgatggttacatgatctgttgtgataagtgctctgtatggcagcacatcgactgcatgggaatcgacaggcagcatattccagatacctacctgtgcgagcgctgccagccccggaacctggataaggagagagcggtactgctgcagagacgtaagagagaaaatatgagcgacggagatacatccgctactgaatccggcgatgaagttccggtcgaactttataccgcatttcagcacaccccaacatccatcaccctaaccgcttccagagtgagtaaggtgaatgataagagaagaaagaagtctggcgagaaagagcagcatatcagtaaatgtaagaaggctttccgcgaaggtagcagaaagtcctctcgcgtgaaagggtctgcacctgagattgatccttctagcgacgggagtaactttggatgggaaacaaaaattaaggcttggatggaccgctatgaggaagcaaataacaaccaatacagcgagggggtgcagcgggaggcacagagaattgcactgcggctaggtaatggtaacgacaaaaaggaaatgaacaaaagtgacctgaacactaataacctcctgtttaaacctccagttgagtcccacatccagaaaaacaagaagatactcaaaagcgctaaagacctgcctcccgacgcccttatcattgagtacagagggaaatttatgctaagagagcagtttgaagcgaatgggtacttctttaaaagaccatatcctttcgtactgttctatagcaaattccatggcttagaaatgtgcgtcgacgctagaacatttggcaatgaggcccgattcattagacgaagttgtaccccaaatgccgaagtgagacacgagatccaagacggcaccatccatctctacatctacagtatccactccattccaaaagggactgaaataactatcgccttcgactttgactatggtaattgcaagtataaagtggattgcgcctgccttaaggaaaatccggaatgcccagtgctcaagcgctctagtgagtctatggaaaatattaattcagggtatgagactaggcggaagaaaggcaaaaaagacaaagatattagcaaggagaaggacactcagaatcagaatatcactctggactgcgaaggcacgaccaataagatgaagtcccctgaaactaaacagcgtaagctctcacctctgcgtctgtccgtgtccaataaccaggagccagacttcatcgacgacatagaagagaaaacccctatatctaatgaagtcgaaatggaaagcgaagagcagatcgccgaaaggaaacggaagatgacccgggaggaacggaagatggaggccattttgcaagcatttgctagactggagaaacgtgagaaacggagagaacaagcattggagcggatctcaaccgccaagaccgaagtcaaaactgagtgcaaggacacacaaattgtgtccgatgcggaggtgatccaggaacaggcaaaagaggaaaatgcttctaaacctacacccgccaaggttaatcgcactaaacagagaaaatcattttctcgatcccgaacgcacattggccaacagcggagacgccaccgtactgtgtcaatgtgtagtgatatccagccgtccagtccagacattgaggtgaccagtcagcagaatgatattgagaatacggttcttacaattgaaccagaaaccgaaaccgcccttgctgaaattattaccgaaactgaggtgccggctctgaacaaatgcccgaccaaatatccgaagacgaagaagcacctggttaatgagtggctttccgaaaagaatgaaaaaaccggaaaaccatccgacgggctcagtgagcgccctctcagaatcacgactgaccccgaagtgctggccacccagctgaacagtcttcccggtctaacatacagcccccacgtgtatagtacacctaagcactacattagatttacctctccctttctgtctgaaaagcgcagaaggaaagagcctacagagaacatcagcggttcgtgcaagaaacgatggcttaagcaggcgcttgaagaggagaactccgccattctgcacagattcaattccccatgccaggagcggtctcgctctccggccgttaacggggagaacaagtcccccctcctcctgaacgattcatgtagtctgccagatctgactacccctttaaagaaacgacggttctatcagctccttgattcagtctattcggagacgagcacgccaactcccagcccttatgctaccccaactcataccgatattacccctatggatccatcattcgcaaccccaccaagaatcaagagcgacgatgagacatgcaggaacggctacaaacctatatacagtccagtcacgccagtgacacccggcacgccaggcaacaccatgcactttgagaatataagttcccccgagtccagccctgagataaagcggaggacctactctcaggaggggtacgatcgcagtagtacgatgctgactctgggccctttccggaactccaatttaacagagttagggttacaggagattaaaacaatcggatatacatctcctcgatcccgcacggaggtcaataggcagtgcccgggagagaaggagcctgtgtccgacttgcaattggggctggatgcagtggagcccaccgcactgcataaaacgctcgaaacaccagcccatgatcgagctgagcccaacagtcagctggacagcacacattcgggccggggtaccatgtacagtagttgggtgaagagcccagatcgtacaggcgttaatttcagtgtgaactccaatctacgggatctcaccccaagccatcagctggaggttggggggggcttccgcatctcggaatcgaaatgccttatgcaagacgacacaagaggtatgtttatggaaaccactgtcttttgcacttctgaagatggcctggtgagtggcttcggacggaccgttaatgataacctgatagacggcaattgtactcctcagaaccccccacagaagaagaaggtatcgctcctcgagtacaggaaacggcagagagaagcccgcaaatcgggtagtaaaaccgaaaactttcccctaatctcagtgtctccgcacgcttcgggctctctctcgaataacggcgacggttgcgcgagcagcaatgataacggggaacaagtcgatcatactgcttctcttccactccctacaccggccacagtctataacgccacctccgaggagactagcaacaattgccccgtcaaggatgccaccgcctccgagaagaacgagcctgaagtgcagtggacagcctctactagtgtcgaacaagttcgggagcgaagctaccagcgtgcattgctgctctccgatcaccggaaagacaaggactctgggggagagtccccatgcgtttcctgttctccgtctcatgtccagtcgagcccctcttcacattctaaccatattccccagttgcaggctaagggtcccgtacctagttttagtgagcttatggaagacccggatcctgaaaaccctgagccaacaacaaccaatgagtgcccttccccggatactagccagaacacgtgtaaatcccccccgaaaatgtctaaacctggtagcccaggctccgtcatcccagctcaggctcacgggaagatctttaccaagcctgatccccagtgggacagcaccgtgtctgcctctgaggccgagaacggagtgcacctgaagacagagctccagcagaaacagcttagcaacaacaaccaggccttgagcaagaaccacccaccacaaactcatgtcaggaacagtagcgaacagctttctcagaagctcccatctgtccccactaaactgcattgcccaccatctccacatctggaaaatcctccgaaatcaagcactccccatacaccagtccaacacggctacctgtcccctaagcccccatctcagcagctgggtagcccttatcgtcctcaccactctcagtccccgcaggtcggcactcctcagcgcgaaccacagcgcaatttttaccccgccgcacaaaacctcccggccaacacacaacaggcaactagcggaacattgttcacacagaccccgtctggacagtcttccgccacttactcccagttcaatcagcagagccttaacagcaccgcaccccctccacctcctccaccccctccttcgagcagttattaccaaaatcaacaaccttctgccaatttccagaattataaccaactgaaaggcagtctctcacagcagaccgtgttcacttcagggcctaaccaggctcttcctggtacaactagccaacagaccgtgcccggacaccatgtgactcctgggcacttcttgccttcccagaatcctactattcaccaccaaactgccgctgcagtcgtgccccccccaccacctcctccaccagcgccgggacctcacctagtgcaacagcctaactcccaccagcaacactcagtggcccacgttgtgggaccagtacacgcggtaacccctggtagccacattcacagtcagacagccggtcaccatctcccgccccctccacctccacccggcccagctcctcaccaccacccgcccccacatccctcaacaggactccagggtctccaggctcagcaccagcacgtcgtcaatagtgccccgccccccccccccccccccccaccaagcagtgtattggcatctggacaccacaccacaagcgctcaagccttgcatcatccgcctcaccaggggcctccactcttcccatcatccgcgcatccgacagtccctccatatcccagccaggcaactcatcacacaactctgggccctggaccacagcaccaaccatccggcacaggtccacactgcccgctccccgttaccggtccgcacctgcagcctcagggtcctaatagtatccctactcctactgcttcaggattttgtccacatcccgggagcgtcgccctgccccacggggtacaggggcctcagcaggcgtcaccagtaccgggacagattccaattcacagggcccaggtccctccgacgtttcagaacaattaccacggctctggatggcattag

SEQ ID NO: 199585 - DNA, 1770 bp, Artificial Sequence
  derived and/or modified sequence
atgcacttcgagaacatcagcagccccgagagcagccccgagatcaagcgtagaacttattcgcaggaggggtacgaccgatccagtacaatgcttacacttggccccttccggaactctaatctcacagagctgggattacaagaaattaagaccatcgggtacacgagcccccggtcccgtaccgaggtaaatagacagtgcccaggggaaaaggaaccagtgagtgacctgcagctcggcctggatgccgttgagccaacagcactgcataagaccctggagacaccagcccacgaccgggcggaacccaacagccagctggatagtacccattctggtagaggcacaatgtactcatcctgggtgaagtctccggatcggaccggagttaacttctcagtgaattctaatttgagggatctgacgccctcgcaccagcttgaagtcggggggggcttccgtatatccgaatccaagtgtttaatgcaggacgatacccgcgggatgtttatggagaccaccgttttctgcactagtgaggatggactcgtgtcgggctttggccggactgtgaacgacaatcttatcgacgggaattgtacaccccaaaaccccccccagaaaaagaaggtctcacttctcgaataccggaaacggcagagagaggcaaggaaatccggcagcaaaacagagaatttccctctcatatctgtgtctcctcatgcatctgggtccttaagcaataatggagacggatgcgccagcagtaacgacaacggcgaacaagtcgatcacaccgccagtctgccgctacctaccccagccaccgtgtataacgctacaagcgaggagacaagcaacaattgccccgtgaaagatgcaaccgcctccgagaaaaatgaacccgaggtgcagtggacagcctccacttctgtggaacaggtgagagaaagaagttaccaaagagccttgttgttatctgatcaccgcaaagataaggatagtgggggggagagcccgtgtgtgtcctgctcaccatcgcacgttcagagtagccctagctctcacagtaatcatatccctcagctgcaggccaagggaccggtacctagtttcagtgagttgatggaggaccccgacccggagaatccagagcctaccaccactaatgaatgcccatctccagacactagtcagaacacttgtaaaagtccgcctaaaatgagcaagccagggtcaccagggagcgtgattccggcccaggcccacggaaagatctttacgaagccggacccgcaatgggactccactgtgtcggcgtctgaagctgagaatggcgtgcacctgaagactgagctccaacagaagcagctgtccaacaacaatcaggctctcagtaaaaaccaccctccccagacacatgtcagaaactccagtgagcagcttagccagaaactgccttcagtccccaccaaactccactgtccaccttctccccacttggagaatcctcctaaatcaagtactcctcatacaccagttcagcacggttacctctccccaaaaccacctagtcaacagttaggaagcccatacaggccacatcactctcagagcccccaggtcggaacccctcagcgggaaccacagcgcaatttttacccagctgcccagaacctcccagctaacacgcaacaggctactagcggcactctcttcacccagactccgtcaggccaaagctcagccacctacactcagagatag

SEQ ID NO: 199586 - DNA, 5337 bp, Artificial Sequence
  derived and/or modified sequence
atgagcatcgtgatccccctgggcgtggacaccgccgagaccagctaccttgagatggccgctggaagcgagcctgagtccgtggaagcctcccccgtggtagtggagaagtccaactcctatccacaccagctgtacacctctagttctcatcactctcatagctatatcggcttaccctacgccgatcataattatggcgctagaccacctcctactcctcctgccagcccgccgccctccgtactgatctctaagaatgaagttggtatcttcacaaccccgaattttgacgaaacgtcaagtgccactacgataagcacaagtgaagacggatcctatggtactgacgtcacccgctgtatatgcggttttacccacgatgatggctacatgatttgttgtgacaagtgtagcgtctggcagcacatcgactgtatgggcatcgacaggcagcacatcccagacacctatctgtgcgagcgttgccaaccaagaaacttggataaggaacgcgcagtgcttttgcaacgccgcaagagagagaacatgagcgacggcgatacgagtgctactgaatccggggatgaggtcccagtcgaactttataccgccttccagcacacacccaccagcatcaccctgacagcctcgagagtctctaaggtgaacgataagcgtcggaagaaatcaggcgagaaggaacagcacatctccaagtgcaaaaaggctttccgggagggatctaggaaatccagccgcgtaaaaggctctgcccccgagatcgacccaagctcggacggatcaaatttcgggtgggaaacaaaaattaaggcttggatggaccgatatgaggaggccaacaataatcagtacagtgaaggtgtccagagggaggcccagaggattgccctccgcttgggtaatggtaacgacaagaaagaaatgaataaatcagacctcaacactaacaatttgctgtttaaacctcctgtcgagtcccatatccagaaaaacaaaaagatcttaaaatcagccaaagacctgcctcccgacgctttaatcatcgaatatcgcggaaaattcatgctccgtgaacagttcgaggctaacggctatttctttaagaggccttacccctttgttttattctacagcaagttccatgggcttgagatgtgtgttgatgctaggaccttcggaaacgaggccaggtttataaggcgtagttgcactcccaatgcagaagtccgccatgagattcaggatggtacaatacacctctatatttatagcattcattctataccgaaaggcacagagattactattgcctttgatttcgattacgggaattgcaaatacaaggttgattgcgcctgccttaaagagaatcccgaatgtcccgttctgaaaaggtcttctgagtccatggagaacattaattccggctacgagactcgccggaagaaaggcaagaaaacgcgcgaggagcggaagatggaggccatcctccaagcttttgccaggttagaaaaacgcgagaaacgtagggaacaggcactggaacggattagcactgccaagacggaggttaagactgagtgcaaggacactcaaatcgtctcagacgccgaggtgatacaggagcaggctaaggaggaaaatgcgtcaaagcctacgccagcgaaggtgaaccgaaccaagcaacggaagtccttcagcaggagccgcacacacattggacaacagaggcgtagacataggacagtgagtatgtgtagtgatatccagccatcttctccagatatcgaagtcacttcgcaacaaaatgatattgaaaacaccgtgctcaccattgaacccgagaccgagaccgcacttgccgagatcataacagagacggaggtacccgccctaaacaagtgcccaacaaagtatcccaaaaccaaaaaacacctggtcaatgaatggctcagcgaaaagaacgaaaagacaggtaaaccttcagatggtctgagcgaaagacctttgagaattacaactgatcctgaggtgttagcaactcagcttaattctctccccgggctcacttattctcctcatgtctacagcacaccaaagcattacatccggtttacctccccctttctgtccgaaaaacgccggaggaaggagcccacagagaacataagcgggagttgcaaaaagcggtggcttaagcaagcacttgaggaggaaaatagtgctatcctgcacagatttaactctccatgccaagagcgaagccggagtcctgctgttaacggggaaaataagagccctttattactgaatgatagctgttcccttcctgacctcactaccccattaaaaaaacggagattttatcagctgctggacagtgtttatagcgaaacatctacgcctactccaagtccatatgccaccccgacacacacagatatcacgccaatggatccatcatttgctacccctccaagaattaagagtgatgacgagacttgtcggaatggctacaaaccgatctacagcccagtgactcctgtgacgcctgggaccccaggcaatactatgcactttgagaatatttcttcacctgaatcttctcctgaaatcaagcggagaacctactcacaggaagggtacgacagaagttccactatgctgacactcgggcctttccggaactctaatctcaccgaattagggcttcaggagattaagaccatcggctacacgtctccccggtcgcgcaccgaggtgaacaggcagtgcccaggggaaaaggaaccagtgtccgaccttcagctgggactcgacgctgtggagcctactgccctccacaagaccctggagacacccgctcacgatcgcgctgagccgaattcacaactggacagtacacactcgggacggggaactatgtactcctcttgggtcaaaagtcccgataggaccggtgtcaatttctctgttaattcaaatctacgggatttaacgccaagccaccagcttgaagtgggcggtggcttcaggattagcgagagcaagtgtctaatgcaggacgacacaaggggaatgttcatggaaactactgtgttttgcacatccgaggatgggctagtgtctggctttggtcgcaccgtgaatgataacctgatagacggtaattgcacacctcagaaccccccacaaaaaaagaaggtgtctctgcttgagtatagaaaacgccagagggaggcacggaagtccggttccaagaccgaaaatttcccacttatctcggtcagtccccacgcgagtggatctcttagcaacaatggcgacggctgtgcctccagcaatgacaatggcgaacaggtagatcacaccgcgtctcttccccttcctacccctgccactgtctataacgccacctcagaagaaacttcaaataattgtccagtaaaggacgccacagcgagcgagaagaacgaacccgaggtgcagtggaccgcctcgacgtcagtcgaacaagtaagagagcgaagctaccagcgggccctgctcctttcggatcatcgcaaagacaaagatagtggtggcgaatctccgtgcgtcagctgctctccctcccacgtccaatcctcacctagctcccactccaaccacataccccagctacaggccaaaggccccgtacccagcttttccgagctgatggaagatcccgaccccgagaaccctgaacccaccactaccaatgagtgcccatcccctgacaccagccagaacacatgcaagagcccaccaaagatgtcgaagccggggagcccagggtcagtgattccagcccaggcccacggaaaaatttttaccaaaccagatccccagtgggactccactgtaagtgcatctgaagcagagaatggagtccacttgaagactgagctccagcaaaagcagctcagcaacaacaaccaagccttatccaaaaatcatcccccccagacacatgtccgcaacagttcagaacagttaagtcagaaactgcccagtgtaccaacaaagctgcactgtcctccctcgccccatttggaaaacccaccaaagagctcaactccccacactcctgtgcaacacggttatttaagcccaaagccgcctagtcaacaactgggatctccctatcgcccacaccacagtcaatctcctcaggtcggcacacctcaacgcgagccccagcggaacttttatccggcggctcagaacctgcctgccaatactcagcaggctacatccggtactctatttactcagactccttctggccaatctagcgcaacctacagccaattcaaccagcagtccttgaatagtacagcgccaccaccccccccccctccaccaccgtcttcatcgtactatcaaaatcaacagccaagcgcgaactttcagaattacaatcagctcaagggctccctttcccagcagactgtgtttacttccgggccaaaccaagccttgccagggacaacttcacagcagactgtgcctggccaccacgtgaccccagggcattttcttccctcccaaaaccctaccattcatcatcagactgcagctgccgtggtgccaccgccgccaccaccccctcctgcacccgggccccacctcgtccagcagcccaattctcaccagcagcactctgtggctcatgtggtgggccccgtgcacgccgttacgcctggttctcatatccattcgcagacggcaggacatcatctcccaccaccaccgccacctccaggcccggcgccacaccaccacccccctcctcatccatccacgggtctccagggtcttcaggcacaacaccagcatgtagtaaactccgctccgcctccccccccccctccccccccttcctcagtgttagccagtggtcatcacactactagcgcccaagcactgcaccaccccccacatcaggggccccctctttttccatcctctgcgcatcccaccgtccctccctacccaagccaggccacacatcacaccaccctcggtcccggtccccagcatcagccatcgggaacaggtcctcattgccccctccctgtgacgggcccacacctgcagccccagggcccaaactctattcccacaccaacagcatctggtttctgcccccatcccggatctgtggctctcccacacggagtccagggcccccagcaggcttccccagttcctggtcagatccccattcatcgtgcccaggtgcctccaactttccagaataattatcacgggagcggctggcattag

SEQ ID NO: 199587 - DNA, 4962 bp, Artificial Sequence
  derived and/or modified sequence
atgagcatcgtgatccccctgggcgtggacaccgccgagaccagctacctagagatggccgccggctcagaacccgaaagcgtggaggcttccccagtggtagtagagaagtctaactcatacccccatcagctttatacatcttcctctcaccatagccattcctacattgggttgccgtatgccgaccacaactacggcgcaaggcccccaccaaccccacctgcatccccaccaccgtcagtgctcattagtaagaacgaagtcgggatcttcacgacacccaatttcgatgaaacttcatctgccacaacaatatcaaccagcgaggatgggtcctatggcaccgacgttaccagatgtatctgtggcttcacacatgatgacggctatatgatctgctgtgacaagtgcagcgtgtggcagcacatcgattgcatgggtattgaccggcagcatatcccggatacctatctctgcgagcgatgtcaaccacgtaacctcgacaaagaaagagctgtcctgctccaaagacggaagagggagaatatgtccgacggcgacactagcgctaccgaatccggagacgaggtgccagtagagttgtatacagcctttcagcacacgccaaccagcataacgctcaccgcatctcgcgtgtctaaggtcaatgacaagagacgcaaaaagtccggcgagaaggagcagcacatcagcaagtgcaaaaaagctttcagagaagggtcaaggaagagctcccgcgtgaagggctctgctcccgaaatcgaccccagctctgatgggtcaaatttcggatgggaaactaagatcaaggcctggatggatcgttacgaagaggccaacaataatcagtacagtgagggggtccagcgcgaggcacaaaggattgctctgcggcttggcaacggaaatgacaaaaaggaaatgaacaagagcgacttgaacacaaacaatctcctttttaagccaccagtggagtcccacatccagaaaaacaaaaagattctgaagagcgccaaggatttgccccccgacgcactaattatcgagtaccgcgggaagtttatgctgagggagcagttcgaggccaatgggtactttttcaagagaccctacccatttgtccttttctacagcaaatttcatggtctcgaaatgtgtgttgacgcaagaaccttcggcaacgaggcacgattcatccggcggagttgcacccccaacgctgaggtgcgtcacgagatccaggatgggactatccatctgtacatctactccattcactccatccccaaggggactgaaataactattgcattcgattttgattatggtaactgcaagtataaagtggattgcgcttgcctgaaagaaaaccctgaatgccccgtcttgaagaggtcctctgagtccatggagaacatcaattcaggatatgagacacgacgcaaaaagggcaagaaagataaggacatctctaaagagaaggatacccagaaccagaacatcacactggactgtgaggggacaactaacaagatgaagtccccagagaccaaacagcggaagctgagcccactgcgcttgagcgtttctaacaatcaggagcctgattttatagatgatattgaagagaagacacccatctccaacgaggttgaaatggagtctgaagagcagatcgctgaacgcaaacggaaaatgactcgtgaggaacgcaaaatggaggcgattctgcaggcatttgcccggcttgaaaaacgggagaagagacgtgagcaagccttagagaggatttctacagctaagactgaagtgaaaaccgaatgcaaggatacgcagatagtgtcagacgcggaagtgatccaagaacaagcgaaggaagagaatgcatccaaacccacccccgcgaaagtgaatagaactaaacagagaaaaagcttttcgagatccaggacacatattggccagcaacgacggcgacatcggaccgtgagcatgtgctccgacatccagccatcctccccagacatagaagtgacgagccagcagaatgatatcgagaataccgtgctcactatcgagccagagactgagaccgcgttggccgagattatcacagagactgaggttccagcactcaacaaatgtcccaccaagtaccctaaaaccaagaaacatctggtcaacgagtggctgtccgaaaagaatgaaaaaacagggaagcctagcgacggcctctcagaacggcccctgaggataacaaccgatccagaggtgctagccacgcagctgaatagcctgccgggcctcacttactccccacacgtctactctactcctaagcattatattagattcacctcacccttcctctctgagaagcgtagacgaaaagaacccacagagaacatcagtgggtcgtgcaaaaagagatggctaaagcaggctctggaagaagaaaacagcgccatcctacatcggttcaactccccatgccaggaacgtagtagatctccagcggtgaatggcgagaacaaatctccgctgctccttaacgattcatgctctcttcctgacctcacaacccccctgaagaaacgccgcttctatcagctcctggacagcgtgtactcagaaacttccacccctacaccaagcccctacgctaccccgacccataccgatatcactcccatggacccttccttcgcaaccccacctcggattaagagtgatgacgaaacttgccgcaacggctacaaaccgatctattcccccgtgactccagttacacccggcactcctggcaatacaatgcacttcgagaacatctcctcacccgagagttcacccgagatcaagagacggacctacagtcaggagggatatgaccggagctccacaatgcttacgcttgggccattcaggaacagcaatctcacagagctcggactgcaggagatcaagaccattggttacaccagccccaggagcagaaccgaagtcaatagacagtgcccaggagagaaagaacctgtgtctgatttgcaactcggactagatgccgtggaaccgactgctcttcataaaacacttgagacgcccgctcacgaccgcgccgagcctaactctcagctggatagcactcattccgggagaggaaccatgtacagctcttgggtcaagagtcctgatcggacgggcgttaatttctctgtcaacagcaacctcagggaccttacaccctctcatcaactcgaggtaggcggggggtttcgaattagcgagtctaagtgcctgatgcaagacgatacccgcgggatgttcatggaaacaactgtgttctgcacctcagaagacggtttggtgtcagggtttgggcgaacagtgaatgacaatctgatcgatggaaattgtacgccccagaatccaccacagaagaagaaggtctccctgctggaatacaggaaaaggcagcgggaagctcgcaaaagcggttctaagaccgaaaattttcccctgatctcagtctcaccccatgcctctggatctctcagcaacaatggcgatggctgtgcgtcaagtaatgataatggggagcaggtcgaccacactgcctctttgccactgcccacccctgctaccgtgtataatgccaccagtgaagagacctccaataattgccccgtgaaggacgccaccgcatctgagaagaatgaacccgaagttcagtggactgcatcaacatcggtagaacaggtccgcgaacggagttaccagagggctcttctgctgagtgatcacagaaaggacaaggattctggcggtgagtccccatgcgtctcatgctcaccaagccatgtgcaatcttccccttccagtcactcaaatcatataccacaattacaggcaaaaggacctgtgcctagcttctcggaattgatggaggaccccgaccccgaaaaccccgagcctaccaccacaaatgaatgcccatccccggacacaagccaaaatacttgcaagtcgccacccaagatgtcaaagcctgggagtcctggctccgtcattcccgcccaggcccacggaaaaatattcacgaaaccagacccccagtgggactccaccgtgtctgcctcagaagcagagaacggagtccacctcaagactgagctgcaacagaaacaactctccaataataaccaggctctgtctaagaatcatccaccccagactcatgtcaggaattcctccgagcagctctctcaaaagctgccctctgtgcctactaaactgcactgtccgccatctcctcacctggagaaccctccaaagagtagcacaccccacactccagtgcagcatgggtatctgagccctaagccacccagccaacagttgggctcaccataccgcccccaccattcccagtcacctcaagtggggactccccaaagagaaccacagcggaatttttatccagctgcccagaatctgccagtgttctggctacttggcattatcccacatcaattgaaaccatatacaacccatctgatcaaggacctgcatttctttctccgggttctgatccagttgtaccaccggattcctcacaagctgcacataatcccgctgtgggacagagacccatcaacgagcctactcgaacaaggtcacatcgtacactacttaagtcaggtcctcatcagctcccccaaagatcagactgtgttccagcacctcctattgcaggggtccgtgctcatcttggctttatggccatgtcacatgggcttcaaagacctcagccgccacctgcagtgcttagacaggttccaattcacagagcaccgatgtcaccaacattttaagactatcactatggggcaagggggtataaagatggattctaagaacatttttctcaacgtgttgtag

SEQ ID NO: 199588 - DNA, 1830 bp, Artificial Sequence
  derived and/or modified sequence
atgagcatcgtgatccccctgggcgtggacaccgccgagaccagctatctggaaatggcagcaggatccgagccagaaagcgtcgaggctagccctgtcgtggtagagaagagtaactcttacccacaccaactctacacatctagttcccatcactcccattcttacattggcctcccatatgcagatcataactacggtgctcgaccgccccctacacccccagcgagccccccccccagtgtgctaataagtaagaatgaagtcggtatcttcactactcccaattttgatgaaacaagctcagcgacaaccatcagcacctccgaggacggctcttacggtacagacgtgaccaggtgtatctgcggattcactcacgatgatggatacatgatttgttgcgacaagtgttcggtgtggcaacacatagactgtatgggcattgacaggcagcacatcccagacacctatctctgtgaaaggtgccagccgaggaatctcgacaaggagcgcgccgtcctgctgcaaagaagaaagcgagagaacatgtccgatggagatacatccgccactgagtccggtgatgaggttccagtggaactgtacacagccttccagcacactccaacatcaattacgctgaccgcttcccgcgtgagcaaagtgaacgacaagcggaggaagaagtccggcgagaaggaacagcatatttccaaatgcaagaaggcgtttcgggaagggtctcgtaagtcctccagggtgaagggctcagctcccgagattgatccctcatccgatggatccaacttcggatgggagaccaagattaaagcttggatggatcgctatgaggaggccaataacaaccagtactcagagggcgtacagagagaggcacaacgcattgcactacgcctaggcaacggcaatgacaaaaaggagatgaataagtccgatcttaacaccaataatctcttgttcaagccccctgtggaatcgcacatacagaagaacaagaagatcctcaagagcgcgaaagatctgcccccagacgccttgatcatcgagtatagggggaaattcatgttgagggaacaattcgaagccaacggttacttctttaaacggccgtatccattcgtgctgttctacagcaaattccatggtctggaaatgtgtgttgacgccaggaccttcgggaacgaggcccggttcatcaggagaagctgcactccaaacgctgaggtcaggcacgaaattcaagacggcaccatccacttatacatctattcaatacattctatccctaaaggaaccgaaattacaattgcattcgattttgactacgggaattgcaagtataaggtcgattgtgcttgtctgaaggagaatccagaatgtccagtactcaaacggtctagcgaatccatggaaaacatcaacagcgggtacgaaacgcggagaaagaaaggaaagaaggataaggacatatctaaggagaaagacacgcagaaccaaaacatcaccttggattgtgaaggcacaaccaacaagatgaaaagccctgaaaccaaacagcgaaagttgagcccccttcgccttagcgtctctaacaatcaggagccagatttcatagacgacatcgaggagaagacacctatctcaaacgaagttgaaatggagagtgaagaacaaatcgccgagcggaagagaaaaatggtgtcttgggaagccagtagcttaggactagtgactgctgctctacatatggtgatagtggcggccttcacttgggcgtttacccttttctttgaagtgtcagagtag

SEQ ID NO: 199589 - DNA, 5576 bp, Artificial Sequence
  derived and/or modified sequence
atgtccattgtgatacccctaggcgtcgatacggctgagacaagctacctggagatggcggctggcagcgagccagaatccgtggaggcttcccccgtcgtggttgagaaaagtaatagctatcctcatcaactttataccagctccagtcatcattcacattcttatattgggctgccatatgctgatcacaactacggagcgcgtcctccccctacaccacctgcatcccctccaccgtctgtcctcatctccaaaaatgaagtcggaatcttcaccacaccaaactttgacgagacctcaagtgcaacaaccatatcaacatcggaagatggttcatacggcacagatgtaactagatgtatctgcggcttcacacacgatgacggctacatgatctgttgcgacaaatgctctgtttggcagcacatcgactgtatggggatcgatcgtcagcatatcccagacacttatttgtgtgagaggtgtcagcccagaaatttggataaggaaagggcagtcctccttcagagacggaaaagggagaacatgagcgatggcgatacaagcgctactgagagcggcgatgaggttccagtcgagctgtatacagccttccagcacacccctacgtccattactctcactgcttcaagagtatcaaaggtgaacgataagaggcggaagaagtcaggggaaaaggagcagcatattagcaagtgtaaaaaggctttccgtgaaggttcaagaaaaagcagcagagtcaaggggtctgctcccgaaatcgacccttcctccgacggatccaatttcggttgggaaactaaaatcaaggcgtggatggaccgatacgaggaagcaaacaataaccaatactccgaaggggtgcagcgggaggcgcagcggatcgccttaaggctcggaaacggcaatgacaaaaaggaaatgaataaaagcgatttgaatactaataacttgctattcaagccgcctgttgaatcccacattcagaagaataaaaaaatcctgaaatcggcaaaagacttgccccctgacgcgttaatcatcgaataccgcggtaaattcatgctccgcgagcaattcgaagcaaatgggtacttcttcaaacgcccatatccgtttgtactcttctactctaaatttcatggcttggaaatgtgcgtggatgctcgcactttcggcaatgaggctaggtttatcaggcggtcatgcaccccgaacgcagaggtcagacatgaaatccaggatgggaccattcacctatacatctatagtattcattcgattccaaaggggactgaaatcaccattgctttcgactttgactacgggaactgtaagtataaggtggactgcgcttgcctcaaggagaatcccgaatgccctgtactgaagcggtcctctgagtccatggagaatattaatagtggctatgagacgcgtcggaagaaagggaaaaaagacaaagacatcagcaaagaaaaggacacacagaaccagaatatcaccttagactgtgagggtacaacaaacaagatgaagagcccagagactaagcagcggaaactttcccctctgaggctctcggtttcaaataatcaggaacctgactttatcgacgacatcgaagaaaaaacacctatctctaacgaggtcgagatggaatctgaagagcaaatagccgagagaaaacggaaaatgacccgggaggaaaggaagatggaggcaattttgcaggccttcgccagactggagaaacgagagaaaagaagagagcaagctctcgaacgcattagcaccgctaaaactgaggtgaaaacagagtgtaaggacacgcagatagtttccgatgccgaggtgattcaagagcaggcaaaggaggaaaatgcatccaaacccaccccagccaaggtcaaccgtaccaagcaaagaaaaagcttctctaggtcccgtactcacatcggacaacagcggaggagacaccgtaccgttagcatgtgtagcgatatccagccaagttcccctgatattgaagtgacaagtcagcagaatgacatcgaaaatactgtcctgaccatcgagcctgagacagaaacagccttagcggagatcataaccgaaacagaggtgccagccctgaacaaatgtccgacaaagtaccctaagacgaaaaaacacctcgttaacgagtggctttcagaaaaaaatgagaagactggaaaaccttctgatggactgtcagagcgtccgctgaggattactaccgatcctgaggtgctagccacccaactgaattccctcccgggacttacgtatagccctcacgtctattccaccccaaagcattatattcggttcacttctcccttccttagtgagaaacgcaggaggaaggaaccaacagaaaacatttccggctcctgcaagaagaggtggctcaaacaggcactggaggaagagaatagcgccattctgcaccgattcaatagtccctgccaggagagatcaagaagtccagcagtcaatggtgagaataaatcgcccctgctcctgaacgatagttgttccctaccggatctaaccacaccactgaaaaagcgtaggttttaccaattactggattccgtttattcagaaacaagcaccccaacgccatccccctacgccaccccgacacacacggatattaccccgatggatccttcatttgccacaccccctcggataaagtccgacgacgaaacgtgcagaaatggttataagccaatctattccccggttactccagtcactcccggaacccctggcaacactatgcactttgagaatatttctagtcccgaaagtagtcccgagatcaagagaagaacttattcccaagagggatacgacaggagtagcacaatgttgacactcgggcctttccggaattcgaatctgacggagctcgggctccaagaaattaaaactatcggctatacgtcccccagatctaggaccgaggttaaccggcaatgcccaggcgagaaagaaccagtctcagatttacagcttggattagacgctgtggagcctaccgcgctccacaaaaccctggagaccccagcccatgacagggctgaaccaaactctcaactggatagtacccatagcggacggggtaccatgtatagcagttgggtaaaatcgcccgaccgcaccggggtgaacttttctgtgaatagcaatcttagagatttaactccttcccaccaactggaagtaggaggcggatttcgaatttccgagtctaagtgcctgatgcaggacgacacaagaggaatgttcatggagacaactgttttttgtacaagtgaagatggcctggtgtcaggcttcggcaggactgtgaacgacaacctcatcgatggcaactgtaccccacagaatccaccgcagaagaaaaaggtgtcactcctagagtacaggaagcgtcagcgagaggcacgtaagagcgggagcaaaacagagaacttcccactcatctctgtgagtcctcacgcatccgggtcactgtccaataacggagacgggtgcgcgagttctaacgacaatggggagcaggtggaccacaccgcttcgcttcccctgcctactcccgctacagtgtacaacgccacttctgaggagacaagcaataactgcccggtgaaggatgccactgcatctgagaaaaatgaaccggaggtacagtggactgcttctacgagcgtggagcaggtgcgtgaaaggagctaccagcgcgcactactcctcagcgatcatcgcaaggataaggactccggtggggagagcccgtgcgtttcttgcagcccctcacatgtgcagagcagcccatcttctcactcaaatcatatcccacagctgcaggcaaaggggcctgtgccaagctttagcgagctaatggaagatcctgaccccgagaaccctgagcctactactaccaatgagtgtccctccccggacacaagccagaatacatgtaagtcgccccctaaaatgtcaaagccaggcagccctggcagtgttatccctgcccaggcccatgggaagatcttcaccaaacccgatccgcagtgggactcaactgtaagcgcctccgaagccgagaatggagtacacttaaagactgagcttcaacagaagcagttgtcaaataacaaccaggctctttcaaaaaaccacccccctcagacacatgtacggaatagtagcgaacagctctcccaaaaactccctagtgtacctacaaaactgcactgcccgcctagcccccatctcgaaaaccccccaaaaagttctacaccccacacgcccgtgcagcacgggtacctctctcctaagccccctagccaacagctgggcagcccttacaggccccatcattcacagtcgcctcaagtgggaactcctcagcgggaaccccagcgtaacttctacccagccgcacagaatttacccgctaatacacaacaagctacctctggcaccctgtttacccagacaccatccggccaaagtagcgccacctacagtcagttcaatcagcaatctttgaactccaccgcgcctccacctccacctcccccaccaccatccagttcgtattaccagaatcaacagccatcggccaacttccagaattacaaccagctgaaagggtcactatcccagcaaacagtgtttactagcgggccaaaccaggccttgcctggtaccacaagtcagcaaactgtgccaggccaccatgtaacccccggacattttctgccttctcagaatcccaccatccatcatcaaacagctgccgctgtggtgccccctccccctccccctccacccgcacccggaccccatctggtgcagcagccaaattcccatcagcagcactcagtggcccatgtcgtgggcccagtgcacgccgtcacacccggtagccacattcactctcagaccgcgggacatcacctgcccccaccacccccaccacccggtccagctccgcaccatcacccaccaccacatccatccacaggtttgcaagggcttcaggcacagcaccagcacgttgtaaatagtgccccaccccctcctccacctccgccaccgtcgtctgtcctggcatctggccaccacacaacgtcggcccaggccctgcaccaccccccacaccagggacctcctctatttccatcaagcgcccacccaactgtgccaccgtatccatcccaggcaactcatcatactaccctggggccagggccacaacatcagcctagtggcacaggaccacactgtcctctgccagtcaccgggcctcatctgcagcctcagggcccaaattcaatcccgactcccaccgcatccggattctgcccccaccctggcagcgtggcactgcctcatggcgtccaggggcctcagcaagccagcccggtacccggacagatccccattcaccgagcccaggtgcctccgacctttcaaaataattatcacggcagcgggtggcacta

SEQ ID NO: 199590 - DNA, 5577 bp, Artificial Sequence
  derived and/or modified sequence
atgtctattgtgatccccctgggagtcgacaccgccgaaaccagttatctcgaaatggccgcaggaagtgaacccgagtctgtggaggctagccccgttgtggtggagaagtctaactcatacccgcatcagctgtatacttcttcaagccaccattcacactcctacatcggtcttccatatgccgatcacaattatggagccaggcccccacccaccccgcctgcttcgcctcccccatctgtcctgatctcaaagaacgaggtgggcatttttacaacacctaactttgacgaaacctcttccgcaaccacaatctctaccagcgaggacggctcctatggaactgatgttactcgatgtatctgcggattcacacatgatgacggctatatgatatgctgtgacaagtgttctgtgtggcagcatattgattgcatgggtattgatcggcagcatatacctgatacctatttatgcgagaggtgccagcctcgaaacctagataaggaacgcgcagtcctgctccagcggagaaaacgggagaacatgagcgatggggatacaagcgccacagagtccggcgatgaggtgcctgtggagctttacactgccttccagcatactcccactagcataacactgacagcctcccgtgtgtccaaggtcaacgataaaagaaggaaaaagtctggcgaaaaggagcagcatatcagtaagtgtaagaaggcatttagggagggctctaggaaatcctcgagagtcaaggggagcgccccagaaatcgacccatcttctgatggttctaattttggatgggaaacgaagattaaggcctggatggatcggtatgaagaggccaataataaccagtatagtgaaggtgtgcaacgtgaagcccagcgcatagcgctgaggctcggtaatggtaacgacaagaaagagatgaataagtccgatttgaacacgaacaatctcctgtttaaaccgccagtggaatctcatattcagaagaataagaaaatcttgaaaagtgcgaaagatctacctcccgacgcactgatcatagagtatcggggtaaatttatgctgagggagcagttcgaagccaatggatatttcttcaaaaggccttacccattcgtgctattttatagtaagttccacggactggaaatgtgtgtggacgctcgtacattcgggaatgaggcccgtttcatcagacgaagttgtacccccaacgcagaggtcagacatgagatccaggatggaactattcatttgtacatctattccatccattccataccaaagggaactgaaatcacaattgcgttcgacttcgattacggtaattgcaagtataaagtggattgtgcctgcctgaaggagaatcccgaatgtcccgtgctcaaacgctcttccgagtctatggaaaacataaacagtggctatgaaacacgccgaaagaagggtaagaaggataaagacataagcaaagagaaggatactcagaatcagaatattaccctcgactgtgaaggaactacaaataagatgaaatctcccgagacgaagcagagaaagctttcccccctgcgacttagtgtttctaataaccaggagccagatttcatcgatgacatcgaggagaaaaccccaatctcaaatgaggttgagatggagtccgaagagcagatcgctgagcgaaaaaggaaaatgacccgggaagaaaggaaaatggaagccatcttgcaagcgttcgcacgcttggagaaacgcgagaagcggagagagcaagcattggagcgcatcagcaccgctaagactgaggtgaagactgagtgcaaggacacccagatcgttagtgacgcggaggttatccaggaacaggcaaaggaggagaacgcctccaagccaactcctgccaaggtaaacaggaccaaacagagaaagagtttctccaggagcagaacccatatcggtcaacagagacggaggcacaggaccgtctccatgtgttcggacatccagccaagctcgcctgacattgaggtgacctcccagcagaacgacattgaaaataccgtcctgactattgaacctgaaaccgaaacagctctcgcagaaatcattacagaaacagaggttccagcattgaataaatgccccaccaagtatcctaaaactaagaaacacctagtaaacgaatggttgtccgagaaaaacgagaagaccgggaagccgagcgatgggctgtccgagaggcctcttcggattaccactgacccagaggtcctggccacccagctcaactctctccccggtctaacttactcaccacacgtatactctactccaaagcattacataaggtttacgtcacccttcctttccgaaaaaagaaggagaaaggagccaactgagaatattagtggttcttgtaaaaagagatggcttaaacaagcccttgaagaagagaactccgctatcctgcacaggttcaactctccttgccaggagcgctctcgatcccccgcagtgaacggtgagaacaagtccccactcctgctcaacgatagttgcagtttgccggacctaaccacaccgctgaagaaacgcaggttctaccagctcctcgattctgtctactctgagactagtacacctaccccttctccctatgctactcccactcacacggatatcacccctatggaccctagttttgctaccccgcctagaattaagagcgacgacgaaacttgtaggaatggatacaaacccatttacagccctgtgacccccgtgactcctggaacacccggaaacacaatgcacttcgagaacatttcttcccctgaatcctcccccgagatcaagaggcgaacgtacagccaggagggctatgacagaagttcaaccatgctcactctaggtcccttccggaatagtaatttgaccgagctggggctgcaggagattaagaccattggttataccagtccaaggagccggaccgaagtgaaccggcagtgccccggagagaaagagcctgttagtgacctgcagctgggactcgatgcagtggaacctacggcgctgcacaaaacgctcgagacacccgcacacgaccgggcagagccaaactcgcaactggactctacgcactcaggaagaggaacaatgtactcttcttgggtgaagtcaccagatcgcacaggagtgaattttagcgtgaactccaacctacgagacctgacgccatctcaccaactcgaggtgggaggtggcttccgtatttccgagagtaaatgtctgatgcaggacgacacaaggggaatgtttatggaaaccacagtgttctgtacaagtgaagatggcctggtgtccggattcggacgcaccgtgaacgacaacctgatcgacggaaactgcactccgcaaaacccaccccagaaaaagaaagtgtccttgctagagtaccgaaaaaggcagcgcgaggcaaggaagagtggctctaaaactgagaattttccgctgattagcgtgtcccctcatgcttccggcagcctgagtaacaacggagacggctgtgccagtagcaacgataatggagagcaagtagaccacaccgccagcctgccgctgcccaccccagccaccgtgtacaatgccacgtcggaggagacctccaacaactgtcccgttaaggacgccaccgcttccgagaagaatgagcccgaagtgcagtggacggcatccacatcagtcgaacaagtgcgtgaaaggagctaccagcgggctctgctgctgtctgatcaccgaaaagacaaagacagcggcggtgaaagcccctgcgtgtcctgcagtccctctcacgtgcagtcctcgccaagctcacattccaatcatatccctcagctgcaggcaaaggggcctgtgccatctttctcagaactgatggaggatcctgatcccgaaaatccagagccaactaccactaacgagtgcccgtcccccgatacatctcagaatacttgtaagtctcctccgaaaatgtcgaagccaggaagcccaggcagcgtcattccagcccaggctcatggcaaaatctttactaagcccgatccacagtgggacagcactgtctccgctagtgaagcggagaacggcgtgcacctgaagactgaactgcagcagaaacagctgagcaacaacaaccaggcgctcagcaagaatcacccgccacagacacacgtgagaaattccagcgagcaactgtcacagaagctgccgagcgtgcccacaaagcttcattgccctccttccccacacctggaaaatccgcctaagtccagcacccctcacaccccagtccaacatggttacctttcccccaaacctccctcacaacagctgggctctccgtatcggcctcaccattcccaaagcccgcaagtcggcaccccccaacgcgagccacagcggaacttctaccctgccgctcaaaatctaccggctaatactcagcaggctacgagtggaactctcttcacccagactccgagcggacagtcttcagctacatattcccagttcaaccagcagtcccttaacagcaccgcccctcctccacccccacctcccccaccatcttcctcctactatcaaaaccaacagccatcagccaacttccagaattacaatcaacttaaaggaagtctcagccagcagacagtgtttacttctggccctaatcaggccttgccgggaaccacaagtcagcagacagtccctggacatcatgtcactcctggacactttctacctagccaaaaccccacgattcaccaccagacagccgctgcagtggttcctccgcctccaccaccccctccggctcccggaccccatttggtacagcaaccaaactcacaccaacagcattctgtcgcccatgttgttggaccggtgcatgcggttacacccggttcccacatccactctcagaccgccggtcaccatctgccacctccacctcctccgccaggccctgccccacatcaccacccccctccacatccatccaccggtctccagggcctacaggctcagcatcagcatgtggtgaacagcgcccctcctccaccccctccaccacccccatcaagtgtgctggcttctgggcaccacactacttctgcgcaagcattgcatcatccacctcatcagggtcccccacttttccccagttctgcccacccaaccgttcctccttacccaagtcaagcaacccaccatacaaccctgggcccaggcccacagcaccagccaagcggcaccgggccacattgtcctctcccggtgaccggcccacacctgcaaccacagggtcctaactctatcccgaccccaacagcttctggattctgcccccaccccggatccgtggcgttaccacatggggtacaagggcctcaacaggcttcaccagtgccaggccagatccccattcaccgggcacaagtccccccaacattccaaaacaattaccatggtagcggatggcattat

SEQ ID NO: 199591 - DNA, 1770 bp, Artificial Sequence
  derived and/or modified sequence
atgcacttcgaaaacatcagttctcctgagtctagcccagagatcaagagaagaacatactcccaagagggctatgatagatctagcactatgctcacactgggcccatttcgcaatagtaatcttaccgaactgggcctgcaggagattaagaccatcggatacacaagccccagaagtagaacagaggtgaataggcagtgtcccggagaaaaagagcctgtcagcgacttacagttgggtctagacgcagtggaacctaccgccttacataaaactctggaaaccccagcgcacgatcgtgcggaacccaactcccagctcgattccacacacagcggcagaggaacgatgtacagttcctgggtgaaatcacccgaccgcaccggcgtgaacttctccgtgaacagcaacctccgggacctgacccctagtcatcagctggaagtgggcggaggcttccggattagcgagagcaagtgtctgatgcaggatgatacacggggaatgtttatggagactaccgtgttttgtacctccgaggacggacttgtgtcaggctttggtcggaccgtgaacgacaaccttatcgacggaaattgcaccccccaaaatccaccacagaagaaaaaagtgagtctcctggaataccgaaagcgccagagggaagctagaaaatcaggctctaaaacagagaacttccccctgatcagcgtgtctccgcatgcctctgggtcattgagcaataatggtgacgggtgtgctagcagcaacgacaacggagagcaggtggaccacactgcaagtctgccacttcctacaccggctactgtctacaacgccacaagcgaagaaaccagtaataattgcccagtgaaagatgcgacagcctcagaaaaaaacgaacctgaagtgcaatggacagcttccaccagcgttgagcaggttcgggagcggagttatcagagggcgctcctactgagcgatcaccgtaaggataaggactcaggcggtgaatcaccgtgcgtgtcttgctccccctcacatgtccaatctagcccttcctcacactcaaaccatattccacagctgcaagccaaaggccctgtgcccagctttagcgaactcatggaagatcccgatccagagaaccctgaacccactaccactaacgagtgcccgtctcctgacacatcgcagaacacctgtaaatctccacctaaaatgtccaagcccggttccccgggatcagtgattcccgctcaggcccacggcaagattttcacaaaaccagacccacagtgggattcaaccgtttcggcctctgaagcggaaaatggggttcacctcaaaactgagttacaacagaagcaactgtccaataacaatcaggctctgagtaaaaaccatccacctcaaacccacgtcaggaactcctccgagcaattaagccagaagctcccttccgtgccaacgaaacttcactgcccccctagtcctcatctggaaaaccctcccaagagctcaaccccccatactccggtgcaacatgggtatctgagccccaagcctcccagtcaacagcttggctccccttaccggcctcaccattcccaaagcccgcaggtgggtacacctcaaagagagccccagagaaatttttatcctgctgcccagaacctccccgctaacacccagcaggctaccagtggcacgctctttacccaaacgcctagcggccagagctccgcaacttacacacagagatag

SEQ ID NO: 199592 - DNA, 5336 bp, Artificial Sequence
  derived and/or modified sequence
atgagcatagtgattcccctgggcgtcgacactgcagagacaagctacctggaaatggccgctggaagcgaacccgagagcgtggaggcttcccctgtagtcgtcgaaaagtctaatagctatccgcaccaattgtacacgtcaagcagtcaccactcacactcttatatcggattaccttatgctgatcacaactacggcgcacgcccacccccaaccccccctgcatcccctccgccatcggtgctcatatctaagaatgaggtcgggatttttactactcctaacttcgacgaaacgagttccgcaacaactattagtacaagcgaagacggctcctatgggactgacgtgacacgatgcatctgcggcttcacccacgacgacggctacatgatatgttgcgacaaatgtagtgtgtggcagcacatcgattgtatgggcattgatcgccaacatatccctgatacctatctatgtgaacgatgtcaacccagaaacctggataaggaaagggcggttctccttcagcggagaaaacgagagaacatgtccgacggcgacacttcagctaccgaatcaggtgatgaggtccctgtagagttatatacagcatttcagcacacccctactagcattacgctgaccgcgtcacgcgtgtccaaagtcaacgacaagagaaggaaaaaaagcggtgagaaagagcaacacatttcaaagtgtaagaaagccttccgggaaggtagtcgaaaatctagtcgcgtcaaaggatctgctcctgaaattgaccccagcagcgatggaagcaacttcggatgggagaccaaaattaaggcgtggatggacagatacgaggaggctaataacaaccagtacagtgaaggagttcagagggaggctcagcggatcgcgctgcgcctgggtaacgggaacgataaaaaagaaatgaacaaatcagatttgaacaccaacaatctgctgtttaagccgccagtagagtcacacatacagaaaaataagaaaatattaaagagcgccaaggacctccctccagacgccctgataatcgaataccggggaaagtttatgcttcgtgaacagttcgaggcgaatggctactttttcaaaaggccatacccctttgtactgttttactcgaagttccacggcctcgaaatgtgcgtggatgctagaactttcggaaacgaggcgcgatttattcggcgtagttgtaccccaaacgctgaggtccgacacgaaatacaggacggtacgattcacctctatatatattcaatccatagtatccctaagggcaccgagataacgatcgcattcgacttcgactacggcaattgcaaatataaggttgactgtgcatgcttgaaggaaaaccctgaatgtcccgtcctgaaacgttctagcgaatcaatggagaacatcaactccggatacgagaccaggcgaaagaagggcaaaaagacacgggaagagaggaagatggaagcaattctgcaggcctttgcaaggctagaaaaaagagaaaagagaagagaacaggcccttgaaagaatctcaaccgcaaagacggaggtgaagaccgagtgtaaagacacccaaatcgtcagcgatgccgaagtcatccaggagcaagctaaggaagagaacgcgagcaagcccactcctgccaaagtgaaccgtacaaagcagagaaagagcttttctagaagtcgaacacatatcgggcagcagagacgccgtcatagaacagtgtcaatgtgctctgacatacagccaagctcacccgacatagaggtaacttcacagcagaatgacatagagaatactgtgcttacgattgagccagagactgaaacagcactggcggagataattactgagaccgaggtgcctgcattgaacaagtgtcccaccaagtaccctaaaactaagaaacacctggtgaacgaatggctgagcgagaaaaatgagaaaaccgggaagccgtcagatggcctcagcgagaggcctcttcgcattaccactgatcccgaagtgcttgccacccaattgaattctcttcccggtctcacttacagcccccacgtgtactccacccccaaacattatattagatttacttctccctttctcagcgagaagaggagacgcaaagagcccactgagaatatcagcggaagctgtaaaaaacggtggttgaagcaggctctggaggaagagaattccgcaattcttcaccggtttaattcaccctgtcaggagcggagtcgtagcccagccgtgaatggagaaaacaagagccctctcttgcttaatgactcgtgctcgctgccagacctaaccacaccactcaaaaagagacggttctaccagctgttggatagtgtgtactctgaaacaagtaccccaaccccctccccttacgccacacctacccataccgatatcaccccaatggatccaagcttcgccactccgcctcggatcaaatccgacgatgagacctgccgtaatgggtacaagccaatttatagtcccgtgacaccagtcactccgggaaccccgggaaatactatgcacttcgagaacataagctcaccagagagttcaccagaaatcaaaagacgcacatattctcaagagggctacgatagatcctcaacgatgctgacactggggcctttcaggaacagcaatttaaccgagctgggtttgcaggagattaagactattggttatactagcccccgatcgcggacagaggtgaatcgtcaatgccccggagaaaaggaacccgtgagcgacctgcagttaggactggacgccgtcgagcctaccgcccttcacaaaacgcttgaaactcccgctcatgacagggctgaacctaactcccagctggacagcacacactccgggaggggtacaatgtactcctcctgggtaaaatcccctgacagaactggagtgaatttctccgtgaactccaacttacgcgacctgacccctagtcatcagctggaggttggtgggggatttcggattagcgaaagcaagtgtctgatgcaggatgatactaggggtatgttcatggagacaactgtgttttgcacatctgaggatggattggttagcggcttcgggcgaaccgtgaatgataaccttatagacggaaactgcacaccacagaatcccccacagaagaagaaggtaagcctcctagagtatcgtaaacggcaacgggaggctcggaaaagtggatctaagactgaaaacttccctctgattagcgtgagcccccacgccagcggctccctttctaacaatggtgatggctgcgccagctcaaatgacaacggtgaacaggtggatcatacagcttcactcccactcccaactccagcgactgtttacaacgcaaccagcgaggagacaagtaacaactgccctgtgaaagatgcaaccgctagcgaaaaaaacgaaccagaggttcagtggaccgcctccactagcgtagaacaggtccgcgaacgttcttaccagagagccctgctgttatcggatcaccggaaagacaaggactccggcggagagtcaccttgtgtgagttgcagcccaagtcacgttcagtcatctccttcctcacactctaatcatatcccccagctccaagcgaagggccctgtgcccagcttctcagaattaatggaggaccccgaccccgagaaccctgaacccacaaccaccaacgaatgtccctcgcccgacacaagccagaacacatgcaaaagccctcccaagatgtctaaaccaggctctcccggtagcgtgatcccagcccaggctcacggtaaaatctttaccaagcccgatcctcagtgggactctaccgtttccgcctccgaggccgagaatggggtgcatctgaaaaccgagctgcagcagaagcagctcagcaacaacaaccaggccctgtctaagaatcatcctccacagacccacgtgaggaacagcagcgaacagctgtcccagaagctccctagtgttccaacaaaactgcattgtccaccgagtccccacttagaaaaccctccgaagagcagtaccccccacacccctgtgcagcacggctacctgagcccaaagcctccctcgcagcaactaggaagcccctatagacctcaccactcccagtccccccaggtcgggacaccccaaagggaacctcaacgaaacttttaccccgctgcacagaatttgccagcgaatacccagcaagctacctctggtacgctctttacacaaacgccctcgggacagtcatctgccacttactctcaattcaaccagcagtccctgaattctacggctcctccgcctcctccaccacctccacccagctcatcatattaccagaatcaacagccaagtgcaaatttccaaaattataatcagttaaaagggtccctgtcccagcagaccgtgttcacaagtggcccaaaccaggcactgcccggtacaacatcccagcaaaccgtcccaggacaccacgtaaccccgggtcattttctgccgtcacagaaccctaccatccatcaccagactgctgcagctgtcgtgcccccacctccccctcctcccccagctcccggtccacacctcgtccagcagcccaattcacaccagcagcacagtgtggcgcatgtggtggggccagtgcatgcagtgacacctggctctcacatacattcccaaacggccggacaccatctccctcccccaccaccccctcccggtccagcgccacaccaccacccccctccgcatccatccactggccttcagggcctgcaggcccagcatcagcacgtggtgaactccgccccaccacctcccccaccacccccaccctcctccgtgttggcctcagggcaccacaccacttcagcacaggctctacaccacccacctcaccaagggccaccattattccccagttcggcacaccctaccgtccctccttacccaagccaagccactcaccacacaactctggggccaggtccccaacaccagccttccggaacgggaccccactgtcccttacccgtaaccggacctcatttacaaccgcaaggaccaaacagtatcccgacgcctactgccagtggattttgcccccaccccggtagtgtggcccttcctcatggagttcagggcccacagcaggccagcccggttccgggtcaaatccctattcatcgtgcacaggtgccccctacctttcagaataactatcacggcagcggctggcacta

SEQ ID NO: 199593 - DNA, 4962 bp, Artificial Sequence
  derived and/or modified sequence
atgtctatcgtgatcccccttggcgtcgatacagcagaaacaagctacttggagatggcagcaggaagtgagcccgaatccgtcgaagcgagccctgtcgttgtggagaaatctaatagctatccacaccagttgtacacaagctctagccaccactcccattcttacattggactgccctacgcggaccataattatggagccaggcccccacctacacctcctgcttcccctccccctagcgtcctgatttccaaaaacgaagtggggatattcactacacccaatttcgacgagacctctagcgccaccacaattagcacaagcgaggacggctcttatggcacagatgttaccaggtgcatttgcggattcacccatgatgacggttatatgatctgttgtgataagtgtagcgtttggcagcatatagattgtatgggcatcgatcggcagcatatacccgacacatacttatgtgaaaggtgtcagcccagaaatttagataaggaaagggccgttctgttgcaaagacggaagcgtgagaacatgtccgacggcgacacttctgccacggagtctggtgatgaagtgccggtggagctgtatactgcttttcaacacacaccaacgtccattaccctgacagcgtcccgggtaagcaaagtgaacgacaaacgtcggaagaagagtggcgagaaagagcagcacatttcaaagtgcaaaaaggccttcagagaaggaagcagaaaaagctcaagagtcaagggctccgctcccgagattgaccctagctccgatggatctaattttggatgggaaacaaagatcaaggcttggatggatcggtacgaggaagctaacaacaaccagtacagcgaaggggtgcaaagggaggctcaaagaatcgcgcttaggcttgggaatggaaacgataagaaggagatgaacaagtctgatctcaacactaataatcttcttttcaagccaccagtggagtcacatatccagaaaaataaaaagattttaaaaagtgccaaggacctgccccctgatgctcttattatcgagtataggggaaagttcatgctcagagagcagttcgaagctaatggatacttcttcaagaggccttacccctttgtgctgttctattccaagttccatggactcgaaatgtgtgtggacgcccgtacatttggcaacgaggccagattcataagacggagttgcacaccgaacgcagaggttagacacgaaatccaggacggaaccattcacttgtatatatactccatccatagtattccaaagggaacagaaatcacgatcgcatttgacttcgattacggcaactgtaagtacaaggttgattgcgcatgtctcaaagagaatcccgagtgccctgttcttaaacggtcttctgaatccatggagaatataaattccggatacgaaactcgccgtaagaagggcaagaaggataaggatatatccaaagagaaagatacccaaaaccaaaacatcacactggattgtgagggcacaacgaacaaaatgaaaagtccagagactaagcagagaaagctttctccactccggctttcagtttccaacaaccaggaaccggatttcattgatgacatcgaggaaaaaaccccaattagcaacgaggtcgagatggagtcagaggagcagattgcagaacgtaaacggaagatgaccagggaggaaagaaaaatggaggctatactgcaagcttttgccaggcttgaaaaaagagagaaaaggagagagcaggcgctggaaagaatttctacggctaagactgaggtcaagaccgagtgtaaagatactcaaatcgtgtctgacgcagaagtcatacaagaacaggcaaaagaagagaatgcgtctaaaccaactcccgctaaagtgaatcgtactaagcagagaaagtcattcagtcggtctaggacgcacatcggacagcagagaagacggcatcggactgtgtctatgtgttctgatatccaaccaagctccccagacattgaagtaacaagccagcaaaacgacattgaaaacactgtgctcactatcgagcccgagaccgagactgcccttgcggagattataaccgagaccgaagttcccgcattaaataagtgcccaacaaagtatcctaagaccaaaaaacatctggtaaatgagtggttgtccgagaagaacgagaagacggggaagccttcagacggcttatctgagcggccactcagaataaccactgatccagaggtccttgccacccagctgaactcgttgcccggtctgacttactccccacacgtctactcaaccccaaaacactacattcgttttacctctccctttctgtccgaaaaacgaagacgtaaggaaccgacagaaaacatctcaggctcttgtaagaagcgatggctgaaacaggcactggaggaggaaaactccgccatccttcatagatttaatagtccttgtcaggagcgctctagatctccagcagttaacggcgaaaacaagtcccctcttttgctgaacgactcctgctcgctgcccgatctcaccacacccctgaagaagcggcgtttctaccaactcctcgatagcgtgtatagcgagacatccacaccgacgccctccccctacgcgacgcccacacacacggacattactccaatggatcctagtttcgcaaccccaccgaggattaagtccgacgatgagacatgcaggaacgggtacaagcccatctattctcctgtgactcccgtcacgcccggaacccccggtaataccatgcacttcgagaacatttctagtcctgagtctagcccagaaataaagcgcaggacctactcccaggagggctacgatcggagttctacaatgctaaccttgggtccattcagaaattccaatctgaccgaactcggactccaggaaatcaagaccattggatacacaagcccaagaagtaggacggaggtgaacagacaatgccctggggagaaggaacctgtctcagacctgcagcttgggctggatgctgtagagcccaccgccctgcataaaacgttggagaccccggctcatgatcgggctgagcccaacagccaactggacagtacacactccggacgcggaaccatgtactcctcctgggttaagtctccggatcgaaccggcgtgaatttcagtgtcaacagcaacttgagagacttaaccccctcccaccaacttgaagtgggtggcggttttcggatcagtgagagtaagtgtttgatgcaggacgacacccgaggtatgtttatggagaccaccgtgttctgcacgagtgaggacggcctagtgtcaggctttggacgcacggtgaatgacaacttaattgacgggaactgcactcctcagaacccacctcagaagaaaaaggtgtccctcctggaatacagaaaacggcaacgcgaggcgaggaaatctggatccaaaactgagaactttcccttgatcagcgtcagcccacacgcttccggaagtctttccaacaatggtgacggttgtgccagcagtaatgataatggggaacaggtcgatcacacagctagcctgccactcccgacacccgctacagtttacaacgccacctctgaagagacaagcaataattgccccgttaaggacgcaacagctagtgagaagaatgaacccgaggtccagtggactgcctccacctctgtggagcaagtgagggagaggtcctatcaacgcgctctccttcttagcgaccatcggaaggataaagactctgggggtgaatccccatgtgtctcatgcagccccagccacgtgcagtcttctccatcctcccactccaaccatatcccccaacttcaagccaaaggccctgtcccatcgttcagcgagctgatggaggatccggatccggagaatcccgaacctacaactactaatgaatgtcccagcccggacacatcccagaacacgtgtaagtcgccccctaaaatgagtaagcctggctctcccggtagcgtaatccctgctcaagcacatgggaagatctttacaaagcctgatccccaatgggactctaccgtgagcgcctctgaagccgagaatggtgtgcacctgaaaacagaacttcagcagaagcagctgtctaacaataaccaggccctgtcaaagaaccaccctccacagacgcatgtgaggaacagtagcgagcagctgtctcagaagcttccctcagtgcccaccaaactccactgtcctccctcccctcacctggagaacccaccaaaatctagtaccccacatacccctgtgcaacacggctatttgtctcccaagcctccctctcagcaactcgggtctccctatagaccccatcattcccagtcaccccaggtgggaacccctcaaagggagccccagcggaatttttatcctgcagcacagaatctgccagtcttctggttgctaggtattatcccacatcagctgaagccatataccacacatctcatcaaagacttacatttctttctaagggtactgatacagctgtaccataggattcctcacaaactccacataatccccctctgggaccgagacccttcaacttctctcctggagcagggtcatattgtacactacttgagccaggtgcttatctcatctcctaaggatcaaaccgtcttccagcatctcctccttcaagggagcgtactgattctggcattatggccgtgtcacatgggatttaaagatctgtcccggcatctccagtgcctcgaccgcttccaattcaccgaacacagatgccaccagcacttcaaaactatcactatggggcaaggcggtataaaaatggactcaaagaacattttcctgaacgtcctctag

SEQ ID NO: 199594 - DNA, 1830 bp, Artificial Sequence
  derived and/or modified sequence
atgagcattgtgattcccctgggggtagacacggctgagacatcatacctggagatggctgcaggcagcgagccagaatctgtggaggcgagccctgtggtggtagaaaaatctaactcctaccctcatcaactgtacacctcaagttcccatcactcgcatagttacatcggacttccttacgccgatcacaactacggagccagaccaccccctacccctcccgcatcccccccaccctccgttttgatttccaaaaacgaagtgggtatcttcacaactcctaactttgacgagacatccagcgcaaccactatttccacctcagaagatggttcttatggaaccgatgtgacccggtgcatttgtggatttactcacgatgatgggtacatgatctgctgcgacaagtgcagcgtctggcaacacatagactgcatggggatcgacaggcagcacatccccgacacatatttgtgtgaacgatgccaaccccgtaacctggataaagaaagagccgtactgctccaaaggagaaagcgggagaatatgagcgacggtgacacctctgcgactgaatctggagacgaggtccctgtggagttgtacaccgcttttcagcatacccccactagcataactttgacagctagcagagtgtccaaggttaatgacaagcggaggaaaaaaagtggcgagaaggagcagcatatttccaagtgcaaaaaggcgttccgggaggggtctcgaaaatctagccgcgtgaaagggtccgccccagaaatagacccgagctcggacggatccaacttcgggtgggagacaaaaattaaagcctggatggataggtatgaggaagctaacaacaaccaatattccgaaggagtacaaagagaggctcagaggatcgcgctgagactcggcaacggtaacgataagaaggaaatgaataagtctgatctgaatactaacaatctgctgttcaaaccaccagttgagtcccacattcaaaaaaataagaaaatcctcaaatctgcgaaagacctgccacctgacgccctaataatcgagtataggggtaaattcatgcttcgtgagcagttcgaagctaacggttacttcttcaagcgaccctacccattcgtgctgttttacagtaagtttcacggcctcgagatgtgcgtagatgctagaacatttggaaatgaggcgcgatttattagacgcagctgtacacctaatgccgaggtgaggcatgaaatccaagatgggaccattcatctctacatctactccatccacagtattcccaagggcaccgagatcacaatagcttttgattttgactatgggaactgcaagtacaaggtagactgcgcctgtctgaaggagaatccagagtgcccagtgctgaagcgcagtagcgagagcatggaaaatatcaactccggctatgaaactagaaggaagaagggtaaaaaagacaaggacatcagcaaggagaaggacactcaaaaccagaatatcactctagattgcgaagggaccactaataagatgaagtcgcccgagacaaagcagaggaagctgagtcccctgagattatcagtgagtaacaaccaggaacctgatttcatcgacgatatagaagagaagacccccattagcaatgaggttgaaatggagagcgaggagcagattgcagagcggaaacggaagatggtaagctgggaagcttcaagtcttggactggtcacagcagccctgcatatggtgatcgttgccgctttcacctgggcttttacactcttcttcgaggtttctgaatag

SEQ ID NO: 199595 - DNA, 5577 bp, Artificial Sequence
  derived and/or modified sequence
atgagcatcgtgatccccctgggcgtggacaccgccgagaccagctacctggagatggccgccggcagcgagcccgagagcgtggaggccagccccgtggtggtggagaagagcaacagctacccccaccagctgtacaccagcagcagccaccacagccacagctacatcggcctgccctacgccgaccacaactacggcgccagacccccccccaccccccccgccagccccccccccagcgtgctgatcagcaagaacgaggtgggcatcttcaccacccccaacttcgacgagaccagcagcgccaccaccatcagcaccagcgaggacggcagctacggcaccgacgtgaccagatgcatctgcggcttcacccacgacgacggctacatgatctgctgcgacaagtgcagcgtgtggcagcacatcgactgcatgggcatcgacagacagcacatccccgacacctacctgtgcgagagatgccagcccagaaacctggacaaggagagagccgtgctgctgcagagaagaaagagagagaacatgagcgacggcgacaccagcgccaccgagagcggcgacgaggtgcccgtggagctgtacaccgccttccagcacacccccaccagcatcaccctgaccgccagcagagtgagcaaggtgaacgacaagagaagaaagaagagcggcgagaaggagcagcacatcagcaagtgcaagaaggccttcagagagggcagcagaaagagcagcagagtgaagggcagcgcccccgagatcgaccccagcagcgacggcagcaacttcggctgggagaccaagatcaaggcctggatggacagatacgaggaggccaacaacaaccagtacagcgagggcgtgcagagagaggcccagagaatcgccctgagactgggcaacggcaacgacaagaaggagatgaacaagagcgacctgaacaccaacaacctgctgttcaagccccccgtggagagccacatccagaagaacaagaagatcctgaagagcgccaaggacctgccccccgacgccctgatcatcgagtacagaggcaagttcatgctgagagagcagttcgaggccaacggctacttcttcaagagaccctaccccttcgtgctgttctacagcaagttccacggcctggagatgtgcgtggacgccagaaccttcggcaacgaggccagattcatcagaagaagctgcacccccaacgccgaggtgagacacgagatccaggacggcaccatccacctgtacatctacagcatccacagcatccccaagggcaccgagatcaccatcgccttcgacttcgactacggcaactgcaagtacaaggtggactgcgcctgcctgaaggagaaccccgagtgccccgtgctgaagagaagcagcgagagcatggagaacatcaacagcggctacgagaccagaagaaagaagggcaagaaggacaaggacatcagcaaggagaaggacacccagaaccagaacatcaccctggactgcgagggcaccaccaacaagatgaagagccccgagaccaagcagagaaagctgagccccctgagactgagcgtgagcaacaaccaggagcccgacttcatcgacgacatcgaggagaagacccccatcagcaacgaggtggagatggagagcgaggagcagatcgccgagagaaagagaaagatgaccagagaggagagaaagatggaggccatcctgcaggccttcgccagactggagaagagagagaagagaagagagcaggccctggagagaatcagcaccgccaagaccgaggtgaagaccgagtgcaaggacacccagatcgtgagcgacgccgaggtgatccaggagcaggccaaggaggagaacgccagcaagcccacccccgccaaggtgaacagaaccaagcagagaaagagcttcagcagaagcagaacccacatcggccagcagagaagaagacacagaaccgtgagcatgtgcagcgacatccagcccagcagccccgacatcgaggtgaccagccagcagaacgacatcgagaacaccgtgctgaccatcgagcccgagaccgagaccgccctggccgagatcatcaccgagaccgaggtgcccgccctgaacaagtgccccaccaagtaccccaagaccaagaagcacctggtgaacgagtggctgagcgagaagaacgagaagaccggcaagcccagcgacggcctgagcgagagacccctgagaatcaccaccgaccccgaggtgctggccacccagctgaacagcctgcccggcctgacctacagcccccacgtgtacagcacccccaagcactacatcagattcaccagccccttcctgagcgagaagagaagaagaaaggagcccaccgagaacatcagcggcagctgcaagaagagatggctgaagcaggccctggaggaggagaacagcgccatcctgcacagattcaacagcccctgccaggagagaagcagaagccccgccgtgaacggcgagaacaagagccccctgctgctgaacgacagctgcagcctgcccgacctgaccacccccctgaagaagagaagattctaccagctgctggacagcgtgtacagcgagaccagcacccccacccccagcccctacgccacccccacccacaccgacatcacccccatggaccccagcttcgccaccccccccagaatcaagagcgacgacgagacctgcagaaacggctacaagcccatctacagccccgtgacccccgtgacccccggcacccccggcaacaccatgcacttcgagaacatcagcagccccgagagcagccccgagatcaagagaagaacctacagccaggagggctacgacagaagcagcaccatgctgaccctgggccccttcagaaacagcaacctgaccgagctgggcctgcaggagatcaagaccatcggctacaccagccccagaagcagaaccgaggtgaacagacagtgccccggcgagaaggagcccgtgagcgacctgcagctgggcctggacgccgtggagcccaccgccctgcacaagaccctggagacccccgcccacgacagagccgagcccaacagccagctggacagcacccacagcggcagaggcaccatgtacagcagctgggtgaagagccccgacagaaccggcgtgaacttcagcgtgaacagcaacctgagagacctgacccccagccaccagctggaggtgggcggcggcttcagaatcagcgagagcaagtgcctgatgcaggacgacaccagaggcatgttcatggagaccaccgtgttctgcaccagcgaggacggcctggtgagcggcttcggcagaaccgtgaacgacaacctgatcgacggcaactgcaccccccagaaccccccccagaagaagaaggtgagcctgctggagtacagaaagagacagagagaggccagaaagagcggcagcaagaccgagaacttccccctgatcagcgtgagcccccacgccagcggcagcctgagcaacaacggcgacggctgcgccagcagcaacgacaacggcgagcaggtggaccacaccgccagcctgcccctgcccacccccgccaccgtgtacaacgccaccagcgaggagaccagcaacaactgccccgtgaaggacgccaccgccagcgagaagaacgagcccgaggtgcagtggaccgccagcaccagcgtggagcaggtgagagagagaagctaccagagagccctgctgctgagcgaccacagaaaggacaaggacagcggcggcgagagcccctgcgtgagctgcagccccagccacgtgcagagcagccccagcagccacagcaaccacatcccccagctgcaggccaagggccccgtgcccagcttcagcgagctgatggaggaccccgaccccgagaaccccgagcccaccaccaccaacgagtgccccagccccgacaccagccagaacacctgcaagagcccccccaagatgagcaagcccggcagccccggcagcgtgatccccgcccaggcccacggcaagatcttcaccaagcccgacccccagtgggacagcaccgtgagcgccagcgaggccgagaacggcgtgcacctgaagaccgagctgcagcagaagcagctgagcaacaacaaccaggccctgagcaagaaccaccccccccagacccacgtgagaaacagcagcgagcagctgagccagaagctgcccagcgtgcccaccaagctgcactgcccccccagcccccacctggagaacccccccaagagcagcaccccccacacccccgtgcagcacggctacctgagccccaagccccccagccagcagctgggcagcccctacagaccccaccacagccagagcccccaggtgggcaccccccagagagagccccagagaaacttctaccccgccgcccagaacctgcccgccaacacccagcaggccaccagcggcaccctgttcacccagacccccagcggccagagcagcgccacctacagccagttcaaccagcagagcctgaacagcaccgcccccccccccccccccccccccccccccagcagcagctactaccagaaccagcagcccagcgccaacttccagaactacaaccagctgaagggcagcctgagccagcagaccgtgttcaccagcggccccaaccaggccctgcccggcaccaccagccagcagaccgtgcccggccaccacgtgacccccggccacttcctgcccagccagaaccccaccatccaccaccagaccgccgccgccgtggtgccccccccccccccccccccccccgcccccggcccccacctggtgcagcagcccaacagccaccagcagcacagcgtggcccacgtggtgggccccgtgcacgccgtgacccccggcagccacatccacagccagaccgccggccaccacctgcccccccccccccccccccccggccccgccccccaccaccacccccccccccaccccagcaccggcctgcagggcctgcaggcccagcaccagcacgtggtgaacagcgcccccccccccccccccccccccccccccagcagcgtgctggccagcggccaccacaccaccagcgcccaggccctgcaccaccccccccaccagggcccccccctgttccccagcagcgcccaccccaccgtgcccccctaccccagccaggccacccaccacaccaccctgggccccggcccccagcaccagcccagcggcaccggcccccactgccccctgcccgtgaccggcccccacctgcagccccagggccccaacagcatccccacccccaccgccagcggcttctgcccccaccccggcagcgtggccctgccccacggcgtgcagggcccccagcaggccagccccgtgcccggccagatccccatccacagagcccaggtgccccccaccttccagaacaactaccacggcagcggctggcactag

SEQ ID NO: 199596 - DNA, 1770 bp, Artificial Sequence
  derived and/or modified sequence
atgcacttcgagaacatcagcagccccgagagcagccccgagatcaagagaagaacctacagccaggagggctacgacagaagcagcaccatgctgaccctgggccccttcagaaacagcaacctgaccgagctgggcctgcaggagatcaagaccatcggctacaccagccccagaagcagaaccgaggtgaacagacagtgccccggcgagaaggagcccgtgagcgacctgcagctgggcctggacgccgtggagcccaccgccctgcacaagaccctggagacccccgcccacgacagagccgagcccaacagccagctggacagcacccacagcggcagaggcaccatgtacagcagctgggtgaagagccccgacagaaccggcgtgaacttcagcgtgaacagcaacctgagagacctgacccccagccaccagctggaggtgggcggcggcttcagaatcagcgagagcaagtgcctgatgcaggacgacaccagaggcatgttcatggagaccaccgtgttctgcaccagcgaggacggcctggtgagcggcttcggcagaaccgtgaacgacaacctgatcgacggcaactgcaccccccagaaccccccccagaagaagaaggtgagcctgctggagtacagaaagagacagagagaggccagaaagagcggcagcaagaccgagaacttccccctgatcagcgtgagcccccacgccagcggcagcctgagcaacaacggcgacggctgcgccagcagcaacgacaacggcgagcaggtggaccacaccgccagcctgcccctgcccacccccgccaccgtgtacaacgccaccagcgaggagaccagcaacaactgccccgtgaaggacgccaccgccagcgagaagaacgagcccgaggtgcagtggaccgccagcaccagcgtggagcaggtgagagagagaagctaccagagagccctgctgctgagcgaccacagaaaggacaaggacagcggcggcgagagcccctgcgtgagctgcagccccagccacgtgcagagcagccccagcagccacagcaaccacatcccccagctgcaggccaagggccccgtgcccagcttcagcgagctgatggaggaccccgaccccgagaaccccgagcccaccaccaccaacgagtgccccagccccgacaccagccagaacacctgcaagagcccccccaagatgagcaagcccggcagccccggcagcgtgatccccgcccaggcccacggcaagatcttcaccaagcccgacccccagtgggacagcaccgtgagcgccagcgaggccgagaacggcgtgcacctgaagaccgagctgcagcagaagcagctgagcaacaacaaccaggccctgagcaagaaccaccccccccagacccacgtgagaaacagcagcgagcagctgagccagaagctgcccagcgtgcccaccaagctgcactgcccccccagcccccacctggagaacccccccaagagcagcaccccccacacccccgtgcagcacggctacctgagccccaagccccccagccagcagctgggcagcccctacagaccccaccacagccagagcccccaggtgggcaccccccagagagagccccagagaaacttctaccccgccgcccagaacctgcccgccaacacccagcaggccaccagcggcaccctgttcacccagacccccagcggccagagcagcgccacctacacccagagatag

SEQ ID NO: 199597 - DNA, 5337 bp, Artificial Sequence
  derived and/or modified sequence
atgagcatcgtgatccccctgggcgtggacaccgccgagaccagctacctggagatggccgccggcagcgagcccgagagcgtggaggccagccccgtggtggtggagaagagcaacagctacccccaccagctgtacaccagcagcagccaccacagccacagctacatcggcctgccctacgccgaccacaactacggcgccagacccccccccaccccccccgccagccccccccccagcgtgctgatcagcaagaacgaggtgggcatcttcaccacccccaacttcgacgagaccagcagcgccaccaccatcagcaccagcgaggacggcagctacggcaccgacgtgaccagatgcatctgcggcttcacccacgacgacggctacatgatctgctgcgacaagtgcagcgtgtggcagcacatcgactgcatgggcatcgacagacagcacatccccgacacctacctgtgcgagagatgccagcccagaaacctggacaaggagagagccgtgctgctgcagagaagaaagagagagaacatgagcgacggcgacaccagcgccaccgagagcggcgacgaggtgcccgtggagctgtacaccgccttccagcacacccccaccagcatcaccctgaccgccagcagagtgagcaaggtgaacgacaagagaagaaagaagagcggcgagaaggagcagcacatcagcaagtgcaagaaggccttcagagagggcagcagaaagagcagcagagtgaagggcagcgcccccgagatcgaccccagcagcgacggcagcaacttcggctgggagaccaagatcaaggcctggatggacagatacgaggaggccaacaacaaccagtacagcgagggcgtgcagagagaggcccagagaatcgccctgagactgggcaacggcaacgacaagaaggagatgaacaagagcgacctgaacaccaacaacctgctgttcaagccccccgtggagagccacatccagaagaacaagaagatcctgaagagcgccaaggacctgccccccgacgccctgatcatcgagtacagaggcaagttcatgctgagagagcagttcgaggccaacggctacttcttcaagagaccctaccccttcgtgctgttctacagcaagttccacggcctggagatgtgcgtggacgccagaaccttcggcaacgaggccagattcatcagaagaagctgcacccccaacgccgaggtgagacacgagatccaggacggcaccatccacctgtacatctacagcatccacagcatccccaagggcaccgagatcaccatcgccttcgacttcgactacggcaactgcaagtacaaggtggactgcgcctgcctgaaggagaaccccgagtgccccgtgctgaagagaagcagcgagagcatggagaacatcaacagcggctacgagaccagaagaaagaagggcaagaagaccagagaggagagaaagatggaggccatcctgcaggccttcgccagactggagaagagagagaagagaagagagcaggccctggagagaatcagcaccgccaagaccgaggtgaagaccgagtgcaaggacacccagatcgtgagcgacgccgaggtgatccaggagcaggccaaggaggagaacgccagcaagcccacccccgccaaggtgaacagaaccaagcagagaaagagcttcagcagaagcagaacccacatcggccagcagagaagaagacacagaaccgtgagcatgtgcagcgacatccagcccagcagccccgacatcgaggtgaccagccagcagaacgacatcgagaacaccgtgctgaccatcgagcccgagaccgagaccgccctggccgagatcatcaccgagaccgaggtgcccgccctgaacaagtgccccaccaagtaccccaagaccaagaagcacctggtgaacgagtggctgagcgagaagaacgagaagaccggcaagcccagcgacggcctgagcgagagacccctgagaatcaccaccgaccccgaggtgctggccacccagctgaacagcctgcccggcctgacctacagcccccacgtgtacagcacccccaagcactacatcagattcaccagccccttcctgagcgagaagagaagaagaaaggagcccaccgagaacatcagcggcagctgcaagaagagatggctgaagcaggccctggaggaggagaacagcgccatcctgcacagattcaacagcccctgccaggagagaagcagaagccccgccgtgaacggcgagaacaagagccccctgctgctgaacgacagctgcagcctgcccgacctgaccacccccctgaagaagagaagattctaccagctgctggacagcgtgtacagcgagaccagcacccccacccccagcccctacgccacccccacccacaccgacatcacccccatggaccccagcttcgccaccccccccagaatcaagagcgacgacgagacctgcagaaacggctacaagcccatctacagccccgtgacccccgtgacccccggcacccccggcaacaccatgcacttcgagaacatcagcagccccgagagcagccccgagatcaagagaagaacctacagccaggagggctacgacagaagcagcaccatgctgaccctgggccccttcagaaacagcaacctgaccgagctgggcctgcaggagatcaagaccatcggctacaccagccccagaagcagaaccgaggtgaacagacagtgccccggcgagaaggagcccgtgagcgacctgcagctgggcctggacgccgtggagcccaccgccctgcacaagaccctggagacccccgcccacgacagagccgagcccaacagccagctggacagcacccacagcggcagaggcaccatgtacagcagctgggtgaagagccccgacagaaccggcgtgaacttcagcgtgaacagcaacctgagagacctgacccccagccaccagctggaggtgggcggcggcttcagaatcagcgagagcaagtgcctgatgcaggacgacaccagaggcatgttcatggagaccaccgtgttctgcaccagcgaggacggcctggtgagcggcttcggcagaaccgtgaacgacaacctgatcgacggcaactgcaccccccagaaccccccccagaagaagaaggtgagcctgctggagtacagaaagagacagagagaggccagaaagagcggcagcaagaccgagaacttccccctgatcagcgtgagcccccacgccagcggcagcctgagcaacaacggcgacggctgcgccagcagcaacgacaacggcgagcaggtggaccacaccgccagcctgcccctgcccacccccgccaccgtgtacaacgccaccagcgaggagaccagcaacaactgccccgtgaaggacgccaccgccagcgagaagaacgagcccgaggtgcagtggaccgccagcaccagcgtggagcaggtgagagagagaagctaccagagagccctgctgctgagcgaccacagaaaggacaaggacagcggcggcgagagcccctgcgtgagctgcagccccagccacgtgcagagcagccccagcagccacagcaaccacatcccccagctgcaggccaagggccccgtgcccagcttcagcgagctgatggaggaccccgaccccgagaaccccgagcccaccaccaccaacgagtgccccagccccgacaccagccagaacacctgcaagagcccccccaagatgagcaagcccggcagccccggcagcgtgatccccgcccaggcccacggcaagatcttcaccaagcccgacccccagtgggacagcaccgtgagcgccagcgaggccgagaacggcgtgcacctgaagaccgagctgcagcagaagcagctgagcaacaacaaccaggccctgagcaagaaccaccccccccagacccacgtgagaaacagcagcgagcagctgagccagaagctgcccagcgtgcccaccaagctgcactgcccccccagcccccacctggagaacccccccaagagcagcaccccccacacccccgtgcagcacggctacctgagccccaagccccccagccagcagctgggcagcccctacagaccccaccacagccagagcccccaggtgggcaccccccagagagagccccagagaaacttctaccccgccgcccagaacctgcccgccaacacccagcaggccaccagcggcaccctgttcacccagacccccagcggccagagcagcgccacctacagccagttcaaccagcagagcctgaacagcaccgcccccccccccccccccccccccccccccagcagcagctactaccagaaccagcagcccagcgccaacttccagaactacaaccagctgaagggcagcctgagccagcagaccgtgttcaccagcggccccaaccaggccctgcccggcaccaccagccagcagaccgtgcccggccaccacgtgacccccggccacttcctgcccagccagaaccccaccatccaccaccagaccgccgccgccgtggtgccccccccccccccccccccccccgcccccggcccccacctggtgcagcagcccaacagccaccagcagcacagcgtggcccacgtggtgggccccgtgcacgccgtgacccccggcagccacatccacagccagaccgccggccaccacctgcccccccccccccccccccccggccccgccccccaccaccacccccccccccaccccagcaccggcctgcagggcctgcaggcccagcaccagcacgtggtgaacagcgcccccccccccccccccccccccccccccagcagcgtgctggccagcggccaccacaccaccagcgcccaggccctgcaccaccccccccaccagggcccccccctgttccccagcagcgcccaccccaccgtgcccccctaccccagccaggccacccaccacaccaccctgggccccggcccccagcaccagcccagcggcaccggcccccactgccccctgcccgtgaccggcccccacctgcagccccagggccccaacagcatccccacccccaccgccagcggcttctgcccccaccccggcagcgtggccctgccccacggcgtgcagggcccccagcaggccagccccgtgcccggccagatccccatccacagagcccaggtgccccccaccttccagaacaactaccacggcagcggctggcactag

SEQ ID NO: 199598 - DNA, 4962 bp, Artificial Sequence
  derived and/or modified sequence
atgagcatcgtgatccccctgggcgtggacaccgccgagaccagctacctggagatggccgccggcagcgagcccgagagcgtggaggccagccccgtggtggtggagaagagcaacagctacccccaccagctgtacaccagcagcagccaccacagccacagctacatcggcctgccctacgccgaccacaactacggcgccagacccccccccaccccccccgccagccccccccccagcgtgctgatcagcaagaacgaggtgggcatcttcaccacccccaacttcgacgagaccagcagcgccaccaccatcagcaccagcgaggacggcagctacggcaccgacgtgaccagatgcatctgcggcttcacccacgacgacggctacatgatctgctgcgacaagtgcagcgtgtggcagcacatcgactgcatgggcatcgacagacagcacatccccgacacctacctgtgcgagagatgccagcccagaaacctggacaaggagagagccgtgctgctgcagagaagaaagagagagaacatgagcgacggcgacaccagcgccaccgagagcggcgacgaggtgcccgtggagctgtacaccgccttccagcacacccccaccagcatcaccctgaccgccagcagagtgagcaaggtgaacgacaagagaagaaagaagagcggcgagaaggagcagcacatcagcaagtgcaagaaggccttcagagagggcagcagaaagagcagcagagtgaagggcagcgcccccgagatcgaccccagcagcgacggcagcaacttcggctgggagaccaagatcaaggcctggatggacagatacgaggaggccaacaacaaccagtacagcgagggcgtgcagagagaggcccagagaatcgccctgagactgggcaacggcaacgacaagaaggagatgaacaagagcgacctgaacaccaacaacctgctgttcaagccccccgtggagagccacatccagaagaacaagaagatcctgaagagcgccaaggacctgccccccgacgccctgatcatcgagtacagaggcaagttcatgctgagagagcagttcgaggccaacggctacttcttcaagagaccctaccccttcgtgctgttctacagcaagttccacggcctggagatgtgcgtggacgccagaaccttcggcaacgaggccagattcatcagaagaagctgcacccccaacgccgaggtgagacacgagatccaggacggcaccatccacctgtacatctacagcatccacagcatccccaagggcaccgagatcaccatcgccttcgacttcgactacggcaactgcaagtacaaggtggactgcgcctgcctgaaggagaaccccgagtgccccgtgctgaagagaagcagcgagagcatggagaacatcaacagcggctacgagaccagaagaaagaagggcaagaaggacaaggacatcagcaaggagaaggacacccagaaccagaacatcaccctggactgcgagggcaccaccaacaagatgaagagccccgagaccaagcagagaaagctgagccccctgagactgagcgtgagcaacaaccaggagcccgacttcatcgacgacatcgaggagaagacccccatcagcaacgaggtggagatggagagcgaggagcagatcgccgagagaaagagaaagatgaccagagaggagagaaagatggaggccatcctgcaggccttcgccagactggagaagagagagaagagaagagagcaggccctggagagaatcagcaccgccaagaccgaggtgaagaccgagtgcaaggacacccagatcgtgagcgacgccgaggtgatccaggagcaggccaaggaggagaacgccagcaagcccacccccgccaaggtgaacagaaccaagcagagaaagagcttcagcagaagcagaacccacatcggccagcagagaagaagacacagaaccgtgagcatgtgcagcgacatccagcccagcagccccgacatcgaggtgaccagccagcagaacgacatcgagaacaccgtgctgaccatcgagcccgagaccgagaccgccctggccgagatcatcaccgagaccgaggtgcccgccctgaacaagtgccccaccaagtaccccaagaccaagaagcacctggtgaacgagtggctgagcgagaagaacgagaagaccggcaagcccagcgacggcctgagcgagagacccctgagaatcaccaccgaccccgaggtgctggccacccagctgaacagcctgcccggcctgacctacagcccccacgtgtacagcacccccaagcactacatcagattcaccagccccttcctgagcgagaagagaagaagaaaggagcccaccgagaacatcagcggcagctgcaagaagagatggctgaagcaggccctggaggaggagaacagcgccatcctgcacagattcaacagcccctgccaggagagaagcagaagccccgccgtgaacggcgagaacaagagccccctgctgctgaacgacagctgcagcctgcccgacctgaccacccccctgaagaagagaagattctaccagctgctggacagcgtgtacagcgagaccagcacccccacccccagcccctacgccacccccacccacaccgacatcacccccatggaccccagcttcgccaccccccccagaatcaagagcgacgacgagacctgcagaaacggctacaagcccatctacagccccgtgacccccgtgacccccggcacccccggcaacaccatgcacttcgagaacatcagcagccccgagagcagccccgagatcaagagaagaacctacagccaggagggctacgacagaagcagcaccatgctgaccctgggccccttcagaaacagcaacctgaccgagctgggcctgcaggagatcaagaccatcggctacaccagccccagaagcagaaccgaggtgaacagacagtgccccggcgagaaggagcccgtgagcgacctgcagctgggcctggacgccgtggagcccaccgccctgcacaagaccctggagacccccgcccacgacagagccgagcccaacagccagctggacagcacccacagcggcagaggcaccatgtacagcagctgggtgaagagccccgacagaaccggcgtgaacttcagcgtgaacagcaacctgagagacctgacccccagccaccagctggaggtgggcggcggcttcagaatcagcgagagcaagtgcctgatgcaggacgacaccagaggcatgttcatggagaccaccgtgttctgcaccagcgaggacggcctggtgagcggcttcggcagaaccgtgaacgacaacctgatcgacggcaactgcaccccccagaaccccccccagaagaagaaggtgagcctgctggagtacagaaagagacagagagaggccagaaagagcggcagcaagaccgagaacttccccctgatcagcgtgagcccccacgccagcggcagcctgagcaacaacggcgacggctgcgccagcagcaacgacaacggcgagcaggtggaccacaccgccagcctgcccctgcccacccccgccaccgtgtacaacgccaccagcgaggagaccagcaacaactgccccgtgaaggacgccaccgccagcgagaagaacgagcccgaggtgcagtggaccgccagcaccagcgtggagcaggtgagagagagaagctaccagagagccctgctgctgagcgaccacagaaaggacaaggacagcggcggcgagagcccctgcgtgagctgcagccccagccacgtgcagagcagccccagcagccacagcaaccacatcccccagctgcaggccaagggccccgtgcccagcttcagcgagctgatggaggaccccgaccccgagaaccccgagcccaccaccaccaacgagtgccccagccccgacaccagccagaacacctgcaagagcccccccaagatgagcaagcccggcagccccggcagcgtgatccccgcccaggcccacggcaagatcttcaccaagcccgacccccagtgggacagcaccgtgagcgccagcgaggccgagaacggcgtgcacctgaagaccgagctgcagcagaagcagctgagcaacaacaaccaggccctgagcaagaaccaccccccccagacccacgtgagaaacagcagcgagcagctgagccagaagctgcccagcgtgcccaccaagctgcactgcccccccagcccccacctggagaacccccccaagagcagcaccccccacacccccgtgcagcacggctacctgagccccaagccccccagccagcagctgggcagcccctacagaccccaccacagccagagcccccaggtgggcaccccccagagagagccccagagaaacttctaccccgccgcccagaacctgcccgtgttctggctgctgggcatcatcccccaccagctgaagccctacaccacccacctgatcaaggacctgcacttcttcctgagagtgctgatccagctgtaccacagaatcccccacaagctgcacatcatccccctgtgggacagagaccccagcaccagcctgctggagcagggccacatcgtgcactacctgagccaggtgctgatcagcagccccaaggaccagaccgtgttccagcacctgctgctgcagggcagcgtgctgatcctggccctgtggccctgccacatgggcttcaaggacctgagcagacacctgcagtgcctggacagattccagttcaccgagcacagatgccaccagcacttcaagaccatcaccatgggccagggcggcatcaagatggacagcaagaacatcttcctgaacgtgctgtag

SEQ ID NO: 199599 - DNA, 1830 bp, Artificial Sequence
  derived and/or modified sequence
atgagcatcgtgatccccctgggcgtggacaccgccgagaccagctacctggagatggccgccggcagcgagcccgagagcgtggaggccagccccgtggtggtggagaagagcaacagctacccccaccagctgtacaccagcagcagccaccacagccacagctacatcggcctgccctacgccgaccacaactacggcgccagacccccccccaccccccccgccagccccccccccagcgtgctgatcagcaagaacgaggtgggcatcttcaccacccccaacttcgacgagaccagcagcgccaccaccatcagcaccagcgaggacggcagctacggcaccgacgtgaccagatgcatctgcggcttcacccacgacgacggctacatgatctgctgcgacaagtgcagcgtgtggcagcacatcgactgcatgggcatcgacagacagcacatccccgacacctacctgtgcgagagatgccagcccagaaacctggacaaggagagagccgtgctgctgcagagaagaaagagagagaacatgagcgacggcgacaccagcgccaccgagagcggcgacgaggtgcccgtggagctgtacaccgccttccagcacacccccaccagcatcaccctgaccgccagcagagtgagcaaggtgaacgacaagagaagaaagaagagcggcgagaaggagcagcacatcagcaagtgcaagaaggccttcagagagggcagcagaaagagcagcagagtgaagggcagcgcccccgagatcgaccccagcagcgacggcagcaacttcggctgggagaccaagatcaaggcctggatggacagatacgaggaggccaacaacaaccagtacagcgagggcgtgcagagagaggcccagagaatcgccctgagactgggcaacggcaacgacaagaaggagatgaacaagagcgacctgaacaccaacaacctgctgttcaagccccccgtggagagccacatccagaagaacaagaagatcctgaagagcgccaaggacctgccccccgacgccctgatcatcgagtacagaggcaagttcatgctgagagagcagttcgaggccaacggctacttcttcaagagaccctaccccttcgtgctgttctacagcaagttccacggcctggagatgtgcgtggacgccagaaccttcggcaacgaggccagattcatcagaagaagctgcacccccaacgccgaggtgagacacgagatccaggacggcaccatccacctgtacatctacagcatccacagcatccccaagggcaccgagatcaccatcgccttcgacttcgactacggcaactgcaagtacaaggtggactgcgcctgcctgaaggagaaccccgagtgccccgtgctgaagagaagcagcgagagcatggagaacatcaacagcggctacgagaccagaagaaagaagggcaagaaggacaaggacatcagcaaggagaaggacacccagaaccagaacatcaccctggactgcgagggcaccaccaacaagatgaagagccccgagaccaagcagagaaagctgagccccctgagactgagcgtgagcaacaaccaggagcccgacttcatcgacgacatcgaggagaagacccccatcagcaacgaggtggagatggagagcgaggagcagatcgccgagagaaagagaaagatggtgagctgggaggccagcagcctgggcctggtgaccgccgccctgcacatggtgatcgtggccgccttcacctgggccttcaccctgttcttcgaggtgagcgagtag

SEQ ID NO: 199600 - protein, 228 aa, Artificial Sequence
  derived and/or modified sequence
MAAQQRDCGGAAQLAGPAAEADPLGRFTCPVCLEVYEKPVQVPCGHVFCSACLQECLKPKKPVCGVCRSALAPGVRAVELERQIESTETSCHGCRKNFFLSKIRSHVATCSKYQNYIMEGVKATIKDASLQPRNVPNRYTFPCPYCPEKNFDQEGLVEHCKLFHSTDTKSVVCPICASMPWGDPNYRSANFREHIQRRHRFSYDTFVDYDVDEEDMMNQVLQRSIIDQ

SEQ ID NO: 199601 - protein, 191 aa, Artificial Sequence
  derived and/or modified sequence
MAAQQRDCGGAAQLAGPAAEADPLGRFTCPVCLEVYEKPVQVPCGHVFCSACLQECLKPKKPVCGVCRSALAPGVRAVELERQIESTETSCHGCRKNFFLSKIRSHVATCSKYQNYIMEGVKATIKDASLQPRNVPNRYTFPCPYCPEKNFDQEGLVEHCKLFHSTDTKSVTSEQSPCLLSVSCYRASITY

SEQ ID NO: 199602 - DNA, 2478 bp, Artificial Sequence
  derived and/or modified sequence
atcggccgccgttgcgcggcgcagagcggcagcaagatggcggcgcaacagcgggactgcgggggtgctgcgcagctggcggggccggcggcggaggctgaccccctaggacgcttcacgtgtcccgtgtgcttagaggtgtacgagaagccggtacaggtgccctgcggacacgtcttttgctctgcatgcctgcaggaatgtctgaagccgaagaagcctgtctgtggggtgtgtcgcagcgctctggcacctggcgtccgagccgtggagctcgagcggcagatcgagagcacagagacttcttgccatggctgccgtaagaatttcttcctgtccaagatccggtcccacgtggctacttgttccaaataccagaattacatcatggaaggtgtgaaggccaccattaaggatgcatctcttcagccaaggaatgttccaaaccgttacacctttccttgtccttactgtcctgagaagaactttgatcaggaaggacttgtggaacactgcaaattattccatagcacggataccaaatctgtggtttgtccgatatgtgcctcgatgccctggggagaccccaactaccgcagcgccaacttcagagagcacatccagcgccggcaccggttttcttatgacacttttgtggattatgatgttgatgaagaggacatgatgaatcaggtgttgcagcgctccatcatcgaccagtgagcagagtccgtgcttgctatctgtctcatgttacagagcttccattacatattaaacgtgaaatctatgactcctgtaccttacctgttcaacagacctgaaaatgagccatggcattgggacagggtcacttctgacaggggaagtgggtccccaggtcagcccttctcttccctttgggctcttgccaaagctgtcttcccctactgttaaccttgtttgtcacacggtcgagttcgtattggttctcggctacttcctggagcttctgccgcctcctgtggaagataatctagcttctccacctcttgtttcacactcattcctcccatccagtgtttgtctctcgggtccttcaagccagccaggaccttttctgggtcatgaatagcacaatgaagcaagtgtctcctttccttgtccccaaggtgtgcagactttggcagccgtgcacctgaccagagctgaagctcccgctgggctgtggggttgccagaagctggggttgccatcccggggtacatgtcaccagtcctcttggggttttgtaccatctgatgctggaagttttgattagtgatattttctactactacatatttagagttcactggttcagtcttaaatgcctgcatggtgcctttttaggataaggtataaccatacatttttggtggaagtgtttctgggttagggaagttaaagtctgtttatccgtaagtggggaggagggtcagctaagagaagtgggagggccagagctttttggttctgatttacaaattaatgaagtagtttcaaacaacgcggtcatgtttacctctccatttgggagcctgcctacattcttgttctagaagcacaaaaaatcctcagatgaattagaagaaagaggtttggggactcagcggatactagttcttttaccttctgcttggtaacttagattaaactgagcattgtttttctgtcacaaatgttttccttatgacactggtttcgacatgtaaaatgtgtttgaaaacctgctttgtagatgcagagagaagctataggaaacccagtaccacccctggtctgttctgacgagacatcgttcataaggcacagcacatcgcaagatgaacagttgttaataaaagctgttgctggaaacttgctttaggaacagctcaagaaccttggagttcatatttcacaaatattaataaatataagtccaagagctgtcagcctaatctgtaggagcagaacctctgattgaccaaaaggcatatgggtttaggttggttttttgatgtcatatgtctctgatggggctgcaagtgctacctcgcgcttgtacactgctgctgtggggctccgcgcctgccggtgaagagctgcagatgccgagaagccagcaaacacagggcccactggaaaaaaatagttttttcattagtatttctcgggaggacccaaaagttaaggtcagcttgttcactgtaatttctggaagaagttcactcagaccttcctgaattcagatcatctcagaagtctggagggaaatctggcgaaaccttcgtttgagggactgatgtgagtgtatgtccacctcactggtggcaccgagaaacttacttccttgtattaagtgcacttcttgtatttctaataagatgactttccagaaagtgagatttgttatgttctggcttttaaaaggtaaaatataaataaatttcataacttaatctaaaaaaaaaaaaa

SEQ ID NO: 199603 - DNA, 687 bp, Artificial Sequence
  derived and/or modified sequence
atggccgcccagcagagggactgcggcggcgcggcccaactggctggccccgccgccgaggccgaccctctcggccgtttcacatgcccagtgtgcctggaggtttacgagaaacccgttcaggtgccctgtgggcacgtattttgcagtgcgtgtctccaggagtgtctaaaacctaagaaacctgtttgtggcgtgtgcagaagtgccctggcccctggcgtgagagccgttgaactagaaaggcagattgaaagtacagagacaagctgtcatggttgcagaaagaacttttttttgtctaagattcggagtcacgtggcgacgtgctctaaatatcagaactatataatggagggagtaaaagcaaccatcaaggacgcgtcattgcagcctcgcaatgtgccaaaccgttatacattcccttgcccctactgccctgagaagaatttcgatcaggaagggttagtggaacattgcaaacttttccactccaccgataccaaaagtgtggtttgtcctatttgcgctagcatgccctggggcgaccccaattaccggtctgcaaatttccgggaacatatccaacggagacacaggttctcctatgacacattcgtcgactacgacgtggacgaggaggatatgatgaatcaagtcttgcagcgctccattatcgatcaatag

SEQ ID NO: 199604 - DNA, 576 bp, Artificial Sequence
  derived and/or modified sequence
atggccgcacagcagcgcgactgcggaggtgccgcacagctcgcgggaccggccgctgaggccgaccctctgggccggttcacctgtcccgtgtgcctggaagtttatgagaaaccagtgcaagtcccgtgtggacatgtcttctgctctgcctgtttgcaggaatgcctgaagcctaaaaagccagtgtgcggtgtgtgtcgctctgcattagccccgggagtccgagccgtggagcttgagcgccagatagaatccacagagaccagctgccacgggtgtaggaagaatttctttctgtcaaagattaggtcccacgtggccacctgtagcaagtaccagaactatataatggaaggggttaaggcaaccatcaaagatgcatccctccagcccagaaacgtccctaaccgctacaccttcccctgcccatattgcccagagaagaacttcgaccaggaaggactcgtggaacattgcaaacttttccattcaactgacacgaagagcgtgacctccgagcagagcccttgccttctctctgtttcctgctatcgggcgtctattacctactag

SEQ ID NO: 199605 - DNA, 687 bp, Artificial Sequence
  derived and/or modified sequence
atggccgcccagcagagggactgtggcggggccgcccagctggccggccctgctgctgaggccgaccccctgggccgcttcacctgccctgtgtgcctggaggtgtatgagaagcctgtgcaggtgccctgtggccacgtgttctgcagcgcctgcctgcaggagtgcctgaagcccaagaagcctgtgtgtggggtgtgccgcagcgccctggcccctggggtgcgggctgtggagctggagcggcagatcgagagcacagagaccagctgccacggctgcaggaagaacttcttcctgagcaagatccgcagccacgtggccacctgcagcaagtaccagaactacatcatggagggcgtgaaggccaccatcaaggatgccagcctgcagcccagaaatgtgcccaaccgctacaccttcccctgcccctactgcccagagaagaactttgaccaggagggcctggtggagcactgcaagctgttccacagcacagacaccaagtctgtggtgtgccccatctgtgcctccatgccctggggagaccccaactaccgcagcgccaacttccgggagcacatccagaggaggcaccgcttctcctatgacacctttgtggactatgatgtggatgaggaggacatgatgaaccaggtgctgcagaggagcatcatcgaccagtag

SEQ ID NO: 199606 - DNA, 576 bp, Artificial Sequence
  derived and/or modified sequence
atggccgcccagcagagggactgtggcggggccgcccagctggccggccctgctgctgaggccgaccccctgggccgcttcacctgccctgtgtgcctggaggtgtatgagaagcctgtgcaggtgccctgtggccacgtgttctgcagcgcctgcctgcaggagtgcctgaagcccaagaagcctgtgtgtggggtgtgccgcagcgccctggcccctggggtgcgggctgtggagctggagcggcagatcgagagcacagagaccagctgccacggctgcaggaagaacttcttcctgagcaagatccgcagccacgtggccacctgcagcaagtaccagaactacatcatggagggcgtgaaggccaccatcaaggatgccagcctgcagcccagaaatgtgcccaaccgctacaccttcccctgcccctactgcccagagaagaactttgaccaggagggcctggtggagcactgcaagctgttccacagcacagacaccaagtctgtgaccagcgagcagagcccctgcctgctgtctgtgtcctgctaccgggccagcatcacctactag

SEQ ID NO: 199607 - DNA, 687 bp, Artificial Sequence
  derived and/or modified sequence
atggccgcccagcagcgggactgcggcggcgccgcccagctggccgggcctgccgctgaggcagaccccctcggaagattcacttgtccagtttgtctggaggtctatgagaaacctgtgcaggtcccctgtggacatgtgttctgtagcgcctgtctgcaagaatgcctcaagcccaaaaagcccgtgtgtggcgtctgtcggagcgcacttgcccccggggttagagctgtagagctggagaggcaaatcgaatccaccgaaacaagctgtcacgggtgccgaaagaatttcttcctaagcaaaattcggtcacatgtggccacgtgcagcaaatatcagaattatataatggagggcgtgaaggcgacgattaaggacgcctcactccaacccaggaacgtgcccaatcgttacaccttcccctgtccatattgccccgagaagaactttgaccaggagggcttagtcgagcactgcaaactgttccatagtacagacaccaagtccgtagtgtgcccgatttgtgcttctatgccatggggagatcccaattaccgcagcgccaatttccgcgagcatattcagcggcgacaccggttcagttatgataccttcgtcgattatgatgttgatgaggaggacatgatgaaccaggtgctccagagatcaatcatcgaccagtag

SEQ ID NO: 199608 - DNA, 576 bp, Artificial Sequence
  derived and/or modified sequence
atggccgcccagcagcgggactgcggcggcgccgcccagctggccggacctgcagctgaagcggatccactgggtagattcacctgccctgtgtgcctcgaggtctacgaaaagcccgtacaggtgccttgcggccatgtgttctgctccgcctgcttgcaagagtgcctgaagcctaaaaagccagtgtgtggcgtgtgcagaagcgctctcgctcccggggttcgcgctgtcgaactcgagagacagatagagtccacggaaaccagctgtcacggatgcagaaagaacttttttttgagtaaaatcaggtcgcacgtcgccacatgctcaaagtatcagaactatataatggagggtgtgaaggctaccattaaagacgcctcattgcagccaaggaacgtgcccaacaggtacaccttcccatgtccatactgtcctgaaaaaaacttcgaccaggagggcttggttgaacactgcaaactgttccattcaactgatacaaagtcagtgaccagtgagcagtcaccatgtctgctgagcgtctcctgttaccgcgcgtcaatcacatactag

SEQ ID NO: 199609 - DNA, 687 bp, Artificial Sequence
  derived and/or modified sequence
atggccgcacaacagcgcgactgcggtggtgctgcgcagttggcagggcctgccgcagaagccgatccactgggcaggttcacttgtccagtgtgcttagaagtctatgaaaagccagtccaggttccctgcggccacgtattctgttcagcatgcctgcaggagtgcctgaagccaaaaaagccggtgtgtggcgtatgccgctccgccttggcgccaggcgtcagagcggtggagctcgagcggcagatcgagtctaccgagacctcttgtcacggatgtagaaaaaatttcttcctatcaaaaatcaggtcccatgtagctacatgcagtaaatatcaaaactatatcatggagggcgtgaaagctactatcaaggacgcgagcctgcaaccgagaaacgtgcctaaccggtatacgttcccttgtccatattgccccgaaaaaaatttcgaccaggaagggttagttgaacactgcaagctctttcactcaactgacacgaaatcagtggtttgtccaatttgcgctagcatgccatggggagatccgaactatcgctctgccaactttagagagcatattcagagaaggcacaggtttagctatgacacattcgtagactatgatgtcgatgaagaggacatgatgaatcaggtgcttcagcggtccatcatcgaccagtag

SEQ ID NO: 199610 - DNA, 576 bp, Artificial Sequence
  derived and/or modified sequence
atggccgctcagcaacgcgactgcggtggggctgcacagctcgccggaccagcggctgaagccgatcctctcggcaggtttacatgtcctgtctgcctagaggtctatgagaaaccagtgcaggttccttgcgggcatgtgttttgctccgcctgtctgcaggaatgcctgaagcccaagaaacccgtttgcggggtgtgtcgctctgccctagcacccggagtgagggcggtggaactggaaagacaaatagaaagtacagagacaagctgtcacggctgccgcaagaatttctttttatccaagattcggtcccatgtcgcaacctgttcaaaatatcaaaactacatcatggaaggagtaaaggcaaccattaaagatgcttccttgcagccaaggaacgtgcctaataggtatacttttccctgtccatactgtcccgagaaaaatttcgatcaggaaggcctggtggagcattgtaagctgttccactccaccgataccaagtccgttacgtctgagcagagcccctgcctcctgagcgtgagctgctacagagctagtatcacctattag

SEQ ID NO: 199611 - DNA, 2440 bp, Artificial Sequence
  derived and/or modified sequence
agatggcggcgcaacagcgggactgcgggggtgctgcgcagctggcggggccggcggcggaggctgaccccctaggacgcttcacgtgtcccgtgtgcttagaggtgtacgagaagccggtacaggtgccctgcggacacgtcttttgctctgcatgcctgcaggaatgtctgaagccgaagaagcctgtctgtggggtgtgtcgcagcgctctggcacctggcgtccgagccgtggagctcgagcggcagatcgagagcacagagacttcttgccatggctgccgtaagaatttcttcctgtccaagatccggtcccacgtggctacttgttccaaataccagaattacatcatggaaggtgtgaaggccaccattaaggatgcatctcttcagccaaggaatgttccaaaccgttacacctttccttgtccttactgtcctgagaagaactttgatcaggaaggacttgtggaacactgcaaattattccatagcacggataccaaatctgtggtttgtccgatatgtgcctcgatgccctggggagaccccaactaccgcagcgccaacttcagagagcacatccagcgccggcaccggttttcttatgacacttttgtggattatgatgttgatgaagaggacatgatgaatcaggtgttgcagcgctccatcatcgaccagtgagcagagtccgtgcttgctatctgtctcatgttacagagcttccattacatattaaacgtgaaatctatgactcctgtaccttacctgttcaacagacctgaaaatgagccatggcattgggacagggtcacttctgacaggggaagtgggtccccaggtcagcccttctcttccctttgggctcttgccaaagctgtcttcccctactgttaaccttgtttgtcacacggtcgagttcgtattggttctcggctacttcctggagcttctgccgcctcctgtggaagataatctagcttctccacctcttgtttcacactcattcctcccatccagtgtttgtctctcgggtccttcaagccagccaggaccttttctgggtcatgaatagcacaatgaagcaagtgtctcctttccttgtccccaaggtgtgcagactttggcagccgtgcacctgaccagagctgaagctcccgctgggctgtggggttgccagaagctggggttgccatcccggggtacatgtcaccagtcctcttggggttttgtaccatctgatgctggaagttttgattagtgatattttctactactacatatttagagttcactggttcagtcttaaatgcctgcatggtgcctttttaggataaggtataaccatacatttttggtggaagtgtttctgggttagggaagttaaagtctgtttatccgtaagtggggaggagggtcagctaagagaagtgggagggccagagctttttggttctgatttacaaattaatgaagtagtttcaaacaacgcggtcatgtttacctctccatttgggagcctgcctacattcttgttctagaagcacaaaaaatcctcagatgaattagaagaaagaggtttggggactcagcggatactagttcttttaccttctgcttggtaacttagattaaactgagcattgtttttctgtcacaaatgttttccttatgacactggtttcgacatgtaaaatgtgtttgaaaacctgctttgtagatgcagagagaagctataggaaacccagtaccacccctggtctgttctgacgagacatcgttcataaggcacagcacatcgcaagatgaacagttgttaataaaagctgttgctggaaacttgctttaggaacagctcaagaaccttggagttcatatttcacaaatattaataaatataagtccaagagctgtcagcctaatctgtaggagcagaacctctgattgaccaaaaggcatatgggtttaggttggttttttgatgtcatatgtctctgatggggctgcaagtgctacctcgcgcttgtacactgctgctgtggggctccgcgcctgccggtgaagagctgcagatgccgagaagccagcaaacacagggcccactggaaaaaaatagttttttcattagtatttctcgggaggacccaaaagttaaggtcagcttgttcactgtaatttctggaagaagttcactcagaccttcctgaattcagatcatctcagaagtctggagggaaatctggcgaaaccttcgtttgagggactgatgtgagtgtatgtccacctcactggtggcaccgagaaacttacttccttgtattaagtgcacttcttgtatttctaataagatgactttccagaaagtgagatttgttatgttctggcttttaaaaggtaaaatataaataaatttcataacttaatctaagtggtaa

SEQ ID NO: 199612 - DNA, 581 bp, Artificial Sequence
  derived and/or modified sequence
gcaagatggcggcgcaacagcgggactgcgggggtgctgcgcagctggcggggccggcggcggaggctgaccccctaggacgcttcacgtgtcccgtgtgcttagaggtgtacgagaagccggtacaggtgccctgcggacacgtcttttgctctgcatgcctgcaggaatgtctgaagccgaagaagcctgtctgtggggtgtgtcgcagcgctctggcacctggcgtccgagccgtggagctcgagcggcagatcgagagcacagagacttcttgccatggctgccgtaagaatttcttcctgtccaagatccggtcccacgtggctacttgttccaaataccagaattacatcatggaaggtgtgaaggccaccattaaggatgcatctcttcagccaaggaatgttccaaaccgttacacctttccttgtccttactgtcctgagaagaactttgatcaggaaggacttgtggaacactgcaaattattccatagcacggataccaaatctgtgaccagtgagcagagtccgtgcttgctatctgtctcatgttacagagcttccattacatattaa

SEQ ID NO: 199613 - DNA, 687 bp, Artificial Sequence
  derived and/or modified sequence
atggccgcccagcagagagactgcggcggcgccgcccagctggccggccccgccgccgaggccgaccccctgggcagattcacctgccccgtgtgcctggaggtgtacgagaagcccgtgcaggtgccctgcggccacgtgttctgcagcgcctgcctgcaggagtgcctgaagcccaagaagcccgtgtgcggcgtgtgcagaagcgccctggcccccggcgtgagagccgtggagctggagagacagatcgagagcaccgagaccagctgccacggctgcagaaagaacttcttcctgagcaagatcagaagccacgtggccacctgcagcaagtaccagaactacatcatggagggcgtgaaggccaccatcaaggacgccagcctgcagcccagaaacgtgcccaacagatacaccttcccctgcccctactgccccgagaagaacttcgaccaggagggcctggtggagcactgcaagctgttccacagcaccgacaccaagagcgtggtgtgccccatctgcgccagcatgccctggggcgaccccaactacagaagcgccaacttcagagagcacatccagagaagacacagattcagctacgacaccttcgtggactacgacgtggacgaggaggacatgatgaaccaggtgctgcagagaagcatcatcgaccagtag

SEQ ID NO: 199614 - DNA, 576 bp, Artificial Sequence
  derived and/or modified sequence
atggccgcccagcagagagactgcggcggcgccgcccagctggccggccccgccgccgaggccgaccccctgggcagattcacctgccccgtgtgcctggaggtgtacgagaagcccgtgcaggtgccctgcggccacgtgttctgcagcgcctgcctgcaggagtgcctgaagcccaagaagcccgtgtgcggcgtgtgcagaagcgccctggcccccggcgtgagagccgtggagctggagagacagatcgagagcaccgagaccagctgccacggctgcagaaagaacttcttcctgagcaagatcagaagccacgtggccacctgcagcaagtaccagaactacatcatggagggcgtgaaggccaccatcaaggacgccagcctgcagcccagaaacgtgcccaacagatacaccttcccctgcccctactgccccgagaagaacttcgaccaggagggcctggtggagcactgcaagctgttccacagcaccgacaccaagagcgtgaccagcgagcagagcccctgcctgctgagcgtgagctgctacagagccagcatcacctactag

SEQ ID NO: 199615 - protein, 201 aa, Artificial Sequence
  derived and/or modified sequence
MEKIKARLKAEFEALESEERHLKEYKQEMDLLLQEKMAHVEELRLIHADINVMENTIKQSENDLNKLLESTRRLHDEYKPLKEHVDALRMTLGLQRLPDLCEEEEKLSLDYFEKQKAEWQTEPQEPPIPESLAAAAAAAQQLQVARKQDTRQTATFRQQPPPMKACLSCHQQIHRNAPICPLCKAKSRSRNPKKPKRKQDE

SEQ ID NO: 199616 - protein, 224 aa, Artificial Sequence
  derived and/or modified sequence
MADEQEIMCKLESIKEIRNKTLQMEKIKARLKAEFEALESEERHLKEYKQEMDLLLQEKMAHVEELRLIHADINVMENTIKQSENDLNKLLESTRRLHDEYKPLKEHVDALRMTLGLQRLPDLCEEEEKLSLDYFEKQKAEWQTEPQEPPIPESLAAAAAAAQQLQVARKQDTRQTATFRQQPPPMKACLSCHQQIHRNAPICPLCKAKSRSRNPKKPKRKQDE

SEQ ID NO: 199617 - protein, 219 aa, Artificial Sequence
  derived and/or modified sequence
MIHFHLIFLYVARNKTLQMEKIKARLKAEFEALESEERHLKEYKQEMDLLLQEKMAHVEELRLIHADINVMENTIKQSENDLNKLLESTRRLHDEYKPLKEHVDALRMTLGLQRLPDLCEEEEKLSLDYFEKQKAEWQTEPQEPPIPESLAAAAAAAQQLQVARKQDTRQTATFRQQPPPMKACLSCHQQIHRNAPICPLCKAKSRSRNPKKPKRKQDE

SEQ ID NO: 199618 - DNA, 675 bp, Artificial Sequence
  derived and/or modified sequence
atggccgacgagcaggagatcatgtgcaagctggagagcatcaaggagatcagaaacaagaccctgcagatggagaagatcaaggccagactgaaggccgagttcgaggccctggagagcgaggagagacacctgaaggagtacaagcaggagatggacctgctgctgcaggagaagatggcccacgtggaggagctgagactgatccacgccgacatcaacgtgatggagaacaccatcaagcagagcgagaacgacctgaacaagctgctggagagcaccagaagactgcacgacgagtacaagcccctgaaggagcacgtggacgccctgagaatgaccctgggcctgcagagactgcccgacctgtgcgaggaggaggagaagctgagcctggactacttcgagaagcagaaggccgagtggcagaccgagccccaggagccccccatccccgagagcctggccgccgccgccgccgccgcccagcagctgcaggtggccagaaagcaggacaccagacagaccgccaccttcagacagcagcccccccccatgaaggcctgcctgagctgccaccagcagatccacagaaacgcccccatctgccccctgtgcaaggccaagagcagaagcagaaaccccaagaagcccaagagaaagcaggacgagtag

SEQ ID NO: 199619 - DNA, 660 bp, Artificial Sequence
  derived and/or modified sequence
atgatccacttccacctgatcttcctgtacgtggccagaaacaagaccctgcagatggagaagatcaaggccagactgaaggccgagttcgaggccctggagagcgaggagagacacctgaaggagtacaagcaggagatggacctgctgctgcaggagaagatggcccacgtggaggagctgagactgatccacgccgacatcaacgtgatggagaacaccatcaagcagagcgagaacgacctgaacaagctgctggagagcaccagaagactgcacgacgagtacaagcccctgaaggagcacgtggacgccctgagaatgaccctgggcctgcagagactgcccgacctgtgcgaggaggaggagaagctgagcctggactacttcgagaagcagaaggccgagtggcagaccgagccccaggagccccccatccccgagagcctggccgccgccgccgccgccgcccagcagctgcaggtggccagaaagcaggacaccagacagaccgccaccttcagacagcagcccccccccatgaaggcctgcctgagctgccaccagcagatccacagaaacgcccccatctgccccctgtgcaaggccaagagcagaagcagaaaccccaagaagcccaagagaaagcaggacgagtag

SEQ ID NO: 199620 - DNA, 675 bp, Artificial Sequence
  derived and/or modified sequence
atggccgacgagcaagaaattatgtgtaagttggaaagcatcaaggagattcgcaacaagacgctgcagatggagaagattaaagcccgtcttaaagctgagttcgaagctctcgagtctgaggagaggcaccttaaggaatacaagcaagaaatggatcttctccttcaagaaaagatggcgcatgtcgaagagcttcggctgatccacgcagatatcaacgtgatggagaatacaatcaagcagtccgagaacgatctgaataaactgctagaaagcacacgacgacttcacgacgaatacaagcccttaaaggaacatgtggacgctctgagaatgacacttggacttcagcgcttgcctgacctttgtgaggaggaagaaaagctgtcactcgattatttcgaaaaacagaaggcagaatggcagacagaacctcaggagccccccatcccagagtctctcgccgccgctgccgctgcagcccagcagttgcaggtggcccggaaacaagataccagacagaccgccacattccgccagcaacctcccccgatgaaggcctgcctgagctgccaccagcaaattcaccgaaacgctcccatctgcccgttatgcaaagccaagagccggtctcgaaatccgaagaaacctaagagaaagcaagacgaatag

SEQ ID NO: 199621 - DNA, 660 bp, Artificial Sequence
  derived and/or modified sequence
atgattcatttccacttgatttttctgtacgtggctcgaaataagacgcttcaaatggaaaagataaaggcccggctgaaagccgagttcgaagctttggaaagtgaggaaaggcacctgaaagaatataaacaggagatggacctactgctccaggagaagatggcccatgtcgaagagctgcgactgatccacgcagacattaacgtcatggaaaataccatcaaacagtcggagaatgaccttaacaaacttctcgaatctacaagacggctccatgatgagtataaacccctgaaagagcatgtggatgcgctgcggatgacactgggattgcagagactgcctgacttatgtgaggaggaggaaaaattaagtctcgattactttgagaaacaaaaggccgaatggcagacagaaccacaagagccccccatacctgagagtctagcagccgccgctgctgctgctcagcaacttcaagttgcccgtaaacaagacacacggcagaccgctactttccggcaacaacccccgcccatgaaggcttgcctgagttgccatcaacagatccatagaaacgcccccatctgccccctctgtaaagctaagagccggagtcgaaacccaaaaaaaccaaaacgaaagcaagacgaatag

SEQ ID NO: 199622 - DNA, 675 bp, Artificial Sequence
  derived and/or modified sequence
atggctgatgagcaggagatcatgtgcaagctggagagcatcaaggagatccggaacaagaccctgcagatggagaagatcaaggcccggctgaaggccgagtttgaggccctggagagcgaggagcggcacctgaaggagtacaagcaggagatggacctgctgctgcaggagaagatggcccacgtggaggagctgcggctcatccatgctgacatcaacgtgatggagaacaccatcaagcagagtgaaaatgacctgaacaagctgctggagagcacccggcggctgcatgatgagtacaagcccctgaaggagcacgtggatgccctgaggatgaccctgggcctgcagaggctgcctgacctgtgtgaggaggaggagaagctgagcctggactactttgagaagcagaaggccgagtggcagacagagccccaggagccccccatccctgagagcctggccgctgctgctgctgctgcccagcagctgcaggtggccaggaagcaggacacccggcagacagccaccttccggcagcagcccccacccatgaaggcctgcctgagctgccaccagcagatccacagaaatgcccccatctgccccctgtgcaaggccaagagccgcagcaggaaccccaagaagcccaagaggaagcaggatgaatag

SEQ ID NO: 199623 - DNA, 660 bp, Artificial Sequence
  derived and/or modified sequence
atgatccacttccacctgatcttcctgtatgtggccaggaacaagaccctgcagatggagaagatcaaggcccggctgaaggccgagtttgaggccctggagagcgaggagcggcacctgaaggagtacaagcaggagatggacctgctgctgcaggagaagatggcccacgtggaggagctgcggctcatccacgccgacatcaacgtgatggagaacaccatcaagcagagtgaaaatgacctgaacaagctgctggagagcacccggcggctgcatgatgagtacaagcccctgaaggagcacgtggatgccctgaggatgaccctgggcctgcagaggctgcctgacctgtgtgaggaggaggagaagctgagcctggactactttgagaagcagaaggccgagtggcagacagagccccaggagccccccatccctgagagcctggccgctgctgctgctgctgcccagcagctgcaggtggccaggaagcaggacacccggcagacagccaccttccggcagcagcccccacccatgaaggcctgcctgagctgccaccagcagatccacagaaatgcccccatctgccccctgtgcaaggccaagagccgcagcaggaaccccaagaagcccaagaggaagcaggatgaatag

SEQ ID NO: 199624 - DNA, 675 bp, Artificial Sequence
  derived and/or modified sequence
atggccgacgagcaggagatcatgtgcaagctggagagcatcaaggaaatccgaaacaaaactctacagatggagaagatcaaggccagactcaaagcagagttcgaagcactggagagcgaagagaggcatctgaaagagtacaaacaagagatggatctcttgttacaggagaagatggctcacgtggaggagctaagactgatccacgccgacatcaacgtgatggaaaacacaatcaagcagtcggaaaatgaccttaacaagctgttggaaagcaccaggagactgcatgacgaatacaagccactcaaggagcatgtggatgcgctcagaatgaccctggggttgcagagacttcccgacttgtgcgaggaagaggagaagctgtccctcgattacttcgaaaagcagaaggcagaatggcagaccgaaccacaggagccaccaatccctgaatccctggctgctgcagcagctgcggcccaacagctccaggtagccagaaaacaggacactagacagactgctacttttagacagcagcccccgccgatgaaagcgtgcctgagctgccatcagcaaatccaccggaacgcacccatatgtcctctgtgcaaggccaagtcgaggtcccgcaaccctaagaagccaaagcgaaaacaagacgagtag

SEQ ID NO: 199625 - DNA, 660 bp, Artificial Sequence
  derived and/or modified sequence
atgatccacttccacctgatcttcctgtacgtggcccggaacaagacgttgcaaatggaaaaaatcaaagctagactgaaggctgaattcgaggccctagagagtgaagagcgccatttgaaagaatataaacaggaaatggacctgctgctccaggaaaaaatggcacatgtcgaggagctccgcctgatccatgcagacatcaatgtgatggagaataccattaaacagtcagagaatgacctgaacaaattgctggaatcaactcgacggctgcatgatgagtacaaacctctgaaagaacatgtggacgcccttcgcatgaccctgggacttcagaggttgcccgacctctgcgaagaagaggaaaagttatccctagattacttcgagaagcagaaggccgagtggcaaaccgagcctcaggagcctccaatcccagaatctctggctgctgccgcagccgccgcacagcaactacaagtggctcgtaagcaggacaccaggcagaccgctacctttcgacagcagcctccccctatgaaggcatgcctgagctgtcaccagcagatacataggaacgcaccaatatgtccactgtgcaaggcaaaaagtcgaagccggaatccaaagaaacccaagcggaaacaggacgaatag

SEQ ID NO: 199626 - DNA, 675 bp, Artificial Sequence
  derived and/or modified sequence
atggctgacgaacaagaaattatgtgtaagttggaatccatcaaggagattcggaacaaaaccctccagatggaaaaaattaaagcccgactcaaggctgagttcgaggccctggagagtgaggaacgccatctgaaagaatacaaacaagaaatggatctcctgctgcaggagaaaatggcccacgttgaagagctcagattaattcatgccgacatcaacgtgatggaaaacaccataaaacagagcgagaatgatctgaacaagctgctggagtctacgaggaggcttcatgacgagtataaacctcttaaagagcacgtcgatgcgctacggatgaccctcggtctgcagcggcttccggacctttgtgaggaggaggaaaaactaagcttggactacttcgaaaaacagaaggcggagtggcaaacagagcctcaggaacccccaattcccgagtcactggccgcagcagctgcagccgctcagcagctgcaggtggctaggaaacaagacacccgccagactgcgaccttccgacagcagccgccaccaatgaaagcctgcctctcttgtcaccagcagattcaccgaaatgcacccatctgccccttgtgcaaagcaaagagccgcagcagaaacccaaaaaagcccaagcggaaacaagatgaatag

SEQ ID NO: 199627 - DNA, 660 bp, Artificial Sequence
  derived and/or modified sequence
atgattcacttccacctgattttcctgtatgtcgcaagaaacaagacactgcagatggagaagatcaaggcgcgattaaaagcagaattcgaggcactggaaagtgaggaaaggcacttaaaggaatacaagcaggaaatggatctgctgttacaggagaagatggcccacgtggaggagctgcggctcattcacgctgacataaatgtaatggagaataccatcaagcagtctgaaaatgatctgaataaattgctggaaagtacaaggagactacatgatgagtacaaacctcttaaggagcatgtggacgcgcttcgcatgactctaggtctacagaggttacccgacctgtgtgaagaggaggaaaagctctccctggactattttgaaaaacaaaaggcggagtggcagaccgaacctcaggaaccccctattccagagtccctggctgccgcagccgcagcagctcagcagttacaggtggcacggaaacaggacactcggcagaccgctacgtttcgacagcagcccccacccatgaaagcctgcctatcatgccatcagcagattcaccggaatgctcctatctgtccactgtgtaaggccaagtcacgttcccgcaaccccaaaaagcccaaaaggaaacaggatgaatag

SEQ ID NO: 199628 - DNA, 2363 bp, Artificial Sequence
  derived and/or modified sequence
gctgtcggagctcagaccagcaggcctacgacctagaaagtgctcaaaaccccacttcctaaggcctagaaggagcgacgtgaagatataaggtctcactatgttgcccatgctggtttcaaactcctgggctcaagtgatcctcctgcctctgtcttccaaattgctgagattactggcatgagccattgcacctggccttcttttttgagatggcctcaggttggctctgcctggagagggggaagcttgtaaagatggcttagaaaaaaagtcctggctccatttctattttctcccttcttttgctggcctgtttcctgctttttgcaaattgcaggaacaagaccctgcagatggagaagatcaaggctcgtttgaaggctgagtttgaggcacttgagtcagaggaaaggcacctgaaggaatacaagcaggagatggaccttctgctacaggagaagatggcccatgtggaggaactccgactgatccacgctgacatcaatgtgatggaaaacactatcaaacaatctgagaatgacctaaacaagctgctagagtctacaaggaggctgcatgatgagtataagccactgaaagaacatgtggatgccctgcgcatgactctgggcctgcagaggctccctgacttgtgtgaagaagaggagaagctttccttggattactttgagaagcagaaagcagaatggcagacagaacctcaggagccccccatccctgagtccctggccgctgcagccgctgccgcccaacagctccaagtggctaggaagcaggatactcggcagacggccaccttcaggcagcagcccccacctatgaaggcctgcttgtcatgtcaccagcaaattcaccggaatgcacctatatgccctctttgcaaggccaagagtcggtcccggaaccccaaaaagccgaaacggaagcaggatgaataaagaaagggagagcacatgaagctttgctaattataacccctcaccttgaccagagtcattgatgtcctgatgtgaaacaacccttgcccaaccccacgaagtctcctatttaatgtgatggaagcacaacccctctctcactttgctcctatttctttctgctcttgggatttctggtttaggaagagatgtggttcaggtgctaaacagtgtgtctgatgatcccttctctcccactcacatttcaacccctgcccttgtttggagctaagggaagggcaaaaggctcagatatgattctctatctcttgtgcctgaggcctggagcctaaggagctgtagggtctgaggggcaggggaggcccatatcttgtttcaggtaaaggacccagtatttcccctccttgtacttttgccttaggttctcaagggacaatagtcttcatgttggattctccaacaggctgggtgcatgtatccccctactcctaccctcatctcatccttaaggcccagaggtagcttggacaagccctccttttcataatcatttgggaggcatggctgtaattctttagctttctccacttctgtctcccacatatactaaaattcttaggtactaggctgtgtgtcttgggatcttaagatcaatgaacctttccccaatatctagtctttgcaaattctagtagaagatttccacagtgaaatcagtgagccagaccaactctacatctcctgcctaacctactgcctaagtcattagggctgagggctcggctgtaggggcttccttaggctgagagtgcccccaggctgacatctgtgttggcttttgttcagaaccattactctggcacatgctcaatggtatattgcagggaggagaggagtagatttagatttgagtaaatgccaatcactttacacatgaaggtgggtgggactttccttccattcatcccttgctctcttggatctgaactcttctggagcctcagctcaggatagctgctggccactcctgtcctgtggattgtgcaggtggcctttcctcccaaaagaaaaggcatcaggctccccaagccccacagctctcctttccaccaaagccaggtttcctggtaaggtcactcgaagataagggatggggatgggggctgactgacaaaaaattttagccccaggtctcagtacctggctggggagggggatatttttccttccttaagtagttttacattgccacagtgtgtatgtgttcactatataaaatgttcctctgctctttgaaagtaagagtgttgtgtctgtacaaatccttttaacatgcattcattggagtaaattctgagtatctactgtgtattggataatacaaaagatgtaatgtcattt

SEQ ID NO: 199629 - DNA, 2184 bp, Artificial Sequence
  derived and/or modified sequence
caggctcatagccccaagcccggaggaggtggctacattgtgtctattgtatcccttggctggtgtatttgtacatctctcgggacgtgaaattgacagtgaaaagtatggcagatgagcaagaaatcatgtgcaaattggaaagcattaaagagatcaggaacaagaccctgcagatggagaagatcaaggctcgtttgaaggctgagtttgaggcacttgagtcagaggaaaggcacctgaaggaatacaagcaggagatggaccttctgctacaggagaagatggcccatgtggaggaactccgactgatccacgctgacatcaatgtgatggaaaacactatcaaacaatctgagaatgacctaaacaagctgctagagtctacaaggaggctgcatgatgagtataagccactgaaagaacatgtggatgccctgcgcatgactctgggcctgcagaggctccctgacttgtgtgaagaagaggagaagctttccttggattactttgagaagcagaaagcagaatggcagacagaacctcaggagccccccatccctgagtccctggccgctgcagccgctgccgcccaacagctccaagtggctaggaagcaggatactcggcagacggccaccttcaggcagcagcccccacctatgaaggcctgcttgtcatgtcaccagcaaattcaccggaatgcacctatatgccctctttgcaaggccaagagtcggtcccggaaccccaaaaagccgaaacggaagcaggatgaataaagaaagggagagcacatgaagctttgctaattataacccctcaccttgaccagagtcattgatgtcctgatgtgaaacaacccttgcccaaccccacgaagtctcctatttaatgtgatggaagcacaacccctctctcactttgctcctatttctttctgctcttgggatttctggtttaggaagagatgtggttcaggtgctaaacagtgtgtctgatgatcccttctctcccactcacatttcaacccctgcccttgtttggagctaagggaagggcaaaaggctcagatatgattctctatctcttgtgcctgaggcctggagcctaaggagctgtagggtctgaggggcaggggaggcccatatcttgtttcaggtaaaggacccagtatttcccctccttgtacttttgccttaggttctcaagggacaatagtcttcatgttggattctccaacaggctgggtgcatgtatccccctactcctaccctcatctcatccttaaggcccagaggtagcttggacaagccctccttttcataatcatttgggaggcatggctgtaattctttagctttctccacttctgtctcccacatatactaaaattcttaggtactaggctgtgtgtcttgggatcttaagatcaatgaacctttccccaatatctagtctttgcaaattctagtagaagatttccacagtgaaatcagtgagccagaccaactctacatctcctgcctaacctactgcctaagtcattagggctgagggctcggctgtaggggcttccttaggctgagagtgcccccaggctgacatctgtgttggcttttgttcagaaccattactctggcacatgctcaatggtatattgcagggaggagaggagtagatttagatttgagtaaatgccaatcactttacacatgaaggtgggtgggactttccttccattcatcccttgctctcttggatctgaactcttctggagcctcagctcaggatagctgctggccactcctgtcctgtggattgtgcaggtggcctttcctcccaaaagaaaaggcatcaggctccccaagccccacagctctcctttccaccaaagccaggtttcctggtaaggtcactcgaagataagggatggggatgggggctgactgacaaaaaattttagccccaggtctcagtacctggctggggagggggatatttttccttccttaagtagttttacattgccacagtgtgtatgtgttcactatataaaatgttcctctgctctttgaaagtaagagtgttgtgtctgtacaaatccttttaacatgcattcattggagtaaattctgagtatctactgtgtattggataatacaaaagatgtaatgtcattta

SEQ ID NO: 199630 - DNA, 2637 bp, Artificial Sequence
  derived and/or modified sequence
attgtgtctattgtatcccttggctggtgtatttgtacatctctcgggacgtgaaattgacagtgaaaagtatggcagatgagcaagaaatcatgtgcaaattggaaagcattaaagagatcaggatatcactccgccacccaagctggagttcagcagtgccatcgtggctcactgaagccttgaattcctgggctccagaagttatcccacttcagcttccccaataactggactacaggcttgtgccaccatgcctggctaatttttcttaaatattttgtagagacagggtctcactatgttacccagggtggtcttgaactcctgggctcaagcgatcctcccgccatggcttcccaaagtgttctgattataggtgtgagacaccgcactgagccagaaacttttaatgttgatgaagaaatccaatttatcagtattttttatggattgtgaattcttgtgccatttaggagaaatgtttgcctaagtcgtattcacaaagattttctcctatattttcttccagaaattttatttttaggtttcacgtttaggtctatgatccattttcacttaatttttttgtatgttgcaaggaacaagaccctgcagatggagaagatcaaggctcgtttgaaggctgagtttgaggcacttgagtcagaggaaaggcacctgaaggaatacaagcaggagatggaccttctgctacaggagaagatggcccatgtggaggaactccgactgatccacgctgacatcaatgtgatggaaaacactatcaaacaatctgagaatgacctaaacaagctgctagagtctacaaggaggctgcatgatgagtataagccactgaaagaacatgtggatgccctgcgcatgactctgggcctgcagaggctccctgacttgtgtgaagaagaggagaagctttccttggattactttgagaagcagaaagcagaatggcagacagaacctcaggagccccccatccctgagtccctggccgctgcagccgctgccgcccaacagctccaagtggctaggaagcaggatactcggcagacggccaccttcaggcagcagcccccacctatgaaggcctgcttgtcatgtcaccagcaaattcaccggaatgcacctatatgccctctttgcaaggccaagagtcggtcccggaaccccaaaaagccgaaacggaagcaggatgaataaagaaagggagagcacatgaagctttgctaattataacccctcaccttgaccagagtcattgatgtcctgatgtgaaacaacccttgcccaaccccacgaagtctcctatttaatgtgatggaagcacaacccctctctcactttgctcctatttctttctgctcttgggatttctggtttaggaagagatgtggttcaggtgctaaacagtgtgtctgatgatcccttctctcccactcacatttcaacccctgcccttgtttggagctaagggaagggcaaaaggctcagatatgattctctatctcttgtgcctgaggcctggagcctaaggagctgtagggtctgaggggcaggggaggcccatatcttgtttcaggtaaaggacccagtatttcccctccttgtacttttgccttaggttctcaagggacaatagtcttcatgttggattctccaacaggctgggtgcatgtatccccctactcctaccctcatctcatccttaaggcccagaggtagcttggacaagccctccttttcataatcatttgggaggcatggctgtaattctttagctttctccacttctgtctcccacatatactaaaattcttaggtactaggctgtgtgtcttgggatcttaagatcaatgaacctttccccaatatctagtctttgcaaattctagtagaagatttccacagtgaaatcagtgagccagaccaactctacatctcctgcctaacctactgcctaagtcattagggctgagggctcggctgtaggggcttccttaggctgagagtgcccccaggctgacatctgtgttggcttttgttcagaaccattactctggcacatgctcaatggtatattgcagggaggagaggagtagatttagatttgagtaaatgccaatcactttacacatgaaggtgggtgggactttccttccattcatcccttgctctcttggatctgaactcttctggagcctcagctcaggatagctgctggccactcctgtcctgtggattgtgcaggtggcctttcctcccaaaagaaaaggcatcaggctccccaagccccacagctctcctttccaccaaagccaggtttcctggtaaggtcactcgaagataagggatggggatgggggctgactgacaaaaaattttagccccaggtctcagtacctggctggggagggggatatttttccttccttaagtagttttacattgccacagtgtgtatgtgttcactatataaaatgttcctctgctctttgaaagtaagagtgttgtgtctgtacaaatccttttaacatgcattcattggagtaaattctgagtatctactgtgtattggataatacaaaagatgtaatgtcatttacctttctgggt

SEQ ID NO: 199631 - protein, 1124 aa, Artificial Sequence
  derived and/or modified sequence
MDPFTEKLLERTRARRENLQRKMAERPTAAPRSMTHAKRARQPLSEASNQQPLSGGEEKSCTKPSPSKKRCSDNTEVEVSNLENKQPVESTSAKSCSPSPVSPQVQPQAADTISDSVAVPASLLGMRRGLNSRLEATAASSVKTRMQKLAEQRRRWDNDDMTDDIPESSLFSPMPSEEKAASPPRPLLSNASATPVGRRGRLANLAATICSWEDDVNHSFAKQNSVQEQPGTACLSKFSSASGASARINSSSVKQEATFCSQRDGDASLNKALSSSADDASLVNASISSSVKATSPVKSTTSITDAKSCEGQNPELLPKTPISPLKTGVSKPIVKSTLSQTVPSKGELSREICLQSQSKDKSTTPGGTGIKPFLERFGERCQEHSKESPARSTPHRTPIITPNTKAIQERLFKQDTSSSTTHLAQQLKQERQKELACLRGRFDKGNIWSAEKGGNSKSKQLETKQETHCQSTPLKKHQGVSKTQSLPVTEKVTENQIPAKNSSTEPKGFTECEMTKSSPLKITLFLEEDKSLKVTSDPKVEQKIEVIREIEMSVDDDDINSSKVINDLFSDVLEEGELDMEKSQEEMDQALAESSEEQEDALNISSMSLLAPLAQTVGVVSPESLVSTPRLELKDTSRSDESPKPGKFQRTRVPRAESGDSLGSEDRDLLYSIDAYRSQRFKETERPSIKQVIVRKEDVTSKLDEKNNAFPCQVNIKQKMQELNNEINMQQTVIYQASQALNCCVDEEHGKGSLEEAEAERLLLIATGKRTLLIDELNKLKNEGPQRKNKASPQSEFMPSKGSVTLSEIRLPLKADFVCSTVQKPDAANYYYLIILKAGAENMVATPLASTSNSLNGDALTFTTTFTLQDVSNDFEINIEVYSLVQKKDPSGLDKKKKTSKSKAITPKRLLTSITTKSNIHSSVMASPGGLSAVRTSNFALVGSYTLSLSSVGNTKFVLDKVPFLSSLEGHIYLKIKCQVNSSVEERGFLTIFEDVSGFGAWHRRWCVLSGNCISYWTYPDDEKRKNPIGRINLANCTSRQIEPANREFCARRNTFELITVRPQREDDRETLVSQCRDTLCVTKNWLSADTKEERDLWMQKLNQVLVDIRLWQPDACYKPIGKP

SEQ ID NO: 199632 - DNA, 3375 bp, Artificial Sequence
  derived and/or modified sequence
atggacccttttaccgagaagcttttggaacgtactcgggctcgccgtgagaatctgcaacgaaagatggcagagcgcccgaccgccgctcctcgaagcatgacccacgcgaagcgggccaggcagcctctgtctgaagcctccaatcagcaacctcttagcggcggagaagaaaagtcatgtacaaagccatctccatctaagaaacgctgtagtgacaatacagaggtggaggtgtccaacctggagaacaaacagccagttgaatcaacatcagccaagtcatgctcaccaagcccagtatcaccacaggtgcaaccacaggccgccgacacgataagcgattccgtcgcagtccctgcttccctgctcggtatgcgtagaggacttaatagcagactggaggctactgcagctagctccgtcaaaacaagaatgcagaaacttgccgaacagcgtcggaggtgggataacgatgacatgacagacgacatccccgaatctagtctgtttagcccgatgccctccgaggaaaaagctgcgtctcctccccgacctctgctctctaatgcctctgccacccctgtggggcggcgtggccgcctggccaatctggccgcaaccatatgcagctgggaggacgatgtgaaccactccttcgccaaacagaattccgtccaggaacaaccaggaacagcctgtctgagtaagttttcaagcgcctccggcgcctcagctcgcatcaactcaagcagtgtgaaacaggaggccaccttttgttcgcagagagatggcgatgcctccctcaacaaagccctgagcagcagcgctgatgatgcttcactggtaaatgcctctatctcttccagcgtaaaagccacaagccccgtgaagtctacgacctcaattaccgatgcgaagtcttgtgaggggcaaaacccggagctgctgcctaagacgcctatttctccattaaagactggtgtgtcgaaacccattgtgaagtccaccctgtcccagacagtgccatccaagggcgagctgtcccgggaaatctgtctccagtctcagtcaaaagataagtctaccactccgggaggcacaggaatcaagcctttcctggaacgtttcggggagaggtgccaggagcacagtaaggaaagccctgcacggagcacgccacatcgcacacccatcatcacgcctaacacaaaggctatccaggagaggttgttcaaacaggacactagtagttctaccacacatcttgcacagcaactcaagcaggagaggcaaaaggagctcgcctgcctgcgcggtcgttttgataaagggaatatttggtcagcggaaaagggcgggaattcaaaatctaagcagctggagacaaagcaagagacacattgccagagcaccccattgaagaaacatcagggagtgagtaaaacgcaaagcctgcctgtgacagagaaagtcacagagaatcagatccctgctaagaactcctccactgagccaaagggcttcacagagtgcgagatgaccaaatcaagcccactgaaaatcacactatttctggaagaggacaagagtttgaaggtgacaagtgaccccaaggttgaacaaaaaatcgaagtgatcagagaaatcgaaatgtccgtcgatgatgatgatattaattcgagcaaggttattaatgatctctttagcgacgtgcttgaggaaggggaattagacatggagaaaagtcaggaggaaatggaccaggccctcgctgagagctcagaggagcaggaggacgctttgaatattagctccatgtcattgctggcccccctcgcccagactgtcggcgttgtcagcccggagagccttgtgtctaccccacggctggaactcaaagatactagccgctcggacgagagtccgaaacctggaaagttccagcggacccgggtgcctcgcgcggagtcgggggattccctgggtagtgaggaccgtgaccttctctacagtatcgacgcttaccggagtcaacgattcaaagagactgagaggccctctatcaaacaggttattgtgcgaaaggaagatgtcacctctaagctggacgaaaagaacaacgcattcccttgtcaggtcaacatcaagcagaaaatgcaggaacttaataatgagataaatatgcagcagaccgtaatttatcaggcaagtcaggctcttaactgctgcgttgatgaggaacatggaaaaggatcccttgaggaagctgaagcggaaagattactcctgatcgcaaccggaaaacgaaccctgctgatcgacgagctgaacaaactcaaaaacgaggggccccagcggaagaacaaagcctccccacagtccgagttcatgcccagtaaggggtccgtgactctgtctgaaatccgtctacctctgaaggccgacttcgtgtgtagcaccgtgcagaagcccgacgctgcaaattactactatcttatcatcctcaaagctggggccgaaaatatggtcgccactcccttagccagtacttctaacagcttgaacggcgatgctttgactttcacaaccacttttaccctccaggatgtcagtaacgattttgaaattaacattgaggtttactccctcgtgcagaaaaaggacccaagcgggttggataagaagaaaaaaacctccaaatctaaagcaatcacacctaagcgcctcctcactagcattacgacaaagtccaatatccatagtagcgtgatggccagcccgggcggcctctctgcagtgagaacctcaaattttgcgctggtgggtagttataccctgtctctctcttctgtagggaacaccaaatttgtactagataaggtgccattcttgagctccctcgagggacacatctaccttaagattaaatgtcaggtgaactccagcgttgaagagcgggggtttctgacaattttcgaagacgtgagcggcttcggggcatggcaccggaggtggtgcgtcctcagcgggaactgtattagttactggacctacccagatgacgaaaagcggaagaatccaatcggcagaatcaacctggcaaattgcacatcgagacagatagagcccgcaaaccgcgagttctgcgccagaaggaacactttcgaattgataaccgtgcgaccccagcgagaagacgaccgcgaaacgctggtgagccagtgtcgtgataccctatgtgtgactaagaattggctgtcagcggataccaaggaagaacgcgatttgtggatgcagaagctcaatcaggtcctcgtcgatatcagactctggcagcctgacgcctgttataaacccatcggcaagccgtag

SEQ ID NO: 199633 - DNA, 3375 bp, Artificial Sequence
  derived and/or modified sequence
atggaccccttcacagagaagctgctggagaggacccgggcccggcgggagaacctgcagaggaagatggccgagcggcccacagctgcccccaggtccatgacccacgccaagagggcccggcagcccctgtctgaggccagcaaccagcagcccctgagcggcggggaggagaagagctgcaccaagcccagccccagcaagaagcgctgcagcgacaacacagaggtggaggtgagcaacctggagaacaagcagcctgtggagagcaccagcgccaagagctgcagccccagccctgtgagcccccaggtgcagccccaggccgctgacaccatcagtgacagcgtggccgtgcctgccagcctgctgggcatgagaagaggcctgaacagccggctggaggccacagctgccagctctgtgaagaccaggatgcagaagctggccgagcagaggcggcgctgggacaatgatgacatgacagatgacatccctgagagcagcctcttcagccccatgcccagcgaggagaaggccgccagccccccccggcccctgctgagcaatgccagcgccacccctgtgggccggcggggccgcctggccaacctggccgccaccatctgctcctgggaggatgatgtgaaccacagctttgccaagcagaacagcgtgcaggagcagcccggcacagcctgcctgagcaagttcagcagcgccagcggggccagcgcccgcatcaacagcagctctgtgaagcaggaggccaccttctgcagccagagagatggagatgccagcctgaacaaggccctgagcagcagcgcagatgatgccagcctggtgaatgccagcatcagcagctctgtgaaggccaccagccctgtgaagagcaccaccagcatcacagatgccaagagctgtgagggccagaaccctgagctgctgcccaagacccccatcagccccctgaagacaggagtgtccaagcccatcgtgaagagcaccctgagccagacagtgcccagcaaaggagagctgagccgggagatctgcctgcagagccagagcaaggacaagagcaccaccccaggcggcaccggcatcaagcccttcctggagagatttggagagcgctgccaggagcacagcaaggagagccctgcccggagcaccccccacaggacccccatcatcacccccaacaccaaggccatccaggagcggctcttcaagcaggacaccagcagcagcaccacccacctggcccagcagctgaagcaggagcggcagaaggagctggcctgcctgcggggccgctttgacaagggcaacatctggagcgctgagaagggcggcaacagcaagagcaagcagctggagaccaagcaggagacccactgccagagcacccccctgaagaagcaccagggcgtgtccaagacccagagcctgcctgtgacagagaaggtgacagagaaccagatcccagccaagaacagcagcacagagcccaagggcttcacagaatgtgagatgaccaagagcagccccctgaagatcaccctcttcctggaggaggacaagagcctgaaggtgaccagtgaccccaaggtggagcagaagattgaggtgatccgggagattgagatgtctgtggatgatgatgacatcaacagcagcaaggtgatcaatgacctcttcagtgatgtgctggaggagggggagctggacatggagaagagccaggaggagatggaccaggccctggccgagagcagcgaggagcaggaggatgccctgaacatcagctccatgagcctgctggcccccctggcccagacagtgggcgtggtgtccccagagagcctggtgtccaccccccggctggagctgaaggacaccagcagaagtgatgagagccccaagccaggcaagttccagaggaccagggtgcccagggctgagagcggggacagcctgggctctgaagatcgggacctgctgtacagcattgatgcctaccgcagccagcgcttcaaggagacagagcggcccagcatcaagcaggtgattgtgaggaaagaagatgtgaccagcaagctggatgagaagaacaatgccttcccctgccaggtgaacatcaagcagaagatgcaggagctgaacaatgagatcaacatgcagcagaccgtcatctaccaggccagccaggccctgaactgctgcgtggatgaggagcacggcaagggcagcctggaggaggccgaggccgagcggctgctgctgattgccaccgggaagaggaccctgctgattgatgagctgaacaagctgaagaatgaaggcccccagaggaagaacaaggccagcccccagagcgagttcatgcccagcaaaggatctgtgaccctgtctgagatccggctgcccctgaaggctgactttgtgtgcagcacagtgcagaagccagatgctgccaactactactacctgatcatcctgaaggccggggctgagaacatggtggccacccccctggccagcaccagcaacagcctgaatggagatgccctgaccttcaccaccaccttcaccctgcaggatgtgtccaatgactttgagatcaacatcgaggtgtacagcctggtgcagaagaaggaccccagcggcctggacaagaagaagaagaccagcaagagcaaggccatcacccccaagaggctgctgaccagcatcaccaccaagagcaacatccacagctctgtgatggccagccctgggggcctgtctgctgtgaggaccagcaactttgccctggtgggcagctacaccctgagcctgagctctgtgggcaacaccaagtttgtgctggacaaggtgcccttcctgagcagcctggagggccacatctacctgaagatcaagtgccaggtgaacagctctgtggaggagcggggcttcctgaccatctttgaagatgtgtctggctttggagcctggcaccggcgctggtgtgtgctgagcggcaactgcatctcctactggacctacccagatgatgagaagaggaagaaccccatcggccgcatcaacctggccaactgcaccagccggcagatcgagcccgccaaccgggagttctgtgcccggaggaacacctttgagctgatcaccgtgcggccccagcgggaggatgaccgggagaccctggtgtcccagtgccgggacaccctgtgtgtgaccaagaactggctgtctgctgacaccaaggaggagcgggacctgtggatgcagaagctgaaccaggtgctggtggacatccggctgtggcagccagatgcctgctacaagcccatcggcaagccctag

SEQ ID NO: 199634 - DNA, 3375 bp, Artificial Sequence
  derived and/or modified sequence
atggaccccttcaccgagaagctgctggagcggacccgggcccggcgggagaacctgcagcgcaagatggccgaacgccccacagcagccccaagatcaatgacacatgctaaaagagcccgacagcccctgagcgaagccagcaaccagcagccattaagcgggggcgaagaaaagagttgcaccaaaccttctccgtctaagaagaggtgttccgataacacagaagtggaggtgtccaatttggagaataagcagccggtggagtctacatcagccaagagttgctccccttctccagtgagcccacaggttcagccacaggcagctgacacaatatctgacagtgtggccgtccctgcgtcactgctgggtatgcgtcggggattgaattctcgcttagaggccactgctgcctcgagcgttaaaacccgaatgcagaaactcgccgagcagcgacgacggtgggataacgatgacatgacagacgacattcctgagtcgtcacttttctctccaatgccctccgaagaaaaagccgcctcgccacctcgcccactactctcaaacgcgtctgccacgccggtggggaggagaggcagactggcaaatctggccgccacaatttgctcgtgggaggacgacgtcaaccacagcttcgcgaagcagaatagtgtccaggaacaacctgggactgcctgtctgagtaagttctcatctgcatcgggagcaagcgcaagaatcaattcaagctccgttaaacaggaagccacattttgtagccagagagatggcgacgctagcctgaataaggccctctcctcatcagccgacgacgcatccctcgtgaacgcctcaattagcagctccgtgaaagctaccagtcctgtcaagtccaccacttcgatcactgacgcaaagtcgtgcgaaggacaaaatcccgagttgttacctaaaacccctatctcccccctgaaaaccggtgtcagcaagccaattgtgaaaagtaccctgagtcaaacagtcccaagcaaaggtgagttgtctcgcgaaatctgcttgcagtcccaaagcaaggacaagagtactacccctggcggtaccgggataaagcccttcttagagcgatttggggagcgatgccaagagcatagcaaggagtccccagcgagatcaacgcctcaccgcactccaatcatcacacctaacaccaaggccattcaagagcgtttatttaagcaggatacatcctcatccaccactcatttggcccagcagctgaaacaggagcgccagaaggagctggcctgtctgcggggccggtttgacaagggtaatatatggtccgctgagaaggggggcaactcgaagagtaagcagctggaaacgaagcaagaaacacactgtcagagtacccccctgaagaagcatcagggtgttagtaagacccagtcgttgcctgtcaccgagaaggtgaccgaaaatcagatccccgcaaagaatagcagcacagagcctaagggcttcactgagtgtgagatgactaagtcgagtcctctgaaaatcacattgtttctggaggaagataaatccttgaaagtgacttctgaccccaaggttgagcaaaaaatagaagtgatcagggaaatcgagatgtccgtcgacgatgacgacatcaatagctctaaggttatcaatgatttgttttcagatgtgttggaagaaggcgagctggatatggagaaatcacaggaagagatggatcaagcactcgccgagtccagcgaggagcaggaggacgcactgaatatatccagcatgtccttgctggctcctctagcccagactgtgggcgtggtatccccagagtctctggtatccactccgagattagagctcaaggacacctcacggtctgacgagtcccctaagccagggaaattccagagaacgcgagtgcctcgcgcagaatctggcgactccctagggagcgaggatcgggacctgctctacagtatagacgcatatcgatcccaaaggtttaaagaaacggaacgacctagcatcaagcaggtaatagttagaaaagaagacgttacttccaaactggatgagaaaaacaatgctttcccttgtcaggtaaacattaagcaaaaaatgcaggagctgaataacgagatcaacatgcagcaaaccgtgatttaccaggcctcccaagccctgaactgttgcgtggatgaagaacacggaaaagggtccctggaagaggccgaggccgagaggctgttgctgatcgctacaggcaagcgcaccttacttatcgatgagctgaacaagctgaaaaacgaaggaccccagcgcaagaacaaggcctccccacagtccgagttcatgcctagtaaggggtctgtcacattgtctgagattcgtctgccactcaaggctgatttcgtctgcagcacagtgcagaaaccagatgctgctaactattattacctgatcattcttaaagccggagccgagaacatggtcgctactccactggcatctacctctaattcccttaatggcgatgccctgacttttacgactacctttaccctgcaggacgtgtctaacgattttgaaattaacatcgaagtgtattcgctggtgcagaagaaggatccttctggacttgacaaaaaaaaaaagacctctaagtccaaagctattacccccaagcggctgctcacttccatcaccactaagtcaaacatccactcatctgttatggcttcacccggcgggctaagtgctgtcagaacaagcaacttcgcattagtgggctcttacactctttccctctcctcagttggcaacactaagttcgtactagacaaggtcccctttctctcaagtctcgagggccacatctacctgaaaatcaagtgccaggtgaacagttctgttgaagagcgtggcttcctgaccattttcgaagacgtgtccggatttggagcctggcatcgtcgttggtgtgttctgtctggcaattgtatttcctactggacatatcccgatgatgaaaagcggaaaaatccgatcggaagaattaacctggccaactgcacctcgcgccagatagaacctgctaacagggagttttgtgctcgccggaacaccttcgaacttataacggtacgcccccaacgcgaggatgatagagaaactctggtatcacagtgccgcgatacgctgtgtgtcacaaaaaactggctgagcgcggatacaaaggaggagagagacttatggatgcagaagctcaatcaggtgctggtcgatatccgcctctggcaaccagatgcatgctacaagcctataggaaagccctag

SEQ ID NO: 199635 - DNA, 3375 bp, Artificial Sequence
  derived and/or modified sequence
atggaccctttcacagaaaaacttctggagagaacccgtgcacgaagggaaaatctgcaaaggaaaatggccgagcggcctactgctgctccgcgaagcatgactcacgccaaaagggccagacaacctttaagcgaagcctccaatcaacagccactgagcggcggagaagaaaaaagctgtacaaaaccctccccctctaaaaaaagatgctctgacaacacagaagttgaggtttctaatctggagaataaacagccagtggaatccacttctgccaaatcgtgttcccccagccccgtgtctcctcaggttcaaccccaggccgcagatactatctctgatagtgtagcggtgccggctagcctccttgggatgcgcagaggattgaattctaggttggaagccaccgcagcaagctccgtcaagacacggatgcagaagctggctgaacaacgacgtcgctgggacaatgatgatatgaccgacgacattcctgaatccagcttattttcccctatgccatccgaagagaaggctgctagcccacctcggccactgctttccaatgcctccgctaccccagtgggacgtcgcggtaggctggccaatctggctgctaccatctgcagttgggaggacgacgtgaatcatagttttgctaagcaaaactccgtccaggagcagcctggaactgcatgcttgtcaaagtttagctcagcttcaggtgcgagcgccaggataaattctagctctgtgaagcaggaagctaccttctgcagtcagcgcgacggagacgcatcacttaataaagcactatcttcatccgccgatgacgcttcactggtgaacgccagcatcagcagttcagtgaaagctacatctccggttaaatcaaccacctccatcacagatgcgaaaagttgcgagggacagaatccagagcttctgcctaagacccccatttctcctcttaaaaccggagtgagcaaacccatcgttaaatcaaccctcagccagacggtaccctccaaaggcgagcttagcagggagatttgtcttcaatcacagagtaaagacaaatcaacgacacccggaggtactggaattaagcccttcctggagcgattcggcgaaagatgtcaggaacacagcaaagaaagcccagcacggagtacccctcatcgaacacctataattaccccaaacacaaaggccatccaggagcgcctctttaagcaagatacttcttcctcaaccactcacctggcacagcaacttaaacaagagcggcagaaagagctggcttgtctaagggggagatttgataaaggcaatatctggtccgccgagaaagggggaaacagcaaaagcaaacagctggagacgaaacaggagacccattgtcagagtacccctctaaagaaacatcagggagtctcgaaaactcagtcgctgcccgtgacagaaaaagttacagaaaaccagattcccgcaaagaatagcagcacagaacctaaaggcttcactgaatgcgaaatgactaagagctcccctctgaaaatcactctgtttcttgaagaagataaaagcctcaaagtcacttccgaccctaaggttgaacagaagatagaagtgatacgggaaatagaaatgagtgtcgatgacgacgatatcaactcaagcaaggtgattaacgacctatttagcgatgtgctcgaggaaggcgaactagatatggagaagtcacaggaggaaatggatcaggcactggctgagtcctcagaggaacaggaggatgcactgaacatctccagtatgtcgctgctagcacccttggcccagacagtcggagtcgtgtcccctgagtctctggtgtcaaccccccgattggagctgaaggacaccagcaggtcagatgagtctcccaaacctgggaaattccagcgcaccagggttccccgtgccgagagcggggactcactcggaagcgaggaccgtgacttgctatattccatcgatgcatacaggtcccagcggttcaaagagacagaacgcccaagcatcaaacaggttatcgtacgcaaggaagacgtgacgtctaagcttgacgagaaaaataatgcctttccctgccaggtcaatattaagcagaagatgcaagagctgaacaacgaaattaatatgcaacaaactgtcatctatcaggcctcccaagcattgaactgttgcgttgatgaagaacatggaaagggttcgctggaggaggcagaggcagaaaggttactgctgatagccactggaaagagaacactcttaatcgatgaactgaataagctcaaaaatgaaggccctcagaggaagaacaaagcctctccccagagcgagtttatgcctagcaaaggttccgtgacactgtcagagatcagactgccacttaaggctgatttcgtgtgctctacagtgcagaaaccagatgcagccaactactattatcttatcattttaaaggccggagccgagaacatggtagccacacctttggcaagcacaagcaattccctcaacggggatgccttgacattcaccacaacatttacccttcaggatgtttccaatgactttgaaatcaatatcgaagtatactcgctcgtgcagaaaaaggacccatccggccttgataaaaagaagaagacatctaaatctaaagccatcactcccaagcgtcttctgacatccataaccactaaatctaacattcactccagtgtgatggcaagtccaggtggtctttcagccgtgaggacatccaatttcgcactcgttggttcttataccctgtcactctcaagtgtaggcaatacgaagtttgtcttggataaggtgccttttttaagctctttggagggccatatttacctgaagatcaaatgccaggtcaactcatctgtggaggaaaggggcttcctgactatctttgaagatgtcagcggcttcggagcctggcataggaggtggtgtgtcctttccggcaactgtatttcttattggacatatcctgatgacgagaaaaggaagaatcccatcggtagaattaacctcgccaattgtacaagccggcagatcgagcccgcaaatcgcgaattctgtgcaaggaggaacacatttgagttgattacagtccgaccgcagagggaggacgaccgcgaaactctggtctcccagtgtagagatactctatgtgtgacaaaaaactggctgagtgccgacaccaaagaggagagggacctgtggatgcagaaactcaatcaggtcctcgtggatatccggctctggcaaccagacgcctgctacaaacccattgggaaaccctag

SEQ ID NO: 199636 - DNA, 4787 bp, Artificial Sequence
  derived and/or modified sequence
agcgcgcatgctcgcggctcggcgctgaaattcaaatttgaacggctgcagaggccgagtccgtcactggaagccgagaggagaggacagctggttgtgggagagttcccccgcctcagactcctggttttttccaggagacacactgagctgagactcacttttctcttcctgaatttgaaccaccgtttccatcgtctcgtagtccgacgcctggggcgatggatccgtttacggagaaactgctggagcgaacccgtgccaggcgagagaatcttcagagaaaaatggctgagaggcccacagcagctccaaggtctatgactcatgctaagcgagctagacagccactttcagaagcaagtaaccagcagcccctctctggtggtgaagagaaatcttgtacaaaaccatcgccatcaaaaaaacgctgttctgacaacactgaagtagaagtttctaacttggaaaataaacaaccagttgagtcgacatctgcaaaatcttgttctccaagtcctgtgtctcctcaggtgcagccacaagcagcagataccatcagtgattctgttgctgtcccggcatcactgctgggcatgaggagagggctgaactcaagattggaagcaactgcagcctcctcagttaaaacacgtatgcaaaaacttgcagagcaacggcgccgttgggataatgatgatatgacagatgacattcctgaaagctcactcttctcaccaatgccatcagaggaaaaggctgcttcccctcccagacctctgctttcaaatgcctcggcaactccagttggcagaaggggccgtctggccaatcttgctgcaactatttgctcctgggaagatgatgtaaatcactcatttgcaaaacaaaacagtgtacaagaacagcctggtaccgcttgtttatccaaattttcctctgcaagtggagcatctgctaggatcaatagcagcagtgttaagcaggaagctacattctgttcccaaagggatggcgatgcctctttgaataaagccctatcctcaagtgctgatgatgcgtctttggttaatgcctcaatttccagctctgtgaaagctacttctccagtgaaatctactacatctatcactgatgctaaaagttgtgagggacaaaatcctgagctacttccaaaaactcctattagtcctctgaaaacgggggtatcgaaaccaattgtgaagtcaactttatcccagacagttccatccaagggagaattaagtagagaaatttgtctgcaatctcaatctaaagacaaatctacgacaccaggaggaacaggaattaagcctttcctggaacgctttggagagcgttgtcaagaacatagcaaagaaagtccagctcgtagcacaccccacagaacccccattattactccaaatacaaaggccatccaagaaagattattcaagcaagacacatcttcatctactacccatttagcacaacagctcaagcaggaacgtcaaaaagaactagcatgtcttcgtggccgatttgacaagggcaatatatggagtgcagaaaaaggcggaaactcaaaaagcaaacaactagaaaccaaacaggaaactcactgtcagagcactcccctcaaaaaacaccaaggtgtttcaaaaactcagtcacttccagtaacagaaaaggtgaccgaaaaccagataccagccaaaaattctagtacagaacctaaaggtttcactgaatgcgaaatgacgaaatctagccctttgaaaataacattgtttttagaagaggacaaatccttaaaagtaacatcagacccaaaggttgagcagaaaattgaagtgatacgtgaaattgagatgagtgtggatgatgatgatatcaatagttcgaaagtaattaatgacctcttcagtgatgtcctagaggaaggtgaactagatatggagaagagccaagaggagatggatcaagcattagcagaaagcagcgaagaacaggaagatgcactgaatatctcctcaatgtctttacttgcaccattggcacaaacagttggtgtggtaagtccagagagtttagtgtccacacctagactggaattgaaagacaccagcagaagtgatgaaagtccaaaaccaggaaaattccaaagaactcgtgtccctcgagctgaatctggtgatagccttggttctgaagatcgtgatcttctttacagcattgatgcatatagatctcaaagattcaaagaaacagaacgtccatcaataaagcaggtgattgttcggaaggaagatgttacttcaaaactggatgaaaaaaataatgcctttccttgtcaagttaatatcaaacagaaaatgcaggaactcaataacgaaataaatatgcaacagacagtgatctatcaagctagccaggctcttaactgctgtgttgatgaagaacatggaaaagggtccctagaagaagctgaagcagaaagacttcttctaattgcaactgggaagagaacacttttgattgatgaattgaataaattgaagaacgaaggacctcagaggaagaataaggctagtccccaaagtgaatttatgccatccaaaggatcagttactttgtcagaaatccgcttgcctctaaaagcagattttgtctgcagtacggttcagaaaccagatgcagcaaattactattacttaattatactaaaagcaggagctgaaaatatggtagccacaccattagcaagtacttcaaactctcttaacggtgatgctctgacattcactactacatttactctgcaagatgtatccaatgactttgaaataaatattgaagtttacagcttggtgcaaaagaaagatccctcaggccttgataagaagaaaaaaacatccaagtccaaggctattactccaaagcgactcctcacatctataaccacaaaaagcaacattcattcttcagtcatggccagtccaggaggtcttagtgctgtgcgaaccagcaacttcgcccttgttggatcttacacattatcattgtcttcagtaggaaatactaagtttgttctggacaaggtcccctttttatcttctttggaaggtcatatttatttaaaaataaaatgtcaagtgaattccagtgttgaagaaagaggttttctaaccatatttgaagatgttagtggttttggtgcctggcatcgaagatggtgtgttctttctggaaactgtatatcttattggacttatccagatgatgagaaacgcaagaatcccataggaaggataaatctggctaattgtaccagtcgtcagatagaaccagccaacagagaattttgtgcaagacgcaacacttttgaattaattactgtccgaccacaaagagaagatgaccgagagactcttgtcagccaatgcagggacacactctgtgttaccaagaactggctgtctgcagatactaaagaagagcgggatctctggatgcaaaaactcaatcaagttcttgttgatattcgcctctggcaacctgatgcttgctacaaacctattggaaagccttaaaccgggaaatttccatgctatctagaggtttttgatgtcatcttaagaaacacacttaagagcatcagatttactgattgcattttatgctttaagtacgaaagggtttgtgccaatattcactacgtattatgcagtatttatatcttttgtatgtaaaactttaactgatttctgtcattcatcaatgagtagaagtaaatacattatagttgattttgctaaatcttaatttaaaagcctcattttcctagaaatctaattattcagttattcatgacaatatttttttaaaagtaagaaattctgagttgtcttcttggagctgtaggtcttgaagcagcaacgtctttcaggggttggagacagaaacccattctccaatctcagtagttttttcgaaaggctgtgatcatttattgatcgtgatatgacttgttactagggtactgaaaaaaatgtctaaggcctttacagaaacatttttagtaatgaggatgagaactttttcaaatagcaaatatatattggcttaaagcatgaggctgtcttcagaaaagtgatgtggacataggaggcaatgtgtgagacttgggggttcaatattttatatagaagagttaataagcacatggtttacatttactcagctactatatatgcagtgtggtgcacattttcacagaattctggcttcattaagatcattatttttgctgcgtagcttacagacttagcatattagttttttctactcctacaagtgtaaattgaaaaatctttatattaaaaaagtaaactgttatgaagctgctatgtactaataatactttgcttgccaaagtgtttgggttttgttgttgtttgtttgtttgtttgtttttggttcatgaacaacagtgtctagaaacccattttgaaagtggaaaattattaagtcacctatcacctttaaacgcctttttttaaaattataaaatattgtaaagcagggtctcaacttttaaatacactttgaacttcttctctgaattattaaagttctttatgacctcatttataaacactaaattctgtcacctcctgtcattttattttttattcattcaaatgtattttttcttgtgcatattataaaaatatattttatgagctcttactcaaataaatacctgtaaatgtctaaaggaa

SEQ ID NO: 199637 - DNA, 3375 bp, Artificial Sequence
  derived and/or modified sequence
atggaccccttcaccgagaagctgctggagagaaccagagccagaagagagaacctgcagagaaagatggccgagagacccaccgccgcccccagaagcatgacccacgccaagagagccagacagcccctgagcgaggccagcaaccagcagcccctgagcggcggcgaggagaagagctgcaccaagcccagccccagcaagaagagatgcagcgacaacaccgaggtggaggtgagcaacctggagaacaagcagcccgtggagagcaccagcgccaagagctgcagccccagccccgtgagcccccaggtgcagccccaggccgccgacaccatcagcgacagcgtggccgtgcccgccagcctgctgggcatgagaagaggcctgaacagcagactggaggccaccgccgccagcagcgtgaagaccagaatgcagaagctggccgagcagagaagaagatgggacaacgacgacatgaccgacgacatccccgagagcagcctgttcagccccatgcccagcgaggagaaggccgccagcccccccagacccctgctgagcaacgccagcgccacccccgtgggcagaagaggcagactggccaacctggccgccaccatctgcagctgggaggacgacgtgaaccacagcttcgccaagcagaacagcgtgcaggagcagcccggcaccgcctgcctgagcaagttcagcagcgccagcggcgccagcgccagaatcaacagcagcagcgtgaagcaggaggccaccttctgcagccagagagacggcgacgccagcctgaacaaggccctgagcagcagcgccgacgacgccagcctggtgaacgccagcatcagcagcagcgtgaaggccaccagccccgtgaagagcaccaccagcatcaccgacgccaagagctgcgagggccagaaccccgagctgctgcccaagacccccatcagccccctgaagaccggcgtgagcaagcccatcgtgaagagcaccctgagccagaccgtgcccagcaagggcgagctgagcagagagatctgcctgcagagccagagcaaggacaagagcaccacccccggcggcaccggcatcaagcccttcctggagagattcggcgagagatgccaggagcacagcaaggagagccccgccagaagcaccccccacagaacccccatcatcacccccaacaccaaggccatccaggagagactgttcaagcaggacaccagcagcagcaccacccacctggcccagcagctgaagcaggagagacagaaggagctggcctgcctgagaggcagattcgacaagggcaacatctggagcgccgagaagggcggcaacagcaagagcaagcagctggagaccaagcaggagacccactgccagagcacccccctgaagaagcaccagggcgtgagcaagacccagagcctgcccgtgaccgagaaggtgaccgagaaccagatccccgccaagaacagcagcaccgagcccaagggcttcaccgagtgcgagatgaccaagagcagccccctgaagatcaccctgttcctggaggaggacaagagcctgaaggtgaccagcgaccccaaggtggagcagaagatcgaggtgatcagagagatcgagatgagcgtggacgacgacgacatcaacagcagcaaggtgatcaacgacctgttcagcgacgtgctggaggagggcgagctggacatggagaagagccaggaggagatggaccaggccctggccgagagcagcgaggagcaggaggacgccctgaacatcagcagcatgagcctgctggcccccctggcccagaccgtgggcgtggtgagccccgagagcctggtgagcacccccagactggagctgaaggacaccagcagaagcgacgagagccccaagcccggcaagttccagagaaccagagtgcccagagccgagagcggcgacagcctgggcagcgaggacagagacctgctgtacagcatcgacgcctacagaagccagagattcaaggagaccgagagacccagcatcaagcaggtgatcgtgagaaaggaggacgtgaccagcaagctggacgagaagaacaacgccttcccctgccaggtgaacatcaagcagaagatgcaggagctgaacaacgagatcaacatgcagcagaccgtgatctaccaggccagccaggccctgaactgctgcgtggacgaggagcacggcaagggcagcctggaggaggccgaggccgagagactgctgctgatcgccaccggcaagagaaccctgctgatcgacgagctgaacaagctgaagaacgagggcccccagagaaagaacaaggccagcccccagagcgagttcatgcccagcaagggcagcgtgaccctgagcgagatcagactgcccctgaaggccgacttcgtgtgcagcaccgtgcagaagcccgacgccgccaactactactacctgatcatcctgaaggccggcgccgagaacatggtggccacccccctggccagcaccagcaacagcctgaacggcgacgccctgaccttcaccaccaccttcaccctgcaggacgtgagcaacgacttcgagatcaacatcgaggtgtacagcctggtgcagaagaaggaccccagcggcctggacaagaagaagaagaccagcaagagcaaggccatcacccccaagagactgctgaccagcatcaccaccaagagcaacatccacagcagcgtgatggccagccccggcggcctgagcgccgtgagaaccagcaacttcgccctggtgggcagctacaccctgagcctgagcagcgtgggcaacaccaagttcgtgctggacaaggtgcccttcctgagcagcctggagggccacatctacctgaagatcaagtgccaggtgaacagcagcgtggaggagagaggcttcctgaccatcttcgaggacgtgagcggcttcggcgcctggcacagaagatggtgcgtgctgagcggcaactgcatcagctactggacctaccccgacgacgagaagagaaagaaccccatcggcagaatcaacctggccaactgcaccagcagacagatcgagcccgccaacagagagttctgcgccagaagaaacaccttcgagctgatcaccgtgagaccccagagagaggacgacagagagaccctggtgagccagtgcagagacaccctgtgcgtgaccaagaactggctgagcgccgacaccaaggaggagagagacctgtggatgcagaagctgaaccaggtgctggtggacatcagactgtggcagcccgacgcctgctacaagcccatcggcaagccctag

SEQ ID NO: 199638 - protein, 434 aa, Artificial Sequence
  derived and/or modified sequence
MDSVEKGAATSVSNPRGRPSRGRPPKLQRNSRGGQGRGVEKPPHLAALILARGGSKGIPLKNIKHLAGVPLIGWVLRAALDSGAFQSVWVSTDHDEIENVAKQFGAQVHRRSSEVSKDSSTSLDAIIEFLNYHNEVDIVGNIQATSPCLHPTDLQKVAEMIREEGYDSVFSVVRRHQFRWSEIQKGVREVTEPLNLNPAKRPRRQDWDGELYENGSFYFAKRHLIEMGYLQGGKMAYYEMRAEHSVDIDVDIDWPIAEQRVLRYGYFGKEKLKEIKLLVCNIDGCLTNGHIYVSGDQKEIISYDVKDAIGISLLKKSGIEVRLISERACSKQTLSSLKLDCKMEVSVSDKLAVVDEWRKEMGLCWKEVAYLGNEVSDEECLKRVGLSGAPADACSTAQKAVGYICKCNGGRGAIREFAEHICLLMEKVNNSCQK

SEQ ID NO: 199639 - DNA, 1305 bp, Artificial Sequence
  derived and/or modified sequence
atggactctgttgagaagggtgccgcgaccagcgtttcaaatcctcgcgggagaccttcgagaggtaggcctccgaagcttcagaggaattcaagaggcggccagggccggggggtggagaagcctccacatttggcggctttgatcttggctcgaggaggtagcaagggcatacccttgaagaacatcaagcatctggctggcgtcccactgatagggtgggtactccgggccgcgctagacagcggggcatttcagtccgtgtgggtgagtactgatcatgacgagattgaaaacgtggctaagcagttcggagcgcaagtgcatcgtcgctcatctgaagtgtccaaagactcctctacatccctggacgccattatcgagttccttaattatcacaatgaagtcgatatcgtaggcaatattcaggccacatcaccctgtctccaccctacggatttgcaaaaggtggcagaaatgatccgggaggagggctacgactccgtctttagtgtggtgcgcaggcaccagttcaggtggtcagagatccagaagggcgtgagggaagtaacagaaccactgaacctgaaccctgccaagcgaccccgtcgccaggactgggatggcgaactttatgagaacggaagcttttactttgccaagcgccacttgattgaaatgggatatttgcagggtggtaagatggcttattatgagatgagagctgaacactctgtcgacatcgacgtggacatcgactggcccattgccgagcaacgcgtgctgagatatggatacttcggaaaagaaaagctgaaagagatcaaactgctggtgtgtaacatcgatggctgcttgacaaacggccatatttatgtgtcgggagatcaaaaagagattatatcatatgacgtgaaagacgccatcggcatttcattactgaaaaaaagcggcatcgaggtaaggttgatctccgaaagggcctgcagcaaacagacactgagttcccttaaattggactgtaaaatggaagtgtccgtgagtgacaaactggctgtcgtcgacgagtggcggaaggaaatgggactgtgctggaaagaggtggcgtacctggggaacgaagtctcagatgaggagtgtctgaaaagagtgggcctgtcaggtgcacccgcggacgcctgcagcacagcgcagaaggccgttggatacatctgtaagtgcaacggagggcgaggagcaatccgcgagtttgccgagcatatctgcctgctcatggaaaaagtgaataattcttgccagaagtag

SEQ ID NO: 199640 - DNA, 1305 bp, Artificial Sequence
  derived and/or modified sequence
atggattctgtggagaagggggccgccacctctgtgagcaacccccggggccggcccagccggggccggccccccaagctgcagaggaacagcagaggaggccagggccggggcgtggagaagccaccccacctggccgccctgatcctggcccggggcggcagcaagggcatccccctgaagaacatcaagcacctggccggcgtgcccctcatcggctgggtgctgcgggccgccctggacagcggggccttccagagcgtgtgggtgtccacagaccatgatgaaattgaaaatgtggccaagcagtttggagcccaggtgcaccggcgcagcagcgaggtgtccaaggacagcagcaccagcctggatgccatcatcgagttcctgaactaccacaatgaggtggacatcgtgggcaacatccaggccaccagcccctgcctgcaccccacagacctgcagaaggtggccgagatgatccgggaggagggctatgacagcgtcttctctgtggtgcggcggcaccagttccgctggagcgagatccagaagggcgtgcgggaggtgacagagcccctgaacctgaacccagccaagaggccccggcggcaggactgggatggagagctgtatgaaaatggcagcttctactttgccaagaggcacctgattgagatgggctacctgcagggcggcaagatggcctactatgagatgagagctgagcacagcgtggacattgatgtggacatcgactggcccatcgccgagcagagggtgctgcgctatggctactttgggaaggagaagctgaaggagatcaagctgctggtgtgcaacattgatggctgcctgaccaacggccacatctacgtgtctggggaccagaaggagatcatctcctatgatgtgaaggatgccatcggcatcagcctgctgaagaagtctggaattgaggtgcggctcatcagcgagcgggcctgcagcaagcagaccctgagcagcctgaagctggactgcaagatggaggtgtctgtgtctgacaagctggccgtggtggatgagtggaggaaggagatgggcctgtgctggaaggaggtggcctacctgggcaatgaggtgtctgatgaagaatgtctgaagagggtgggcctgagcggggccccagcagatgcctgcagcacagcccagaaggctgtgggctacatctgcaagtgcaatggaggccgcggggccatccgggagtttgctgagcacatctgcctgctgatggagaaggtgaacaacagctgccagaagtag

SEQ ID NO: 199641 - DNA, 1305 bp, Artificial Sequence
  derived and/or modified sequence
atggacagcgtggagaagggcgccgccaccagcgtgagcaacccccgcggtcgtccatcccggggaagaccaccaaaacttcaaagaaacagtaggggaggccagggccggggagtagagaaaccaccacacctcgctgccctgatccttgcacggggcggatccaagggcataccccttaagaatataaaacaccttgcaggggtgcccctcatcggatgggtgctgagggctgccttggactccggggctttccagtctgtgtgggtgagcactgaccacgatgagatcgaaaacgtcgctaaacagttcggggcccaggttcatcgcagatcttctgaggtgagtaaggatagctctacctcgctggatgctatcatcgagttccttaactaccataatgaagttgatatcgttggcaacatccaggccacaagcccctgcctgcatccaactgacctccaaaaggtagctgaaatgatcagggaagaagggtatgactccgttttctccgtcgttcgtcgtcatcagtttcggtggagcgagatccagaagggagtgagagaagtaaccgaacccctgaaccttaatcctgccaaacgcccccggagacaggactgggatggcgagctgtacgagaacggaagcttttactttgctaagcgccacttgattgaaatgggatacctgcagggtggaaaaatggcttactatgagatgagggcagagcacagtgtggacatcgacgtagatatagattggccaattgccgagcagcgggtgcttcgatatggttattttgggaaggaaaagttgaaggaaattaagttactggtgtgtaatatcgatgggtgtttgactaacggccacatctatgtgagtggcgaccagaaggagatcatttcttatgacgttaaagacgcgataggcatatctttacttaaaaagagtgggattgaggtgcgcctcatctccgagagagcctgctctaagcagactctttccagcctgaagctcgattgtaaaatggaggtgagtgtgtccgataaactcgcggtggttgatgagtggagaaaggaaatgggcctgtgctggaaagaggtagcgtatctaggaaacgaggtatctgacgaagaatgcctaaaaagggttggactttccggggcacccgcagatgcctgctccacagcacagaaagccgtgggctatatctgcaagtgtaacggcgggagaggcgccatccgcgagttcgcagagcacatctgcctgctcatggagaaagttaacaattcctgccaaaaatag

SEQ ID NO: 199642 - DNA, 1305 bp, Artificial Sequence
  derived and/or modified sequence
atggattctgtcgaaaagggggctgcgacctcagtgtcaaaccccagagggagacccagccgagggagaccgcctaagctccaaaggaactcaagagggggacaaggacggggtgtggagaaacctccacatttggctgcattgattttggctcgtggcggttccaaggggatacctctaaagaacataaagcacctggccggagtcccactgattggttgggtgctgagggctgcgctggactctggtgcttttcaatccgtgtgggttagcacagatcacgatgagattgaaaacgttgcaaagcagttcggcgcacaggtccacaggagaagttccgaagtgagtaaggattcatctacgagcttggatgccatcattgagttcctgaattatcacaatgaagtcgacattgttggcaatatacaagccacatccccttgtctgcatcctaccgaccttcagaaagtggccgagatgatacgcgaagaagggtacgacagtgttttcagtgttgttcggagacatcagttccgctggagcgaaatacagaaaggcgtgagagaggtgacagagcctctgaatttgaatcctgcaaagagaccccgacgacaggattgggacggtgaactgtacgagaacggctcgttttactttgcaaagcgccatcttattgaaatgggctacttacagggcggaaagatggcctattacgaaatgagggccgagcacagcgtggatatcgatgttgatatcgactggccgatagctgagcaaagagtgctgcgatacgggtatttcggaaaggaaaagctgaaagaaattaagcttctagtttgcaacatcgacggttgtctgaccaacgggcatatatacgtctctggcgaccagaaggagatcatcagctatgatgtcaaagacgcgatcggcatctcattgttaaaaaagtccggtatagaggtccggctcatttccgagcgggcttgttccaaacagactttgtcatctctcaagcttgattgtaaaatggaggtttcagtgtcagacaagcttgctgtagttgatgaatggagaaaagagatgggactgtgttggaaggaagtcgcttatctgggtaatgaagtctctgacgaggagtgtctgaagagggtaggactctccggtgccccagccgacgcctgctcgactgcccaaaaggctgtgggctatatttgcaaatgtaacggaggcaggggcgcaatccgcgaatttgctgagcatatctgtctcctgatggaaaaggtgaacaactcctgccagaagtag

SEQ ID NO: 199643 - DNA, 1787 bp, Artificial Sequence
  derived and/or modified sequence
gggggagggggcggggcgagggacggccgcgcgcgccagctgccaggcggggatcgggcggcgccgagctgaggtggtgagggactagctcccggatgtggagaagctggggagaaggcgtgggaggaagatggactcggtggagaagggggccgccacctccgtctccaacccgcgggggcgaccgtcccggggccggccgccgaagctgcagcgcaactctcgcggcggccagggccgaggtgtggagaagcccccgcacctggcagccctaattctggcccggggaggcagcaaaggcatccccctgaagaacattaagcacctggcgggggtcccgctcattggctgggtcctgcgtgcggccctggattcaggggccttccagagtgtatgggtttcgacagaccatgatgaaattgagaatgtggccaaacaatttggtgcacaagttcatcgaagaagttctgaagtttcaaaagacagctctacctcactagatgccatcatagaatttcttaattatcataatgaggttgacattgtaggaaatattcaagctacttctccatgtttacatcctactgatcttcaaaaagttgcagaaatgattcgagaagaaggatatgattctgttttctctgttgtgagacgccatcagtttcgatggagtgaaattcagaaaggagttcgtgaagtgaccgaacctctgaatttaaatccagctaaacggcctcgtcgacaagactgggatggagaattatatgaaaatggctcattttattttgctaaaagacatttgatagagatgggttacttgcagggtggaaaaatggcatactacgaaatgcgagctgaacatagtgtggatatagatgtggatattgattggcctattgcagagcaaagagtattaagatatggctattttggcaaagagaagcttaaggaaataaaacttttggtttgcaatattgatggatgtctcaccaatggccacatttatgtatcaggagaccaaaaagaaataatatcttatgatgtaaaagatgctattgggataagtttattaaagaaaagtggtattgaggtgaggctaatctcagaaagggcctgttcaaagcagacgctgtcttctttaaaactggattgcaaaatggaagtcagtgtatcagacaagctagcagttgtagatgaatggagaaaagaaatgggcctgtgctggaaagaagtggcatatcttggaaatgaagtgtctgatgaagagtgcttgaagagagtgggcctaagtggcgctcctgctgatgcctgttctactgcccagaaggctgttggatacatttgcaaatgtaatggtggccgtggtgccatccgagaatttgcagagcacatttgcctactaatggaaaaggttaataattcatgccaaaaatagaaattagcgtaatattgagaaaaaaatgatacagccttcttcagccagtttgcttttatttttgattaagtaaattccatgttgtaatgttacagagagtgtgatttggtttgtgatatatatatattgtgctctacttttctctttacgcaagataattatttagagactgattacagtctttctcagatttttagtaaatgcaagtaagaacatcatcaaagttcactttgtattgtaccctgtaaaactgtgtgtttgtgtgctttcaaagatgttgggattttatttatctggggacagtgtgtatggtaagacatgcccttctattaataaaactacatttctcaaa

SEQ ID NO: 199644 - DNA, 1305 bp, Artificial Sequence
  derived and/or modified sequence
atggacagcgtggagaagggcgccgccaccagcgtgagcaaccccagaggcagacccagcagaggcagaccccccaagctgcagagaaacagcagaggcggccagggcagaggcgtggagaagcccccccacctggccgccctgatcctggccagaggcggcagcaagggcatccccctgaagaacatcaagcacctggccggcgtgcccctgatcggctgggtgctgagagccgccctggacagcggcgccttccagagcgtgtgggtgagcaccgaccacgacgagatcgagaacgtggccaagcagttcggcgcccaggtgcacagaagaagcagcgaggtgagcaaggacagcagcaccagcctggacgccatcatcgagttcctgaactaccacaacgaggtggacatcgtgggcaacatccaggccaccagcccctgcctgcaccccaccgacctgcagaaggtggccgagatgatcagagaggagggctacgacagcgtgttcagcgtggtgagaagacaccagttcagatggagcgagatccagaagggcgtgagagaggtgaccgagcccctgaacctgaaccccgccaagagacccagaagacaggactgggacggcgagctgtacgagaacggcagcttctacttcgccaagagacacctgatcgagatgggctacctgcagggcggcaagatggcctactacgagatgagagccgagcacagcgtggacatcgacgtggacatcgactggcccatcgccgagcagagagtgctgagatacggctacttcggcaaggagaagctgaaggagatcaagctgctggtgtgcaacatcgacggctgcctgaccaacggccacatctacgtgagcggcgaccagaaggagatcatcagctacgacgtgaaggacgccatcggcatcagcctgctgaagaagagcggcatcgaggtgagactgatcagcgagagagcctgcagcaagcagaccctgagcagcctgaagctggactgcaagatggaggtgagcgtgagcgacaagctggccgtggtggacgagtggagaaaggagatgggcctgtgctggaaggaggtggcctacctgggcaacgaggtgagcgacgaggagtgcctgaagagagtgggcctgagcggcgcccccgccgacgcctgcagcaccgcccagaaggccgtgggctacatctgcaagtgcaacggcggcagaggcgccatcagagagttcgccgagcacatctgcctgctgatggagaaggtgaacaacagctgccagaagtag

SEQ ID NO: 199645 - protein, 253 aa, Artificial Sequence
  derived and/or modified sequence
MSWIPFKIGQPKKQIVPKTVERDFEREYGKLQQLEEQTRRLQKDMKKSTDADLAMSKSAVKISLDLLSNPLCEQDQDLLNMVTALDTAMKRMDAFNQEKVNQIQKTVIEPLKKFGSVFPSLNMAVKRREQALQDYRRLQAKVEKYEEKEKTGPVLAKLHQAREELRPVREDFEAKNRQLLEEMPRFYGSRLDYFQPSFESLIRAQVVYYSEMHKIFGDLSHQLDQPGHSDEQRERENEAKLSELRALSIVADD

SEQ ID NO: 199646 - protein, 199 aa, Artificial Sequence
  derived and/or modified sequence
MSKSAVKISLDLLSNPLCEQDQDLLNMVTALDTAMKRMDAFNQEKVNQIQKTVIEPLKKFGSVFPSLNMAVKRREQALQDYRRLQAKVEKYEEKEKTGPVLAKLHQAREELRPVREDFEAKNRQLLEEMPRFYGSRLDYFQPSFESLIRAQVVYYSEMHKIFGDLSHQLDQPGHSDEQRERENEAKLSELRALSIVADD

SEQ ID NO: 199647 - DNA, 762 bp, Artificial Sequence
  derived and/or modified sequence
atgtcatggattcctttcaagatcgggcagccaaaaaagcagatcgtgcctaagacagtggagagggatttcgagcgggaatacggcaaattgcagcagttggaagaacagactcgacgactgcagaaagatatgaagaagagtaccgatgccgacttggccatgtctaagtccgccgtgaagattagtcttgacctcctctcaaacccactctgtgagcaagatcaagacctactgaatatggtcactgccctcgacacggcaatgaagcgaatggatgcattcaaccaggaaaaggtcaaccaaatccaaaagacagtgattgagccactcaagaagttcgggtcagtgttcccatccttgaatatggccgtgaaacggagagagcaggcactccaagactacagaagacttcaggcaaaggtcgagaagtacgaggaaaaagaaaaaaccggccctgtgctggcaaagctgcaccaagcaagagaggaactgaggccggtcagggaggacttcgaagctaagaaccgacaactactggaagagatgcctcggttttatggaagcaggctcgattacttccaaccttcatttgagtcactgatccgcgcccaggtcgtatactattcagaaatgcacaagatattcggggacttgtcacaccagctggaccagccaggacattcagacgagcagcgagagcgtgagaatgaagccaaactctcagagctgcgggccctatctattgtagctgatgactag

SEQ ID NO: 199648 - DNA, 762 bp, Artificial Sequence
  derived and/or modified sequence
atgtcctggatccccttcaagattggccagcccaagaagcagatcgtgcccaagacagtggagcgggactttgagcgggagtatggcaagctgcagcagctggaggagcagacccggcggctgcagaaggacatgaagaagagcacagatgctgacctggccatgagcaagtctgctgtgaagatcagcctggacctgctgagcaaccccctgtgtgagcaggaccaggacctgctgaacatggtgacagccctggacacagccatgaagaggatggatgccttcaaccaggagaaggtgaaccagatccagaagacagtcatcgagcccctgaagaagtttggcagcgtcttccccagcctgaacatggctgtgaagagaagagagcaggccctgcaggactaccgccgcctgcaggccaaggtggagaagtatgaggagaaggagaagacaggccctgtgctggccaagctgcaccaggcccgggaggagctgcggcctgtgcgggaggactttgaggccaagaaccggcagctgctggaggagatgccccgcttctacggcagccggctggactacttccagcccagctttgagagcctcatccgggcccaggtggtgtactacagcgagatgcacaagatctttggagacctgagccaccagctggaccagcccggccacagtgatgagcagcgggagcgggagaatgaggccaagctgtctgagctgcgggccctgagcatcgtggctgatgactag

SEQ ID NO: 199649 - DNA, 762 bp, Artificial Sequence
  derived and/or modified sequence
atgagctggatccccttcaagatcggccagcccaagaagcagatcgtgccaaagaccgttgaacgcgatttcgagagggaatatggcaaacttcagcagttggaggagcagactaggcggctgcaaaaggacatgaaaaagagcaccgacgctgacctggcgatgagtaaaagcgccgttaaaatctctttggatctcttgtcaaaccctctgtgcgagcaggaccaggatcttctgaacatggtcacagctttggacacagccatgaaacgcatggacgcatttaatcaagagaaggtcaaccagatccagaagacggtgattgagccactgaagaagtttgggagtgtctttccttctcttaacatggccgttaaaagaagggagcaggccctgcaagactataggagactgcaggccaaagttgagaagtacgaagagaaggagaaaacggggcccgtcctggctaaactccatcaagcgcgggaagaattaagacccgtgagagaggatttcgaagctaagaatcgccagctcctggaggaaatgccccggttttatggatctcggctggattactttcagccttcctttgagtccctgatcagggcccaggtcgtctattattccgaaatgcataaaatattcggcgacttatcccatcagctcgatcaaccgggccattctgatgagcagcgtgaaagggaaaatgaagccaagctgagtgagctcagggccctttctatcgtcgctgacgattag

SEQ ID NO: 199650 - DNA, 762 bp, Artificial Sequence
  derived and/or modified sequence
atgagctggatcccttttaagatcggtcagcctaagaaacagatcgtgccgaagacggttgagagagacttcgaaagagagtacggcaaactccagcaactcgaggagcaaactcggcgtctccagaaggacatgaagaaatcaacagatgccgatcttgccatgtccaaaagcgctgtgaagatatctctcgacctcctgagtaaccctctctgcgaacaagaccaggacttgctgaacatggtcacagccctcgataccgccatgaagagaatggacgcatttaaccaggaaaaggtgaaccaaatccaaaaaaccgtcatcgagccattaaaaaagttcggctcagtgtttccttcgttgaatatggcggtaaagcgcagggagcaagccctgcaagactatagaaggctgcaagccaaggtggaaaagtatgaggagaaggaaaaaacaggtcctgtcctggcaaagcttcaccaggccagggaggaattgagacctgttcgggaggacttcgaagcaaaaaatcgtcagctgctggaggaaatgccacgattttacggatctcggttggattattttcagccctcttttgagagtctaataagagcacaagtcgtgtattattctgagatgcataagatcttcggagatctgagccatcagctcgaccagccgggtcactcggacgagcaaagagagagggaaaacgaagctaagctgtccgagctccgcgctctctcaatcgtggccgacgactag

SEQ ID NO: 199651 - DNA, 1835 bp, Artificial Sequence
  derived and/or modified sequence
aatccggaagtgaccctagagaaacgagttgtggctgaggaccccggcggcagacgcaggttcgggaccatgagctggattccttttaagattgggcagcccaagaaacagattgtgcccaaaacagtggagagagactttgaaagggagtatggaaaacttcagcagctggaagagcagacccggaggctgcagaaagacatgaagaagagcaccgacgcagacctggccatgtcaaaatctgccgtgaagatatccttggacttactctccaatcccctctgtgagcaagaccaggaccttctgaacatggtgacggccctggacacggccatgaagcggatggatgccttcaatcaggaaaaggtgaaccagatccagaagactgtgatcgagcccttaaaaaagttcggcagtgtcttcccgagcctcaacatggctgtgaagaggcgggaacaggccttgcaggactacaggaggctgcaggccaaggtggagaagtatgaggaaaaggagaagacggggccagtgctggccaagctccaccaggcacgagaggagctgcggcctgtgcgggaggactttgaagccaagaacaggcagctgctggaggagatgccgcgcttctacggcagccgcctcgactacttccagcccagctttgagtccctcatccgagctcaggttgtgtactactcggaaatgcacaagatctttggagacctgtcccatcagcttgaccagccaggccactccgatgagcagcgggagcgggagaacgaggccaaactcagtgagctccgggccctctccattgtggccgatgactgaatccccgtcactcttggaggactcctgtgacgtggtcagcctcattcatccttgcccttctcagggctagctgctcctctcacaggctggggacagaggtggccctggttcacttgccggccctttgcaatgaatgactcttcctgagcctggcaccaggagccctaggcaggccgccgtctccccactcacagccccagcaggtaagcagtgtagacaaacccttggggcttttttatttggagaaccgtccagcatgcatcctggcccacggcctgagcaagctgcagcccttctgaggccatgggcttcgttggctaagttgggggtcttagccttgcatgcgttgtgggcatcaaatctacctccaaaagacccatcctggggagccctctggcccctcgttgccttttcacttcaaaacctcttttttctgggagaggccctgaaccctgtgcgggagagctggtcctccagccctggcaggccctcagccagcttcccagcaagacaaagggcacccttgtggctttgggacctaagtggttggggttcccgaggtcactgaggactggtacctcgggaacgcaagctgtcagtggaactgtcccacaagaattcacaggtctcaaagcaggaacagtgggtttgtgtctcacctgagtatctggaattttattttttcaagtaaaattttcaatgaaacgtccacatagtattgtgctgtaacttaggcgagcagaggaaaccccttcctgggcctgctgccctccacggagcagcagcaccctccagcaggcagcccagcatgccaggggtgtgtgcgcacctccccggccctggcccaccttctggagcgaactgcaccgtggtccagcagaggcgctgggtgggagggcacgcgggcaagcctaggagagtaggaagagctgtggaggacacactctcagtttgtttttgactttggtttatttaaaaaacaagccaaaaaaaaaaaaaaaaaa

SEQ ID NO: 199652 - DNA, 762 bp, Artificial Sequence
  derived and/or modified sequence
atgagctggatccccttcaagatcggccagcccaagaagcagatcgtgcccaagaccgtggagagagacttcgagagagagtacggcaagctgcagcagctggaggagcagaccagaagactgcagaaggacatgaagaagagcaccgacgccgacctggccatgagcaagagcgccgtgaagatcagcctggacctgctgagcaaccccctgtgcgagcaggaccaggacctgctgaacatggtgaccgccctggacaccgccatgaagagaatggacgccttcaaccaggagaaggtgaaccagatccagaagaccgtgatcgagcccctgaagaagttcggcagcgtgttccccagcctgaacatggccgtgaagagaagagagcaggccctgcaggactacagaagactgcaggccaaggtggagaagtacgaggagaaggagaagaccggccccgtgctggccaagctgcaccaggccagagaggagctgagacccgtgagagaggacttcgaggccaagaacagacagctgctggaggagatgcccagattctacggcagcagactggactacttccagcccagcttcgagagcctgatcagagcccaggtggtgtactacagcgagatgcacaagatcttcggcgacctgagccaccagctggaccagcccggccacagcgacgagcagagagagagagagaacgaggccaagctgagcgagctgagagccctgagcatcgtggccgacgactag

SEQ ID NO: 199653 - protein, 1069 aa, Artificial Sequence
  derived and/or modified sequence
MDFLRLYLPGLHQALRGALDSLGTFVSYLLGDAVPTVEREAQAAEELGVVAVGKTGKIVEEEAQEDLEGLRGSQNEGAGRLRGPGDDRRHEVGSSAVEQTWGWGDGSSHGSQAERQDSGAGETAKAARCQEPSAHLEARKKSKAGSGACQDRSGQAQERQESHEQEVNREERLRSWEQEEEEEEVRAREPGMARGAESEWTWHGETEGKAGAVGPKAAGDNREMEQGVREADAGETEEPGAEGAGKGEEVVVVEKACESTRAWGTWGPGAEPEDWGILGREEARTTPGREEARAILDGEEARTISGGEEAETASGGEEAETASGGEEAGTASGGEEAGIASGGEAGTASGGEEAGTASGGDEAWTTSGKEEADLLGVRQTEYGAVPGERLLEATGKVWVLEEEGDEEREAEVSPFPKQPQVLGTERTEEAAESQTAGREAVGGQEAGESFEGQVDLRGKEAEMRQDLGIRADRARMEELVQAEEAQEERGSSRDPVAELPSDGEAEGTADLEATPEARPEEELTGEESEAAQTSCGLLGVEWGGLTHSVTKGQGPELMGGAQTPTKQPEEREAGEVELMGVLALSKEEQERSLEAGPRHAGSVKPEASEAFPGAWENRTRKDMERGNTQEDAADGEQREEEETAGGQTLAAEAEGDRESELSEVPEAGGEGLTTQDAGCGTEEGEASVSENQELDGSTGADAGPCPSLGEAYARETEDEEAEADRTSRRGWRLQAVAVGLPDREDAQTGSVAAGIMGGDVVPHISAAGAGEALEGVLGQGWDSKEKEEAAAGEHAGGQEFGLEGSAEEEVTGRGSQVEAFESREGGPWGGRVEAEESAGAEDSCGLDPAGSQTARAEGMGAMVEAGGLLEKWTLLEEEAVGWQEREQREDSEGRCGDYHPEGEAPRLLDAEGLMVTGGRRAEAKETEPESLEHVRGQEEQPTHQAPAEAAPESVGEAETAEAMGSARGGAANSWSEAPLPGSLLDVSVPRSRVHLSRSSSQRRSRPSFRRTPAWEQQEEPPAPNPPEEELSAPEQRPLQLEEPLEPRWEDRLRPGVRDQPGQHSKIPIF

SEQ ID NO: 199654 - protein, 1088 aa, Artificial Sequence
  derived and/or modified sequence
MDFLRLYLPGLHQALRGALDSLGTFVSYLLGDAVPTVEREAQAAEELGVVAVGKTGKIVEEEAQEDLEGLRGSQNEGAGRLRGPGDDRRHEVGSSAVEQTWGWGDGSSHGSQAERQDSGAGETAKAARCQEPSAHLEARKKSKAGSGACQDRSGQAQERQESHEQEVNREERLRSWEQEEEEEEVRAREPGMARGAESEWTWHGETEGKAGAVGPKAAGDNREMEQGVREADAGETEEPGAEGAGKGEEVVVVEKACESTRAWGTWGPGAEPEDWGILGREEARTTPGREEARAILDGEEARTISGGEEAETASGGEEAETASGGEEAGTASGGEEAGIASGGEAGTASGGEEAGTASGGDEAWTTSGKEEADLLGVRQTEYGAVPGERLLEATGKVWVLEEEGDEEREAEVSPFPKQPQVLGTERTEEAAESQTAGREAVGGQEAGESFEGQVDLRGKEAEMRQDLGIRADRARMEELVQAEEAQEERGSSRDPVAELPSDGEAEGTADLEATPEARPEEELTGEESEAAQTSCGLLGVEWGGLTHSVTKGQGPELMGGAQTPTKQPEEREAGEVELMGVLALSKEEQERSLEAGPRHAGSVKPEASEAFPGAWENRTRKDMERGNTQEDAADGEQREEEETAGGQTLAAEAEGDRESELSEVPEAGGEGLTTQDAGCGTEEGEASVSENQELDGSTGADAGPCPSLGEAYARETEDEEAEADRTSRRGWRLQAVAVGLPDREDAQTGSVAAGIMGGDVVPHISAAGAGEALEGVLGQGWDSKEKEEAAAGEHAGGQEFGLEGSAEEEVTGRGSQVEAFESREGGPWGGRVEAEESAGAEDSCGLDPAGSQTARAEGMGAMVEAGGLLEKWTLLEEEAVGWQEREQREDSEGRCGDYHPEGEAPRLLDAEGLMVTGGRRAEAKETEPESLEHVRGQEEQPTHQAPAEAAPESVGEAETAEAMGSARGGAANSWSEAPLPGSLLDVSVPRSRVHLSRSSSQRRSRPSFRRTPAWEQQEEPPAPNPPEEELSAPEQRPLQLEEPLEPSPLRHDGTPVPARRRPLGHGFGLAHPGMMQELQARLGRPKPQ

SEQ ID NO: 199655 - protein, 1097 aa, Artificial Sequence
  derived and/or modified sequence
MDFLRLYLPGLHQALRGALDSLGTFVSYLLGDAVPTVEREAQAAEELGVVAVGKTGKIVEEEAQEDLEGLRGSQNEGAGRLRGPGDDRRHEVGSSAVEQTWGWGDGSSHGSQAERQDSGAGETAKAARCQEPSAHLEARKKSKAGSGACQDRSGQAQERQESHEQEVNREERLRSWEQEEEEEEVRAREPGMARGAESEWTWHGETEGKAGAVGPKAAGDNREMEQGVREADAGETEEPGAEGAGKGEEVVVVEKACESTRAWGTWGPGAEPEDWGILGREEARTTPGREEARAILDGEEARTISGGEEAETASGGEEAETASGGEEAGTASGGEEAGIASGGEAGTASGGEEAGTASGGEEAGTASGGDEAWTTSGKEEADLLGVRQTEYGAVPGERLLEATGKVWVLEEEGDEEREAEVSPFPKQPQVLGTERTEEAAESQTAGREAVGGQEAGESFEGQVDLRGKEAEMRQDLGIRADRARMEELVQAEEAQEERGSSRDPVAELPSDGEAEGTADLEATPEARPEEELTGEESEAAQTSCGLLGVEWGGLTHSVTKGQGPELMGGAQTPTKQPEEREAGEVELMGVLALSKEEQERSLEAGPRHAGSVKPEASEAFPGAWENRTRKDMERGNTQEDAADGEQREEEETAGGQTLAAEAEGDRESELSEVPEAGGEGLTTQDAGCGTEEGEASVSENQELDGSTGADAGPCPSLGEAYARETEDEEAEADRTSRRGWRLQAVAVGLPDREDAQTGSVAAGIMGGDVVPHISAAGAGEALEGVLGQGWDSKEKEEAAAGEHAGGQEFGLEGSAEEEVTGRGSQVEAFESREGGPWGGRVEAEESAGAEDSCGLDPAGSQTARAEGMGAMVEAGGLLEKWTLLEEEAVGWQEREQREDSEGRCGDYHPEGEAPRLLDAEGLMVTGGRRAEAKETEPESLEHVRGQEEQPTHQAPAEAAPESVGEAETAEAMGSARGGAANSWSEAPLPGSLLDVSVPRSRVHLSRSSSQRRSRPSFRRTPAWEQQEEPPAPNPPEEELSAPEQRPLQLEEPLEPSPLRHDGTPVPARRRPLGHGFGLAHPGMMQELQARLGRPKPQ

SEQ ID NO: 199656 - DNA, 3210 bp, Artificial Sequence
  derived and/or modified sequence
atggacttcctgagactgtacctgcccggcctgcaccaggccctgagaggcgccctggacagcctgggcaccttcgtgagctacctgctgggcgacgccgtgcccaccgtggagagagaggcccaggccgccgaggagctgggcgtggtggccgtgggcaagaccggcaagatcgtggaggaggaggcccaggaggacctggagggcctgagaggcagccagaacgagggcgccggcagactgagaggccccggcgacgacagaagacacgaggtgggcagcagcgccgtggagcagacctggggctggggcgacggcagcagccacggcagccaggccgagagacaggacagcggcgccggcgagaccgccaaggccgccagatgccaggagcccagcgcccacctggaggccagaaagaagagcaaggccggcagcggcgcctgccaggacagaagcggccaggcccaggagagacaggagagccacgagcaggaggtgaacagagaggagagactgagaagctgggagcaggaggaggaggaggaggaggtgagagccagagagcccggcatggccagaggcgccgagagcgagtggacctggcacggcgagaccgagggcaaggccggcgccgtgggccccaaggccgccggcgacaacagagagatggagcagggcgtgagagaggccgacgccggcgagaccgaggagcccggcgccgagggcgccggcaagggcgaggaggtggtggtggtggagaaggcctgcgagagcaccagagcctggggcacctggggccccggcgccgagcccgaggactggggcatcctgggcagagaggaggccagaaccacccccggcagagaggaggccagagccatcctggacggcgaggaggccagaaccatcagcggcggcgaggaggccgagaccgccagcggcggcgaggaggccgagaccgccagcggcggcgaggaggccggcaccgccagcggcggcgaggaggccggcatcgccagcggcggcgaggccggcaccgccagcggcggcgaggaggccggcaccgccagcggcggcgacgaggcctggaccaccagcggcaaggaggaggccgacctgctgggcgtgagacagaccgagtacggcgccgtgcccggcgagagactgctggaggccaccggcaaggtgtgggtgctggaggaggagggcgacgaggagagagaggccgaggtgagccccttccccaagcagccccaggtgctgggcaccgagagaaccgaggaggccgccgagagccagaccgccggcagagaggccgtgggcggccaggaggccggcgagagcttcgagggccaggtggacctgagaggcaaggaggccgagatgagacaggacctgggcatcagagccgacagagccagaatggaggagctggtgcaggccgaggaggcccaggaggagagaggcagcagcagagaccccgtggccgagctgcccagcgacggcgaggccgagggcaccgccgacctggaggccacccccgaggccagacccgaggaggagctgaccggcgaggagagcgaggccgcccagaccagctgcggcctgctgggcgtggagtggggcggcctgacccacagcgtgaccaagggccagggccccgagctgatgggcggcgcccagacccccaccaagcagcccgaggagagagaggccggcgaggtggagctgatgggcgtgctggccctgagcaaggaggagcaggagagaagcctggaggccggccccagacacgccggcagcgtgaagcccgaggccagcgaggccttccccggcgcctgggagaacagaaccagaaaggacatggagagaggcaacacccaggaggacgccgccgacggcgagcagagagaggaggaggagaccgccggcggccagaccctggccgccgaggccgagggcgacagagagagcgagctgagcgaggtgcccgaggccggcggcgagggcctgaccacccaggacgccggctgcggcaccgaggagggcgaggccagcgtgagcgagaaccaggagctggacggcagcaccggcgccgacgccggcccctgccccagcctgggcgaggcctacgccagagagaccgaggacgaggaggccgaggccgacagaaccagcagaagaggctggagactgcaggccgtggccgtgggcctgcccgacagagaggacgcccagaccggcagcgtggccgccggcatcatgggcggcgacgtggtgccccacatcagcgccgccggcgccggcgaggccctggagggcgtgctgggccagggctgggacagcaaggagaaggaggaggccgccgccggcgagcacgccggcggccaggagttcggcctggagggcagcgccgaggaggaggtgaccggcagaggcagccaggtggaggccttcgagagcagagagggcggcccctggggcggcagagtggaggccgaggagagcgccggcgccgaggacagctgcggcctggaccccgccggcagccagaccgccagagccgagggcatgggcgccatggtggaggccggcggcctgctggagaagtggaccctgctggaggaggaggccgtgggctggcaggagagagagcagagagaggacagcgagggcagatgcggcgactaccaccccgagggcgaggcccccagactgctggacgccgagggcctgatggtgaccggcggcagaagagccgaggccaaggagaccgagcccgagagcctggagcacgtgagaggccaggaggagcagcccacccaccaggcccccgccgaggccgcccccgagagcgtgggcgaggccgagaccgccgaggccatgggcagcgccagaggcggcgccgccaacagctggagcgaggcccccctgcccggcagcctgctggacgtgagcgtgcccagaagcagagtgcacctgagcagaagcagcagccagagaagaagcagacccagcttcagaagaacccccgcctgggagcagcaggaggagccccccgcccccaacccccccgaggaggagctgagcgcccccgagcagagacccctgcagctggaggagcccctggagcccagatgggaggacagactgagacccggcgtgagagaccagcccggccagcacagcaagatccccatcttctag

SEQ ID NO: 199657 - DNA, 3267 bp, Artificial Sequence
  derived and/or modified sequence
atggacttcctgagactgtacctgcccggcctgcaccaggccctgagaggcgccctggacagcctgggcaccttcgtgagctacctgctgggcgacgccgtgcccaccgtggagagagaggcccaggccgccgaggagctgggcgtggtggccgtgggcaagaccggcaagatcgtggaggaggaggcccaggaggacctggagggcctgagaggcagccagaacgagggcgccggcagactgagaggccccggcgacgacagaagacacgaggtgggcagcagcgccgtggagcagacctggggctggggcgacggcagcagccacggcagccaggccgagagacaggacagcggcgccggcgagaccgccaaggccgccagatgccaggagcccagcgcccacctggaggccagaaagaagagcaaggccggcagcggcgcctgccaggacagaagcggccaggcccaggagagacaggagagccacgagcaggaggtgaacagagaggagagactgagaagctgggagcaggaggaggaggaggaggaggtgagagccagagagcccggcatggccagaggcgccgagagcgagtggacctggcacggcgagaccgagggcaaggccggcgccgtgggccccaaggccgccggcgacaacagagagatggagcagggcgtgagagaggccgacgccggcgagaccgaggagcccggcgccgagggcgccggcaagggcgaggaggtggtggtggtggagaaggcctgcgagagcaccagagcctggggcacctggggccccggcgccgagcccgaggactggggcatcctgggcagagaggaggccagaaccacccccggcagagaggaggccagagccatcctggacggcgaggaggccagaaccatcagcggcggcgaggaggccgagaccgccagcggcggcgaggaggccgagaccgccagcggcggcgaggaggccggcaccgccagcggcggcgaggaggccggcatcgccagcggcggcgaggccggcaccgccagcggcggcgaggaggccggcaccgccagcggcggcgacgaggcctggaccaccagcggcaaggaggaggccgacctgctgggcgtgagacagaccgagtacggcgccgtgcccggcgagagactgctggaggccaccggcaaggtgtgggtgctggaggaggagggcgacgaggagagagaggccgaggtgagccccttccccaagcagccccaggtgctgggcaccgagagaaccgaggaggccgccgagagccagaccgccggcagagaggccgtgggcggccaggaggccggcgagagcttcgagggccaggtggacctgagaggcaaggaggccgagatgagacaggacctgggcatcagagccgacagagccagaatggaggagctggtgcaggccgaggaggcccaggaggagagaggcagcagcagagaccccgtggccgagctgcccagcgacggcgaggccgagggcaccgccgacctggaggccacccccgaggccagacccgaggaggagctgaccggcgaggagagcgaggccgcccagaccagctgcggcctgctgggcgtggagtggggcggcctgacccacagcgtgaccaagggccagggccccgagctgatgggcggcgcccagacccccaccaagcagcccgaggagagagaggccggcgaggtggagctgatgggcgtgctggccctgagcaaggaggagcaggagagaagcctggaggccggccccagacacgccggcagcgtgaagcccgaggccagcgaggccttccccggcgcctgggagaacagaaccagaaaggacatggagagaggcaacacccaggaggacgccgccgacggcgagcagagagaggaggaggagaccgccggcggccagaccctggccgccgaggccgagggcgacagagagagcgagctgagcgaggtgcccgaggccggcggcgagggcctgaccacccaggacgccggctgcggcaccgaggagggcgaggccagcgtgagcgagaaccaggagctggacggcagcaccggcgccgacgccggcccctgccccagcctgggcgaggcctacgccagagagaccgaggacgaggaggccgaggccgacagaaccagcagaagaggctggagactgcaggccgtggccgtgggcctgcccgacagagaggacgcccagaccggcagcgtggccgccggcatcatgggcggcgacgtggtgccccacatcagcgccgccggcgccggcgaggccctggagggcgtgctgggccagggctgggacagcaaggagaaggaggaggccgccgccggcgagcacgccggcggccaggagttcggcctggagggcagcgccgaggaggaggtgaccggcagaggcagccaggtggaggccttcgagagcagagagggcggcccctggggcggcagagtggaggccgaggagagcgccggcgccgaggacagctgcggcctggaccccgccggcagccagaccgccagagccgagggcatgggcgccatggtggaggccggcggcctgctggagaagtggaccctgctggaggaggaggccgtgggctggcaggagagagagcagagagaggacagcgagggcagatgcggcgactaccaccccgagggcgaggcccccagactgctggacgccgagggcctgatggtgaccggcggcagaagagccgaggccaaggagaccgagcccgagagcctggagcacgtgagaggccaggaggagcagcccacccaccaggcccccgccgaggccgcccccgagagcgtgggcgaggccgagaccgccgaggccatgggcagcgccagaggcggcgccgccaacagctggagcgaggcccccctgcccggcagcctgctggacgtgagcgtgcccagaagcagagtgcacctgagcagaagcagcagccagagaagaagcagacccagcttcagaagaacccccgcctgggagcagcaggaggagccccccgcccccaacccccccgaggaggagctgagcgcccccgagcagagacccctgcagctggaggagcccctggagcccagccccctgagacacgacggcacccccgtgcccgccagaagaagacccctgggccacggcttcggcctggcccaccccggcatgatgcaggagctgcaggccagactgggcagacccaagccccagtag

SEQ ID NO: 199658 - DNA, 3294 bp, Artificial Sequence
  derived and/or modified sequence
atggacttcctgagactgtacctgcccggcctgcaccaggccctgagaggcgccctggacagcctgggcaccttcgtgagctacctgctgggcgacgccgtgcccaccgtggagagagaggcccaggccgccgaggagctgggcgtggtggccgtgggcaagaccggcaagatcgtggaggaggaggcccaggaggacctggagggcctgagaggcagccagaacgagggcgccggcagactgagaggccccggcgacgacagaagacacgaggtgggcagcagcgccgtggagcagacctggggctggggcgacggcagcagccacggcagccaggccgagagacaggacagcggcgccggcgagaccgccaaggccgccagatgccaggagcccagcgcccacctggaggccagaaagaagagcaaggccggcagcggcgcctgccaggacagaagcggccaggcccaggagagacaggagagccacgagcaggaggtgaacagagaggagagactgagaagctgggagcaggaggaggaggaggaggaggtgagagccagagagcccggcatggccagaggcgccgagagcgagtggacctggcacggcgagaccgagggcaaggccggcgccgtgggccccaaggccgccggcgacaacagagagatggagcagggcgtgagagaggccgacgccggcgagaccgaggagcccggcgccgagggcgccggcaagggcgaggaggtggtggtggtggagaaggcctgcgagagcaccagagcctggggcacctggggccccggcgccgagcccgaggactggggcatcctgggcagagaggaggccagaaccacccccggcagagaggaggccagagccatcctggacggcgaggaggccagaaccatcagcggcggcgaggaggccgagaccgccagcggcggcgaggaggccgagaccgccagcggcggcgaggaggccggcaccgccagcggcggcgaggaggccggcatcgccagcggcggcgaggccggcaccgccagcggcggcgaggaggccggcaccgccagcggcggcgaggaggccggcaccgccagcggcggcgacgaggcctggaccaccagcggcaaggaggaggccgacctgctgggcgtgagacagaccgagtacggcgccgtgcccggcgagagactgctggaggccaccggcaaggtgtgggtgctggaggaggagggcgacgaggagagagaggccgaggtgagccccttccccaagcagccccaggtgctgggcaccgagagaaccgaggaggccgccgagagccagaccgccggcagagaggccgtgggcggccaggaggccggcgagagcttcgagggccaggtggacctgagaggcaaggaggccgagatgagacaggacctgggcatcagagccgacagagccagaatggaggagctggtgcaggccgaggaggcccaggaggagagaggcagcagcagagaccccgtggccgagctgcccagcgacggcgaggccgagggcaccgccgacctggaggccacccccgaggccagacccgaggaggagctgaccggcgaggagagcgaggccgcccagaccagctgcggcctgctgggcgtggagtggggcggcctgacccacagcgtgaccaagggccagggccccgagctgatgggcggcgcccagacccccaccaagcagcccgaggagagagaggccggcgaggtggagctgatgggcgtgctggccctgagcaaggaggagcaggagagaagcctggaggccggccccagacacgccggcagcgtgaagcccgaggccagcgaggccttccccggcgcctgggagaacagaaccagaaaggacatggagagaggcaacacccaggaggacgccgccgacggcgagcagagagaggaggaggagaccgccggcggccagaccctggccgccgaggccgagggcgacagagagagcgagctgagcgaggtgcccgaggccggcggcgagggcctgaccacccaggacgccggctgcggcaccgaggagggcgaggccagcgtgagcgagaaccaggagctggacggcagcaccggcgccgacgccggcccctgccccagcctgggcgaggcctacgccagagagaccgaggacgaggaggccgaggccgacagaaccagcagaagaggctggagactgcaggccgtggccgtgggcctgcccgacagagaggacgcccagaccggcagcgtggccgccggcatcatgggcggcgacgtggtgccccacatcagcgccgccggcgccggcgaggccctggagggcgtgctgggccagggctgggacagcaaggagaaggaggaggccgccgccggcgagcacgccggcggccaggagttcggcctggagggcagcgccgaggaggaggtgaccggcagaggcagccaggtggaggccttcgagagcagagagggcggcccctggggcggcagagtggaggccgaggagagcgccggcgccgaggacagctgcggcctggaccccgccggcagccagaccgccagagccgagggcatgggcgccatggtggaggccggcggcctgctggagaagtggaccctgctggaggaggaggccgtgggctggcaggagagagagcagagagaggacagcgagggcagatgcggcgactaccaccccgagggcgaggcccccagactgctggacgccgagggcctgatggtgaccggcggcagaagagccgaggccaaggagaccgagcccgagagcctggagcacgtgagaggccaggaggagcagcccacccaccaggcccccgccgaggccgcccccgagagcgtgggcgaggccgagaccgccgaggccatgggcagcgccagaggcggcgccgccaacagctggagcgaggcccccctgcccggcagcctgctggacgtgagcgtgcccagaagcagagtgcacctgagcagaagcagcagccagagaagaagcagacccagcttcagaagaacccccgcctgggagcagcaggaggagccccccgcccccaacccccccgaggaggagctgagcgcccccgagcagagacccctgcagctggaggagcccctggagcccagccccctgagacacgacggcacccccgtgcccgccagaagaagacccctgggccacggcttcggcctggcccaccccggcatgatgcaggagctgcaggccagactgggcagacccaagccccagtag

SEQ ID NO: 199659 - DNA, 3210 bp, Artificial Sequence
  derived and/or modified sequence
atggatttcctgaggctgtacctgcccggtctccatcaggccctcaggggggcactggactctctggggacatttgtgagctacctcctcggtgatgccgtgcctacagtagagagggaggctcaggcagctgaagaattgggcgtggtagctgtgggcaagacaggaaaaatcgtggaagaggaagcacaggaggacctcgaggggctccgggggtcccaaaatgagggggcaggccgcctccgcggccctggcgatgaccggcgacatgaagtgggctcatccgcggttgaacagacctggggttggggcgatgggtccagccacggaagtcaggctgaaaggcaagactcaggcgccggtgagactgcgaaggccgcccgttgccaggagccttctgctcatttggaagcaagaaagaagtccaaggccggctccggcgcctgccaggacagatccggacaggcccaggagcgccaagagagccacgaacaggaggtcaatcgggaggagcggttgagatcatgggagcaggaagaggaggaagaggaagtgagggcccgagagcctggaatggccagaggggcagaaagcgaatggacctggcatggcgagacagagggcaaagccggtgctgtaggtccaaaggccgcaggcgataatagagaaatggagcagggagtccgggaggctgacgctggagagacggaggaaccaggagctgaaggcgccggtaagggggaagaggttgtggtggtagaaaaggcctgtgagagtacccgggcctggggaacgtggggcccaggagccgaaccggaggattggggcatcctgggaagagaagaggctagaaccactccgggcagggaggaggccagagcaatcctggacggagaggaagccagaacgatttctggcggagaagaggctgaaaccgcatccggcggcgaagaagctgagacagcctctggtggagaagaagccggaacagcttccggcggcgaggaggccggcatcgccagcggaggagaggccggaacagcttccgggggagaggaagctggaactgcctccggcggagacgaagcttggacaacctcaggtaaggaagaggctgacttgctgggagtccggcaaacagaatacggagccgttcccggtgagcgcctgctcgaggctaccggaaaggtgtgggtcctggaagaagaaggagacgaggagcgagaggcggaagttagccccttccccaaacagccccaggtgttaggaaccgagagaactgaagaggcagccgagagccaaaccgccgggcgcgaagctgtaggcggccaggaagccggcgagtcatttgaaggtcaagtggacctgagaggcaaggaggccgagatgcggcaggacttgggcatcagggctgacagggccagaatggaagagctggtgcaggccgaggaggctcaggaggaacggggctcctcccgcgacccggtagccgagttgccaagcgacggcgaggctgaaggtacagctgacttggaggcgaccccagaagcacgccctgaagaggagctcaccggggaagagtcggaagccgcccagacatcctgtggcctgctcggagtggaatggggtggactcacacactccgttacgaagggccagggccccgaactgatgggcggggcccagacgcccactaaacagcctgaagagcgtgaggccggggaggttgagttaatgggtgtactggctttgtcaaaggaagagcaggagaggagcctggaggcaggaccgaggcacgctggaagcgtgaagccggaggcctccgaggcttttcccggtgcgtgggagaaccgaaccaggaaagacatggaaagggggaatacgcaagaagacgcagccgacggcgagcagagggaggaggaggagactgcgggtgggcagactttggccgcagaagccgagggagatcgcgaatcagagctgagcgaggtgcccgaagccggtggagagggtctgacgactcaggacgctgggtgtggcaccgaagagggagaagcatcggtgagcgagaaccaggagttggatggcagtacgggagctgatgcaggaccatgtccctcactcggtgaggcttatgctagggagaccgaagatgaggaagcagaagctgatcgcaccagccgaagaggatggcgcctgcaggcagtcgccgttggtctccccgatcgtgaagacgcccagactggatctgtggccgctggtattatgggcggagatgtcgtaccccatatctctgcagccggcgctggtgaggccctagagggcgtgctgggccaggggtgggatagtaaagagaaggaagaggctgccgcaggcgaacatgctggagggcaggagtttggcctcgaaggcagtgcagaagaggaggtaaccggccgtggctctcaggttgaggcattcgagtcccgggagggaggtccatggggggggcgagtggaggccgaggaaagcgccggcgccgaggattcgtgtggtctagatcccgcaggatcccagacagcacgtgcagagggcatgggggctatggtagaggcaggcgggctcttagaaaaatggacgctgctcgaggaagaagccgtgggatggcaggaacgcgaacagagggaggattccgaagggagatgtggggactatcaccccgaaggcgaagcgccccggctcctcgacgctgagggtctcatggttaccggagggcgcagagcagaggcaaaggagacagagccagagtctcttgagcacgtccggggacaggaggaacagccaactcatcaggcccccgcagaggctgcccctgaatcagtgggcgaagccgagaccgcagaagcaatgggctccgcccgtggcggagctgccaacagctggtctgaagcacccctgcccgggagtcttttggatgtcagcgtccctaggtcccgggtgcacctttccaggtcctcaagccagaggagatcccgccctagctttcgtagaacgccggcctgggagcagcaggaagaaccgccggcccccaaccctcctgaagaagagctgagcgcacccgagcaacggcctctgcagctggaggaaccattggaacctcgatgggaggatcggctgcggcccggcgtgagagatcaaccaggtcaacattctaagattcccatcttttag

SEQ ID NO: 199660 - DNA, 3267 bp, Artificial Sequence
  derived and/or modified sequence
atggactttctccgcctgtacctgcctggacttcatcaggccctgaggggcgcccttgattctcttggaaccttcgtgagttacctcctcggagacgctgttcctacagtggagcgggaagcccaggcagcggaggagctaggcgttgtggccgtcggtaagaccggcaagatagtggaagaggaggcacaagaggatctggaaggcctaaggggttcgcagaacgagggagccgggaggttgcgaggtccaggcgacgacaggagacatgaagtcggcagcagtgccgtagagcagacatggggctggggtgatggcagcagccacggctcccaggccgaacggcaggattccggagcaggggagaccgctaaggccgcccgttgccaggagccctccgcccatctcgaggcacgaaaaaagtccaaggccggatccggtgcctgtcaagaccgctccgggcaagcccaggaaaggcaggagtcgcatgaacaggaagtgaatcgggaggagcggctacgtagctgggagcaagaagaggaagaagaagaggtgcgcgcccgtgaacccgggatggccaggggggccgagagcgaatggacatggcacggcgaaacagagggaaaggcaggcgccgtcggcccgaaggctgcaggtgacaatagagagatggaacagggtgtgcgagaggcggatgcgggcgagaccgaggagccaggcgctgaaggtgccggaaagggagaggaggtggtggtggtagaaaaggcctgtgaaagcactcgcgcttggggtacctggggtcccggtgctgagccagaggactggggtatcctgggaagggaagaggctcgtacgacgcccgggcgcgaggaagcacgggccattctcgatggagaagaggcacgaacgatttccggcggggaagaagcagaaaccgcatccgggggagaggaggcagaaaccgcgtcaggaggagaggaggctggaacagccagcgggggggaggaggccggcatcgccagtggtggcgaagcaggcacagcctctggtggcgaggaggctggaaccgcttccggaggcgacgaggcatggactacatcagggaaagaggaggcagacttactgggcgtgcgccagacggaatacggggctgtaccgggcgagcggctccttgaggccacgggaaaggtttgggtgctggaggaagaaggtgacgaggaacgtgaggcagaggtatcccctttccccaagcagccccaagtacttggaaccgaacgcacagaggaggccgcggagagtcagacggcggggcgggaggcggtgggcgggcaagaagcgggggaaagcttcgagggccaggtggacctgagaggaaaggaagcagagatgaggcaggacctgggaatcagggctgacagagcacgcatggaggaactggtgcaggcagaggaagcacaagaagaaaggggttcttcacgggaccctgtggccgaactcccctctgacggagaggccgagggtaccgcagatttggaggcaacaccagaagcccgacctgaggaggagctgactggcgaagagtccgaagcagcacaaacatcttgtggcctgttgggcgtagaatgggggggattaactcacagcgtcacgaagggacagggccctgagctgatgggcggtgcccagacccccaccaaacagcctgaagagagagaagcaggagaggtggaactgatgggggtattagcccttagtaaagaagagcaggagaggtctttggaagccggcccacgacacgcaggtagcgtgaagcctgaagccagtgaggccttcccaggggcttgggaaaaccggactcggaaggatatggaacgtggcaacacccaagaggacgccgccgatggtgagcagcgtgaagaggaagagaccgcaggcggacagaccttagccgccgaagccgagggcgatcgcgagagcgagctgagtgaggtgccagaggccgggggagaggggttgacaactcaggacgcaggttgcgggaccgaagagggcgaagcctcagtcagcgaaaaccaagaactggacggtagtaccggggccgatgccggcccctgtccctcacttggtgaggcgtatgcgcgtgagactgaggacgaggaggcagaggcggatcgcacatccagacgaggatggagactccaggcagttgccgtgggactccctgaccgggaggacgcacaaactggcagcgtcgctgcaggcatcatgggtggtgatgtggtgccacatatctccgctgccggggcgggagaggccttggagggtgttttgggccagggctgggatagcaaagaaaaagaagaggccgcggcaggggaacatgctggaggacaggagttcgggttggagggttccgccgaggaggaagtgaccggtagaggtagccaggtggaggcttttgagtctagagaaggcggcccatggggtgggcgtgtggaggcagaggagagtgccggtgcagaagactcatgcggacttgatcccgccggctcgcagacggcccgtgctgagggcatgggcgccatggtggaggctgggggcctgttagagaaatggacgctgctcgaagaggaggcagtcgggtggcaagaacgagagcagcgcgaggatagcgaaggccgctgcggggactaccatcctgaaggggaggcccctagactgctcgatgccgagggactcatggttacgggtgggcgcagggccgaggcaaaggaaacagagccagagtcccttgagcacgtgcgcggccaggaggagcagcccacccaccaggcccccgctgaagccgcaccagaaagtgtcggcgaagccgaaacggctgaggctatggggtctgcgagggggggcgccgctaatagctggagcgaggcccccctccccggcagcctgctcgacgtgtctgtaccacggtcccgtgtgcacctgagtcggtccagctctcaacgccgaagccggccctcttttagacggactcctgcttgggagcagcaagaggaacctcccgccccaaaccctcccgaggaagagctgagtgctccggaacagaggccactgcaactagaggaaccactggagccttctccgctccgccatgacggtacacctgttcctgcccgccggcggcccttaggccacggttttggtctggcccaccccgggatgatgcaggagctgcaggcacgcctcggccggccaaagccccagtag

SEQ ID NO: 199661 - DNA, 3294 bp, Artificial Sequence
  derived and/or modified sequence
atggactttctgcgcctttacttacccggcctgcaccaggcacttcggggagccctggattcgctgggtacgttcgtgtcctaccttttgggggacgccgttccaaccgtggaacgagaggcccaggccgctgaggagttaggagtggtggctgtgggtaagactgggaagatagtggaggaagaagcacaggaggacctggagggcctgagaggctctcagaatgagggcgctggaagattgcgcggtcctggggatgataggcggcatgaagtagggagttcagcagttgaacagacttgggggtggggggacggctccagccatggatctcaggccgagagacaggactctggtgccggcgagacagctaaggctgcacgatgccaggaaccttcagcccacctcgaagccaggaagaagtccaaggcaggatccggggcctgccaggacagaagcggccaagcacaagaacgacaggaaagccatgagcaggaggtaaacagggaggaacgactgcggagttgggagcaagaagaagaagaggaggaggtacgtgctagggagcctgggatggccaggggagctgagagtgaatggacctggcatggcgaaactgagggaaaggccggggccgtgggacccaaagcagctggtgacaacagggagatggagcagggggtgagggaagccgacgcgggggaaacagaagagcccggggccgaaggggccgggaagggagaagaggtggtcgtcgtggaaaaagcctgcgaatcaaccagagcctggggaacatggggtccaggcgcggaacctgaagactggggaatcctgggtcgagaggaagcacgaaccacccccggaagggaggaagccagggccatcttggatggggaagaagcacgtaccatttctggtggagaggaggccgagactgcatctggcggagaagaggccgaaactgctagcggcggtgaagaggctggcacggcatcaggaggtgaggaggcagggattgcaagtggaggagaggccggcacagcttcaggcggtgaagaagccggtacagctagcggcggggaggaggcaggaacagccagcgggggggatgaagcctggacgacttctggtaaagaggaagctgacctgctgggggtgcgccagaccgagtacggtgccgtgccaggggaacgactgcttgaagccacagggaaggtctgggtgctggaggaggagggggatgaagagcgcgaggcagaggtctccccttttcctaagcagcctcaagtcctcgggactgaaagaacagaagaggcggccgagtcccagactgcaggccgagaggctgtgggcggtcaggaggctggcgaatcctttgaggggcaggttgatttgcgcgggaaagaggccgagatgcgccaagatttagggataagagctgaccgcgcccggatggaggaactggtgcaggccgaggaggcccaggaggagcggggaagctccagagatccggttgcagaactgccatcagacggcgaagctgaagggacggcggatctagaagctacacccgaggctcgaccagaagaggagctgactggcgaggaatctgaagctgcgcagacgtcatgtggcctcctgggggttgagtggggcggcttgactcatagcgtgacaaaagggcagggccctgagttgatgggcggagctcagactccgactaagcaacccgaagagcgtgaggcaggcgaagtcgagctcatgggcgtccttgccctgtctaaagaggagcaggagaggtctctggaagcaggacctaggcatgctggctccgtaaagccagaggcttccgaggctttcccaggcgcctgggaaaatcggactcggaaggatatggaacggggcaatacacaagaagacgccgccgacggagagcaacgtgaggaagaggaaaccgctgggggacagaccctggctgcagaagcagagggcgatcgggaaagtgagctgagcgaggttccagaggcaggaggagagggtctgaccacacaggacgctggctgcggaaccgaagagggcgaagcctctgtcagcgaaaatcaggagctggacgggagtactggggccgacgctggtccgtgtcctagccttggtgaagcctacgctcgtgaaaccgaagacgaagaggccgaagcagatcggacaagcaggcgcgggtggcgactccaggcagttgctgttggcctgcccgatagggaagacgcccagaccggctcagtggccgcaggcatcatggggggggatgtagtcccgcatataagcgcggcaggcgctggagaggccctggagggtgtgctgggccagggctgggactccaaagaaaaggaagaggcagcggcaggagaacacgctggtggacaggagtttggtctcgagggtagcgccgaagaggaggtcaccgggaggggatcccaagtggaggcctttgagagtagggagggtggaccttgggggggacgggtcgaggccgaggagagcgcaggcgccgaagattcctgtggactggaccccgccgggagtcagaccgctagagccgagggcatgggtgccatggtcgaagcgggaggactgctggaaaagtggacattgttggaagaggaagcagttggatggcaagagagggagcagcgcgaggattccgaggggagatgtggggactatcaccccgaaggggaagcaccgcgtctgttagatgcggagggactgatggtgactgggggccgtcgggccgaagcaaaggaaaccgaacccgaatctttagagcatgtccggggccaggaagagcagcccactcaccaggctcccgccgaggcagcccccgagagcgtgggcgaagccgaaacagccgaggcaatggggtcggcccggggtggagccgccaacagttggtccgaggccccgttgcccggcagcttgctcgatgtgagtgtcccaaggagccgcgtgcatttatcccgctcgagctctcagagaagaagtcgacctagttttaggcgaaccccagcctgggagcagcaggaagagccccccgcaccaaatcctcctgaggaggagctgtctgcgccagagcagcgcccactccagctggaggagcctctcgagccctcccctctgcggcacgatgggaccccagtgcctgcccgaaggcggcccctaggacatggtttcgggctggcacatccaggcatgatgcaggaactccaagcacgtttgggccgtcccaagccgcagtag

SEQ ID NO: 199662 - DNA, 3210 bp, Artificial Sequence
  derived and/or modified sequence
atggacttcctgcggctgtacctgcccggcctgcaccaggccctgcggggggccctggacagcctgggcacctttgtgtcctacctgctgggagatgctgtgcccaccgtggagcgggaggcccaggccgctgaggagctgggcgtggtggccgtgggcaagacaggcaagatcgtggaggaggaggcccaggaggacctggagggcctgcggggcagccagaatgaaggagctggccgcctgcggggccctggagatgacagaagacatgaggtgggcagcagcgctgtggagcagacctggggctggggagatggcagcagccacggcagccaggccgagcggcaggacagcggggccggggagacagccaaggccgcccgctgccaggagcccagcgcccacctggaggccaggaagaagagcaaggccggcagcggggcctgccaggacagaagtggccaggcccaggagcggcaggagagccatgagcaggaggtgaaccgggaggagcggctgcgctcctgggagcaggaggaggaggaggaggaggtgcgggcccgggagcccggcatggcccggggagctgagagcgagtggacctggcatggagaaacagagggcaaggccggggctgtgggccccaaggccgccggggacaaccgggagatggagcagggcgtgcgggaggctgatgctggggagacagaggagcctggagctgagggcgctgggaagggggaggaggtggtggtggtggagaaggcctgtgagagcacccgggcctggggcacctggggccctggagctgagcctgaggactggggcatcctgggccgggaggaggcccggaccaccccaggccgggaggaggcccgggccatcctggatggagaggaggcccggaccatctctggaggagaggaggccgagacagccagcggcggggaggaggccgagacagccagcggcggggaggaggccggcacagccagcggcggggaggaggccggcatcgccagcggcggggaggccggcacagccagcggcggggaggaggccggcacagccagcggaggagatgaggcctggaccaccagcggcaaggaggaggccgacctgctgggcgtgcggcagacagaatatggagctgtgcctggagagcggctgctggaggccaccgggaaggtgtgggtgctggaggaggagggagatgaggagcgggaggccgaggtgagccccttccccaagcagccccaggtgctgggcacagagaggacagaggaggccgctgagagccagacagctggccgggaggccgtgggcggccaggaggccggggagagctttgagggccaggtggacctgcggggcaaggaggccgagatgaggcaggacctgggcatccgggctgaccgggccaggatggaggagctggtgcaggccgaggaggcccaggaggagcggggcagcagccgggaccctgtggccgagctgcccagtgatggagaggccgagggcacagctgacctggaggccaccccagaggcccggcctgaggaggagctgaccggggaggagagcgaggccgcccagaccagctgtggcctgctgggcgtggagtggggcggcctgacccacagcgtgaccaagggccagggccctgagctgatgggcggggcccagacccccaccaagcagcctgaggagcgggaggccggggaggtggagctgatgggcgtgctggccctgagcaaggaggagcaggagaggagcctggaggccggccccaggcatgctggctctgtgaagccagaggccagcgaggccttccctggggcctgggagaacagaaccaggaaggacatggagcggggcaacacccaggaggatgctgctgatggagagcagcgggaggaggaggagacagctgggggccagaccctggccgctgaggccgagggggaccgggagagcgagctgtctgaggtgcctgaggccggcggggagggcctgaccacccaggatgctggctgcggcacagaggagggggaggcctctgtgtctgagaaccaggagctggatggcagcactggagcagatgctggcccctgccccagcctgggggaggcctatgcccgggagacagaagatgaggaggccgaggccgacaggaccagccggcggggctggaggctgcaggccgtggccgtgggcctgcctgaccgggaggatgcccagacaggctctgtggccgccggcatcatgggaggagatgtggtgccccacatctctgctgctggagctggggaggccctggagggcgtgctgggccagggctgggacagcaaggagaaggaggaggccgctgctggggagcacgccggcggccaggagtttggcctggagggcagcgctgaggaggaggtgacaggccggggcagccaggtggaggcctttgagagccgggagggcggcccctggggcggccgggtggaggccgaggagagcgctggagctgaggacagctgtggcctggaccctgctggcagccagacagcccgggcagagggcatgggcgccatggtggaggccggcggcctgctggagaagtggaccctgctggaggaggaggccgtgggctggcaggagcgggagcagagagaagattctgagggccgctgtggggactaccaccctgagggggaggccccccggctgctggatgctgagggcctgatggtgactggaggaagaagagctgaggccaaggagacagagcctgagagcctggagcacgtgcggggccaggaggagcagcccacccaccaggccccagctgaggccgcccctgagagcgtgggggaggccgagacagctgaggccatgggcagcgcccggggcggggccgccaacagctggagcgaggcccccctgcccggcagcctgctggatgtgtctgtgcccaggagccgggtgcacctgagccgcagcagcagccagaggaggagccggcccagcttccggaggaccccagcctgggagcagcaggaggagcccccagcccccaaccccccagaggaggagctgagcgcccctgagcagaggcccctgcagctggaggagcccctggagccccgctgggaggaccggctgcggcctggggtgcgggaccagcccggccagcacagcaagatccccatcttctag

SEQ ID NO: 199663 - DNA, 3267 bp, Artificial Sequence
  derived and/or modified sequence
atggacttcctgcggctgtacctgcccggcctgcaccaggccctgcggggggccctggacagcctgggcacctttgtgtcctacctgctgggagatgctgtgcccaccgtggagcgggaggcccaggccgctgaggagctgggcgtggtggccgtgggcaagacaggcaagatcgtggaggaggaggcccaggaggacctggagggcctgcggggcagccagaatgaaggagctggccgcctgcggggccctggagatgacagaagacatgaggtgggcagcagcgctgtggagcagacctggggctggggagatggcagcagccacggcagccaggccgagcggcaggacagcggggccggggagacagccaaggccgcccgctgccaggagcccagcgcccacctggaggccaggaagaagagcaaggccggcagcggggcctgccaggacagaagtggccaggcccaggagcggcaggagagccatgagcaggaggtgaaccgggaggagcggctgcgctcctgggagcaggaggaggaggaggaggaggtgcgggcccgggagcccggcatggcccggggagctgagagcgagtggacctggcatggagaaacagagggcaaggccggggctgtgggccccaaggccgccggggacaaccgggagatggagcagggcgtgcgggaggctgatgctggggagacagaggagcctggagctgagggcgctgggaagggggaggaggtggtggtggtggagaaggcctgtgagagcacccgggcctggggcacctggggccctggagctgagcctgaggactggggcatcctgggccgggaggaggcccggaccaccccaggccgggaggaggcccgggccatcctggatggagaggaggcccggaccatctctggaggagaggaggccgagacagccagcggcggggaggaggccgagacagccagcggcggggaggaggccggcacagccagcggcggggaggaggccggcatcgccagcggcggggaggccggcacagccagcggcggggaggaggccggcacagccagcggaggagatgaggcctggaccaccagcggcaaggaggaggccgacctgctgggcgtgcggcagacagaatatggagctgtgcctggagagcggctgctggaggccaccgggaaggtgtgggtgctggaggaggagggagatgaggagcgggaggccgaggtgagccccttccccaagcagccccaggtgctgggcacagagaggacagaggaggccgctgagagccagacagctggccgggaggccgtgggcggccaggaggccggggagagctttgagggccaggtggacctgcggggcaaggaggccgagatgaggcaggacctgggcatccgggctgaccgggccaggatggaggagctggtgcaggccgaggaggcccaggaggagcggggcagcagccgggaccctgtggccgagctgcccagtgatggagaggccgagggcacagctgacctggaggccaccccagaggcccggcctgaggaggagctgaccggggaggagagcgaggccgcccagaccagctgtggcctgctgggcgtggagtggggcggcctgacccacagcgtgaccaagggccagggccctgagctgatgggcggggcccagacccccaccaagcagcctgaggagcgggaggccggggaggtggagctgatgggcgtgctggccctgagcaaggaggagcaggagaggagcctggaggccggccccaggcatgctggctctgtgaagccagaggccagcgaggccttccctggggcctgggagaacagaaccaggaaggacatggagcggggcaacacccaggaggatgctgctgatggagagcagcgggaggaggaggagacagctgggggccagaccctggccgctgaggccgagggggaccgggagagcgagctgtctgaggtgcctgaggccggcggggagggcctgaccacccaggatgctggctgcggcacagaggagggggaggcctctgtgtctgagaaccaggagctggatggcagcactggagcagatgctggcccctgccccagcctgggggaggcctatgcccgggagacagaagatgaggaggccgaggccgacaggaccagccggcggggctggaggctgcaggccgtggccgtgggcctgcctgaccgggaggatgcccagacaggctctgtggccgccggcatcatgggaggagatgtggtgccccacatctctgctgctggagctggggaggccctggagggcgtgctgggccagggctgggacagcaaggagaaggaggaggccgctgctggggagcacgccggcggccaggagtttggcctggagggcagcgctgaggaggaggtgacaggccggggcagccaggtggaggcctttgagagccgggagggcggcccctggggcggccgggtggaggccgaggagagcgctggagctgaggacagctgtggcctggaccctgctggcagccagacagcccgggcagagggcatgggcgccatggtggaggccggcggcctgctggagaagtggaccctgctggaggaggaggccgtgggctggcaggagcgggagcagagagaagattctgagggccgctgtggggactaccaccctgagggggaggccccccggctgctggatgctgagggcctgatggtgactggaggaagaagagctgaggccaaggagacagagcctgagagcctggagcacgtgcggggccaggaggagcagcccacccaccaggccccagctgaggccgcccctgagagcgtgggggaggccgagacagctgaggccatgggcagcgcccggggcggggccgccaacagctggagcgaggcccccctgcccggcagcctgctggatgtgtctgtgcccaggagccgggtgcacctgagccgcagcagcagccagaggaggagccggcccagcttccggaggaccccagcctgggagcagcaggaggagcccccagcccccaaccccccagaggaggagctgagcgcccctgagcagaggcccctgcagctggaggagcccctggagcccagccccctgcggcatgatggcacccctgtgcctgcccggcggcggcccctgggccacggcttcggcctggcccaccctggcatgatgcaggagctgcaggcccggctgggccggcccaagccccagtag

SEQ ID NO: 199664 - DNA, 3294 bp, Artificial Sequence
  derived and/or modified sequence
atggacttcctgcggctgtacctgcccggcctgcaccaggccctgcggggggccctggacagcctgggcacctttgtgtcctacctgctgggagatgctgtgcccaccgtggagcgggaggcccaggccgctgaggagctgggcgtggtggccgtgggcaagacaggcaagatcgtggaggaggaggcccaggaggacctggagggcctgcggggcagccagaatgaaggagctggccgcctgcggggccctggagatgacagaagacatgaggtgggcagcagcgctgtggagcagacctggggctggggagatggcagcagccacggcagccaggccgagcggcaggacagcggggccggggagacagccaaggccgcccgctgccaggagcccagcgcccacctggaggccaggaagaagagcaaggccggcagcggggcctgccaggacagaagtggccaggcccaggagcggcaggagagccatgagcaggaggtgaaccgggaggagcggctgcgctcctgggagcaggaggaggaggaggaggaggtgcgggcccgggagcccggcatggcccggggagctgagagcgagtggacctggcatggagaaacagagggcaaggccggggctgtgggccccaaggccgccggggacaaccgggagatggagcagggcgtgcgggaggctgatgctggggagacagaggagcctggagctgagggcgctgggaagggggaggaggtggtggtggtggagaaggcctgtgagagcacccgggcctggggcacctggggccctggagctgagcctgaggactggggcatcctgggccgggaggaggcccggaccaccccaggccgggaggaggcccgggccatcctggatggagaggaggcccggaccatctctggaggagaggaggccgagacagccagcggcggggaggaggccgagacagccagcggcggggaggaggccggcacagccagcggcggggaggaggccggcatcgccagcggcggggaggccggcacagccagcggcggggaggaggccggcacagccagcggcggggaggaggccggcacagccagcggaggagatgaggcctggaccaccagcggcaaggaggaggccgacctgctgggcgtgcggcagacagaatatggagctgtgcctggagagcggctgctggaggccaccgggaaggtgtgggtgctggaggaggagggagatgaggagcgggaggccgaggtgagccccttccccaagcagccccaggtgctgggcacagagaggacagaggaggccgctgagagccagacagctggccgggaggccgtgggcggccaggaggccggggagagctttgagggccaggtggacctgcggggcaaggaggccgagatgaggcaggacctgggcatccgggctgaccgggccaggatggaggagctggtgcaggccgaggaggcccaggaggagcggggcagcagccgggaccctgtggccgagctgcccagtgatggagaggccgagggcacagctgacctggaggccaccccagaggcccggcctgaggaggagctgactggagaggagagcgaggccgcccagaccagctgtggcctgctgggcgtggagtggggcggcctgacccacagcgtgaccaagggccagggccctgagctgatgggcggggcccagacccccaccaagcagcctgaggagcgggaggccggggaggtggagctgatgggcgtgctggccctgagcaaggaggagcaggagaggagcctggaggccggccccaggcatgctggctctgtgaagccagaggccagcgaggccttccctggggcctgggagaacagaaccaggaaggacatggagcggggcaacacccaggaggatgctgctgatggagagcagcgggaggaggaggagacagctgggggccagaccctggccgctgaggccgagggggaccgggagagcgagctgtctgaggtgcctgaggccggcggggagggcctgaccacccaggatgctggctgcggcacagaggagggggaggcctctgtgtctgagaaccaggagctggatggcagcactggagcagatgctggcccctgccccagcctgggggaggcctatgcccgggagacagaagatgaggaggccgaggccgacaggaccagcagaagaggctggaggctgcaggccgtggccgtgggcctgcctgacagagaagatgcccagacaggctctgtggccgccggcatcatgggaggagatgtggtgccccacatctctgctgctggggccggggaggccctggagggcgtgctgggccagggctgggacagcaaggagaaggaggaggccgccgccggggagcacgccggcggccaggagtttggcctggagggcagcgctgaggaggaggtgacaggccggggcagccaggtggaggcctttgagagccgggagggcggcccctggggcggccgggtggaggccgaggagagcgctggagctgaggacagctgtggcctggaccctgctggcagccagacagcccgggcagagggcatgggcgccatggtggaggccggcggcctgctggagaagtggaccctgctggaggaggaggccgtgggctggcaggagcgggagcagcgggaggacagcgagggccgctgtggggactaccaccctgagggggaggccccccggctgctggatgctgagggcctgatggtgactggaggccggcgggcagaggccaaggagacagagcctgagagcctggagcacgtgcggggccaggaggagcagcccacccaccaggccccagctgaggccgcccctgagagcgtgggggaggccgagacagctgaggccatgggcagcgcccggggcggggccgccaacagctggagcgaggcccccctgcccggcagcctgctggatgtgtctgtgcccaggagccgggtgcacctgagccgcagcagcagccagaggaggagccggcccagcttccggaggaccccagcctgggagcagcaggaggagcccccagcccccaaccccccagaggaggagctgagcgcccctgagcagaggcccctgcagctggaggagcccctggagcccagccccctgcggcatgatggcacccctgtgcctgccaggagaagacccctgggccacggcttcggcctggcccaccctggcatgatgcaggagctgcaggcccggctgggccggcccaagccccagtag

SEQ ID NO: 199665 - DNA, 3210 bp, Artificial Sequence
  derived and/or modified sequence
atggacttcctgcggctgtacctgcccggcctgcaccaggccctgcgaggcgccctggattccttgggaacgttcgtgagctacctgctcggtgacgcagtgcctaccgtcgaacgcgaggcacaggcagcagaggaactaggtgtggtggctgtaggaaaaacagggaagattgtggaggaagaggcgcaggaagacctcgaggggttgcgggggtcgcagaatgaaggtgccggtcgcttaagagggcccggcgacgatcgtcgacacgaagttggatcctctgcggtcgaacagacgtggggctggggtgacggcagctctcacgggtctcaggccgagagacaggatagcggtgccggcgaaacggccaaagccgccagatgtcaagaaccttctgcacacttagaggcacgaaagaaatctaaggctgggtcaggagcttgccaagaccgttcgggtcaggctcaggaacggcaggaatctcacgagcaggaggttaatcgggaggaacgtctgaggtcttgggagcaggaggaggaagaagaagaagtgcgcgcccgggaaccagggatggcccggggcgccgagtctgaatggacttggcatggcgagactgaaggcaaagctggggctgtaggccccaaagccgcaggggacaaccgggagatggagcagggggttagagaagctgacgccggagaaacagaggagccaggggcagagggcgccggtaaaggcgaggaggttgtggtggtagagaaggcgtgtgagtctactagagcttggggcacatggggcccaggagctgaacctgaggactggggcatccttgggagggaagaagctagaacgaccccgggacgtgaagaagctagggcaattctcgacggtgaggaggctcggaccatttctggaggcgaggaagcagagaccgcctctggcggagaggaagctgaaaccgcgtctggtggggaagaagcaggtaccgcttcaggaggcgaagaagcaggcatcgccagcggtggcgaggctggcactgcttctgggggggaggaggccggcaccgccagtgggggagatgaagcgtggaccacatccggaaaggaggaggccgacttgttgggcgtcagacagactgagtatggagccgtcccgggcgagagactgctagaggctacaggtaaggtgtgggtattggaagaagagggggatgaggagcgcgaagcagaagtgtctcctttcccgaaacagcctcaggtgttagggaccgagagaacagaggaggctgccgaaagtcagacagctggacgcgaagccgtgggcggacaggaagcaggagagagctttgagggccaggtggacctgcgaggcaaggaggctgaaatgcgccaagacctgggaatccgggccgatagagcacgcatggaagagctggtgcaggctgaagaagcacaggaggagaggggctcgagtcgggatcctgtggctgagctgccatcagacggtgaggccgaaggaaccgcagaccttgaggcaactcccgaggctaggccagaggaagaacttactggcgaagaatcggaggcagcccagacatcgtgcggtctattgggggtggaatggggcggactgactcactccgtcactaagggacagggacccgagctgatggggggggcgcagactcctactaagcagcccgaggagcgggaggcaggagaggttgaattgatgggggtcctggcattatctaaggaagagcaagagcgctcccttgaagcaggccctagacatgctggcagtgtgaagcctgaggccagcgaggccttccccggagcttgggaaaacaggacgcggaaggatatggaacgaggaaacacgcaggaagatgctgccgacggtgaacagagagaggaggaagagactgcaggcggccaaacactggcggccgaggcggagggcgacagagagagcgagctcagcgaagtgccggaagccggtggcgaaggtttgaccacacaggacgccggctgtgggaccgaagaaggcgaagcctccgtgtctgaaaaccaggagctggacgggtccactggcgcggatgcagggccatgtccatctctcggagaagcctatgcacgggaaaccgaagacgaggaggctgaggcagatagaacatctaggcgcggatggcgcttgcaagctgtcgccgtgggcctacccgatagggaggacgcccaaaccggttccgtcgctgcgggaattatggggggcgatgtggtaccccatatctccgcggccggagctggagaagcgttggagggggttctggggcagggctgggattccaaggagaaagaagaggctgccgccggggagcatgccggtgggcaagagtttgggttggaaggttcagccgaggaagaagttaccggccggggtagtcaagtggaggctttcgaaagccgcgaaggagggccctggggggggcgcgtggaggctgaagaaagcgctggcgctgaagactcctgcggcttagacccggccgggtcacagactgcacgggccgaggggatgggggctatggtggaggccggtggactactagagaaatggaccctcctggaagaggaggcggtcggttggcaagaacgggaacagcgggaggactcagaaggacggtgtggggattatcaccctgagggggaagctccccgacttttggacgcagaggggctcatggtgactgggggccgacgggctgaagcaaaggagactgaacctgaatccctggagcacgtcagaggccaagaggagcagcccacccaccaagcgcctgccgaagcggccccggagagcgttggtgaagcggaaaccgccgaagccatgggctcagcccgcggtggcgcggctaatagctggagcgaggcccctctcccgggtagtctattggacgtcagtgtgccccggtccagagtgcatctctccagaagctctagccaacgccgtagccgaccctcttttagaaggactcccgcttgggaacagcaggaagaacccccagcccccaacccacctgaggaggaactgtcagcacccgaacagaggcccctgcagctagaggaacccttggagcctaggtgggaggatcgactgaggccgggcgtgcgggaccagccaggccagcactctaaaattcctattttttag

SEQ ID NO: 199666 - DNA, 3267 bp, Artificial Sequence
  derived and/or modified sequence
atggacttcctgcggctgtacctgcccggcctgcaccaggccctgcgaggggcactggactccctcgggacctttgtgagttacttgctgggtgacgcagtgcccactgtggaacgggaggcacaagcggccgaggaactgggtgtggtcgccgttggaaagacaggaaagattgtcgaagaggaggctcaggaagatctcgagggactccgtggtagccaaaatgagggtgctggtcgcctgcggggacctggggacgataggagacatgaggttgggtcctcggctgtggaacagacctgggggtggggggacgggtcatcccacggatcacaagctgagaggcaagacagtggtgccggtgaaacggctaaagctgcacgatgtcaggagccatccgcccacctcgaagctcgtaaaaagtctaaggccggctccggtgcttgtcaggatagaagtggacaggctcaggaaagacaggagtctcacgagcaggaggtgaaccgcgaagagagactgcggtcttgggaacaggaggaagaagaggaggaagtccgtgcacgcgagcctggaatggctagaggggcggagtccgaatggacctggcatggggagacagaagggaaggcgggcgccgtgggacctaaggctgccggcgataaccgggagatggagcagggggtcagggaagcagatgccggagaaaccgaggagccaggagccgagggtgccgggaagggcgaggaagtcgtggttgtggaaaaagcttgtgaatctaccagagcatggggaacatggggccccggggccgagccagaagattgggggatactgggccgagaagaggcaaggacgacccccggcagagaggaggctcgcgcaatactcgacggcgaagaggcccggaccatatctgggggagaggaagcagagacagcgtccggcggtgaggaggccgaaacagcttctggcggcgaagaagccggcaccgcctccgggggcgaggaagccgggatcgcttcaggcggggaagccggtacagcctcgggaggcgaggaggccggcacagcctcaggcggcgatgaagcttggactacatcgggcaaggaggaggcagatctcctgggcgtccgccagaccgagtacggagcggtcccgggagagaggctgctggaagctaccgggaaggtctgggtgttggaggaagagggcgacgaggagagagaggctgaggtctcccctttccctaaacagccacaggtccttggcactgaacgcaccgaggaagctgctgaatctcagactgccgggagggaagctgtggggggccaggaagcgggcgagagtttcgagggtcaggtcgacctgcgaggcaaggaagccgaaatgcggcaagacctgggcattcgtgcagatcgggcccggatggaggagttggtgcaggcagaggaggcccaagaagagaggggcagctcaagggatcctgtggccgagttaccaagcgatggagaggcagaaggcaccgccgatctagaggccactcccgaagctaggcctgaggaggagctgacgggggaggaaagcgaggccgcccagacttcttgtggcttgcttggggtggaatggggggggctgacgcattctgtgacaaaggggcagggccctgagctgatggggggcgcacagactccaacaaaacaaccagaggagagggaggctggggaagtcgagctgatgggtgtgctggcactctctaaggaggaacaggaacgatcactggaggcgggccctaggcatgccgggagcgttaagccagaagcctccgaagcattccccggagcttgggagaataggaccagaaaagacatggagaggggcaatacacaagaggacgccgccgatggagagcagagagaggaagaagagaccgcagggggtcagacccttgctgcggaggccgaaggagatagggagtccgagctgagtgaagtgccggaggccggaggcgaggggttgaccacgcaggacgccggttgcgggaccgaggaaggtgaggcttctgtgtcggaaaaccaggagctggacgggtctaccggcgccgatgccgggccatgcccatccctgggtgaggcatacgctagagaaactgaggatgaggaggcggaggctgataggacttctagaagggggtggcgtcttcaggctgtggcggtcgggctccccgaccgagaggatgcacagaccggtagtgtagccgccggcataatgggtggggatgtggttccccatatctccgcagccggcgccggagaagctctggaaggagtcctcggtcaaggatgggatagcaaagagaaggaagaggccgccgcgggcgaacacgcaggcggccaagagttcggcttggaaggttcggcagaagaggaggtgactggccgtgggagccaagtggaggccttcgagtcccgggaaggaggaccttggggagggcgcgtcgaggccgaggaatcagctggggccgaggattcttgcggattagatcccgccggcagccagactgcccgggccgagggtatgggggcgatggtggaggccgggggcctgctcgagaaatggaccctgctcgaggaagaggccgtggggtggcaggaacgggaacaacgggaagacagcgaaggtcgctgtggcgactatcacccggagggagaggctcctcggctgctcgatgctgaagggctgatggtgacagggggacgccgcgcagaagccaaagaaacagagccggaatcgttggagcatgtacgaggccaagaggagcagcccactcaccaggcccccgctgaggccgcccccgagagcgttggagaggcagagaccgctgaagcaatgggctcagcacggggcggcgccgccaatagttggtcggaagccccgctccctggctctttactcgacgtttcagtgccgcggtctcgggttcatttgtcacgaagctccagccagcggaggagtcgcccttcttttcggcgaactccggcatgggagcagcaggaggaaccacccgcacccaatccgcctgaggaggagctcagcgctccagagcaacgacctctgcagctggaagaaccattggagcccagccctctacggcatgacggtacgccagtgcctgcacgcaggcgacccttagggcacggctttggacttgcccatcctgggatgatgcaggaactccaagctagactgggtcgtcctaagcctcagtag

SEQ ID NO: 199667 - DNA, 3294 bp, Artificial Sequence
  derived and/or modified sequence
atggacttcctgcggctgtacctgcccggcctgcaccaggccctgagaggagccttggattcattggggactttcgtaagctacctgctgggcgacgccgtgcccacagtggagcgcgaggctcaggccgccgaggagctgggcgtagtggctgtggggaaaactggaaagattgttgaggaggaagcacaggaggaccttgaaggcctgcgggggtcacagaatgagggagccggcagactgcggggtccaggagatgaccgcagacatgaggtcgggagctcagctgtggaacagacatggggctggggtgatgggagcagccatggttctcaggccgaaaggcaggattcgggtgcaggtgaaacagctaaagcagcccgctgccaggagccgtccgcgcacctggaggcaagaaaaaagtccaaggctggatctggagcctgccaagaccgcagtggacaggctcaggaacggcaggagagccacgaacaggaagtcaatcgggaagagagacttaggtcctgggagcaggaggaggaggaagaggaggtgagagccagggagcccggtatggcccgcggcgccgagtctgagtggacctggcacggtgagaccgaaggcaaggccggcgcggtaggccccaaggcggcgggagacaatagggagatggaacagggggtgcgcgaagctgatgcaggcgagaccgaagaacctggggctgagggcgccggtaaaggagaggaagtagttgtagtggagaaagcatgtgagtctacacgcgcttggggaacatggggaccgggtgccgaacccgaggattggggaattctgggccgcgaggaagcccggaccacacccggacgcgaggaggcccgcgccattctggacggtgaggaggctcggaccatatccgggggtgaagaagctgagaccgccagcggcggggaggaggcagaaacagctagcgggggggaagaggccggaaccgccagcgggggcgaggaggctggcatcgcatcgggcggagaggccggtaccgcctccgggggagaagaagccggcacggcctccggcggagaggaagcggggaccgcctcaggcggtgatgaagcatggactacctctggaaaggaggaggccgacctgcttggggtgcgccagaccgagtacggagccgttccgggagaacgcttgttagaggccaccgggaaagtatgggtcctcgaggaggaaggagatgaagagcgtgaagcagaggtgagcccattccccaaacagccccaggtgttaggaacagagaggaccgaagaagccgccgaaagtcagacagccggtagagaagctgtaggaggacaggaagcaggcgagtcattcgagggccaggtggacctgcgtgggaaagaagccgagatgcgtcaggacctgggaatcagagccgatagggcgaggatggaggagctggtccaggctgaggaagctcaggaggagaggggttcgagccgggatcctgttgcagaactcccgagcgacggtgaggccgaagggaccgcagatcttgaggccacacccgaagctaggcccgaggaggagctgaccggcgaagagtctgaagcagcgcagacctcatgcggcttattgggagtggaatggggcggcctcacccattctgttacgaaaggccaaggtccagagcttatggggggggcacagacccccactaagcaaccagaagagagggaggcaggtgaagtcgaactgatgggtgtcttagccctctctaaggaggagcaagagcgcagcctcgaggcaggacctcggcacgcagggtctgtcaagccagaggcctccgaagccttccccggagcatgggagaataggacccgcaaggacatggaacgtggcaatacccaggaggatgccgcggacggggaacagcgtgaagaagaggagaccgctggcggccagacactggccgccgaggctgagggagatcgcgaaagtgagctgtccgaagttccggaggctggaggagaaggtcttaccactcaggacgccggttgcggaacggaggaaggcgaagctagcgtcagcgaaaatcaagagctggacggtagtaccggagctgacgccggtccatgccctagtctcggcgaagcatatgctcgagaaactgaggatgaggaagccgaagccgacagaaccagcaggcgagggtggaggctgcaggcagttgccgttggcctgcctgatcgagaagatgcacaaaccggcagcgtcgctgccggaatcatgggaggagatgtggttcctcatatctctgcagcaggcgccggggaagccttggaaggtgttctcggccagggctgggactccaaggagaaagaagaggcagcggccggggagcacgccggtggtcaagagtttgggctggagggctctgctgaggaagaggtgactggaagaggttcgcaagtggaagcctttgagtcaagagaaggaggaccttggggcgggcgagtggaggccgaggagtccgccggcgctgaggacagctgcggcctggatcctgccgggagccaaaccgccagggccgagggcatgggcgcaatggtggaagctggtggtctactcgagaagtggactttgctggaagaggaggcagtcggatggcaggaaagggagcagcgggaggacagcgaaggcaggtgtggggactatcacccagagggtgaagcgcccaggcttttggatgctgaagggttgatggtgactggtgggcgccgagcagaggctaaggagacagaacccgaatcacttgagcatgtcaggggtcaggaggagcagcctacccatcaggccccggcagaagctgcaccggaaagcgtgggcgaagcggagaccgcagaggcaatggggagcgcgcgcggcggtgctgctaactcttggagcgaggcaccgctgcccgggagccttctggacgtatccgttcctaggtcccgcgtgcaccttagcaggtcctctagtcagcgacgctcacgaccctcatttagaaggacacccgcatgggaacagcaagaggagcccccagcccctaaccctcccgaggaggagctgtccgctcctgaacagcgaccgctgcagttagaggaaccactggagcccagcccattaagacatgacggaactccagtccccgccagaaggcgcccactgggccacggctttggcctggcccacccgggcatgatgcaagaactccaggctagacttggccgacctaagccccagtag

SEQ ID NO: 199668 - DNA, 3220 bp, Artificial Sequence
  derived and/or modified sequence
gacagacaggatggacttcctccggctatacctccctgggctgcaccaggccttgaggggggcactggattccctcggcacctttgtctcctacctcctgggagatgcagtccccactgtagagcgggaggcgcaggcggctgaggaactgggggtggtggcggtgggaaagacagggaagattgtagaggaggaagcccaggaggacctggagggccttagaggcagccaaaacgagggggctggaaggctgagagggcctggagatgacagaagacatgaagtggggagctcagctgtagaacagacctggggctggggagatggcagctcccatgggtcccaagcagagaggcaggacagtggggctggggagacagccaaggctgccaggtgccaggagccaagcgcccacttggaggccagaaagaaatccaaggcagggtctggggcttgccaagacaggagcggccaagcccaggagaggcaggagtcccatgagcaggaagtgaacagagaagagaggctgagaagctgggaacaggaggaggaggaggaagaggtcagggcaagagagccagggatggccagaggggcggagtcagagtggacctggcatggggagacggaggggaaggctggtgctgttgggccaaaggcggcaggggacaaccgggagatggagcagggggtcagggaggcagatgcaggggaaactgaggagcctggggccgaaggggctgggaaaggagaagaggtggtagtggtggagaaggcctgtgaaagcactagggcatgggggacgtggggcccaggggcagagcctgaggactggggaatcttaggcagagaggaggccaggacaaccccaggtagggaagaggccagggcaattttagatggggaggaagccaggacaatctcaggcggggaggaggctgagacagcctcaggcggggaggaggctgaaacagcctcaggcggggaggaggccgggacagcctcgggaggggaggaggccgggatagcctcaggcggggaggctgggacagcctcaggaggggaggaggccgggacagcctcaggaggggacgaggcctggacaacctcaggcaaagaggaggctgacctgctgggagtcagacagacagaatatggagcagtcccaggagaaaggctcctagaggctactggaaaagtctgggtcctagaggaggagggggatgaggagagagaggctgaggtgagccctttccccaaacagccccaggtcctgggcactgaaagaacagaagaggctgctgagagccagaccgcagggagggaagctgtgggaggccaggaggcaggggagagctttgagggccaggtagacctgcgtggtaaggaggctgagatgaggcaggacttggggatcagggccgaccgggccaggatggaagagctggtacaggcagaggaggcccaggaggagagagggagcagcagggatccagtggctgagctgccctcagatggagaggctgaaggcactgccgacttggaggcaactccagaggccaggcctgaggaggagctcacaggggaggagagtgaggcggcccagactagctgtggcctactgggcgtggaatggggtggcctcacacacagcgtcaccaaaggccaaggacctgagctgatggggggcgcccagaccccaactaagcaacccgaggaaagggaggcaggggaggtggagctcatgggagttctggccctgagcaaagaggagcaggagaggagcctggaggcaggtcccaggcacgcggggtctgtaaagcctgaggcctccgaggccttcccaggagcctgggaaaaccgcacgagaaaggacatggagagaggaaatactcaggaggatgcggccgatggcgagcagcgggaggaggaggagactgcgggaggccagaccctggcggctgaggctgaaggagaccgagagtctgaactatcagaagtcccagaggcaggcggggaggggctgacaacccaggacgcgggatgtggaactgaggagggagaggcatctgtctcagagaaccaggagctggacggaagcacaggggcagacgcagggccttgcccgtcactgggagaggcctatgccagagaaactgaggatgaggaggcggaggctgacagaacatccagaagaggctggaggctgcaagcggtggctgtgggcctcccggaccgtgaggatgcacagactggctctgtggctgctgggattatggggggtgatgtggtcccacacatcagcgctgctggcgctggtgaagctttggaaggggtgcttgggcaaggctgggactcgaaagaaaaggaagaggcagcagcaggagagcatgcaggtgggcaagaatttggtctggagggctcagcagaggaagaggtgactggcagaggcagccaagtagaggcttttgagtccagggagggaggaccttggggagggcgggtagaggccgaggaatctgcaggcgcagaggacagctgtgggctggatcccgcgggctcccagacagcgagggcagaggggatgggagccatggtggaggctggggggcttctagaaaagtggacgctgttggaagaagaggctgttggatggcaggagagagaacagagggaagacagtgaggggcggtgtggggactaccaccctgagggagaggcaccaaggctccttgatgcagagggtctcatggtgaccgggggccggagggcagaggccaaggagactgagccagaaagcctggaacatgtcaggggccaggaggagcagccaacacaccaggcccctgcagaagctgcgccggagtcagtcggggaagccgagacggctgaggccatgggcagtgccagaggaggtgctgccaacagctggagcgaggccccgctccccgggtccctcctagacgtctctgtcccaaggagtcgcgtgcacctctcgagaagctcctcacagcgtcgctcccggccctcttttcgtcggactccggcctgggagcagcaggaggagcccccagcccccaaccctcctgaggaggagctgtcagctcctgagcagagacccctccagctggaggaacccctggagccaaggtgggaggatcgcttgagaccaggagttcgagaccagcctgggcagcatagcaagatccccatcttttaa

SEQ ID NO: 199669 - DNA, 3414 bp, Artificial Sequence
  derived and/or modified sequence
gacagacaggatggacttcctccggctatacctccctgggctgcaccaggccttgaggggggcactggattccctcggcacctttgtctcctacctcctgggagatgcagtccccactgtagagcgggaggcgcaggcggctgaggaactgggggtggtggcggtgggaaagacagggaagattgtagaggaggaagcccaggaggacctggagggccttagaggcagccaaaacgagggggctggaaggctgagagggcctggagatgacagaagacatgaagtggggagctcagctgtagaacagacctggggctggggagatggcagctcccatgggtcccaagcagagaggcaggacagtggggctggggagacagccaaggctgccaggtgccaggagccaagcgcccacttggaggccagaaagaaatccaaggcagggtctggggcttgccaagacaggagcggccaagcccaggagaggcaggagtcccatgagcaggaagtgaacagagaagagaggctgagaagctgggaacaggaggaggaggaggaagaggtcagggcaagagagccagggatggccagaggggcggagtcagagtggacctggcatggggagacggaggggaaggctggtgctgttgggccaaaggcggcaggggacaaccgggagatggagcagggggtcagggaggcagatgcaggggaaactgaggagcctggggccgaaggggctgggaaaggagaagaggtggtagtggtggagaaggcctgtgaaagcactagggcatgggggacgtggggcccaggggcagagcctgaggactggggaatcttaggcagagaggaggccaggacaaccccaggtagggaagaggccagggcaattttagatggggaggaagccaggacaatctcaggcggggaggaggctgagacagcctcaggcggggaggaggctgaaacagcctcaggcggggaggaggccgggacagcctcgggaggggaggaggccgggatagcctcaggcggggaggctgggacagcctcaggaggggaggaggccgggacagcctcaggaggggacgaggcctggacaacctcaggcaaagaggaggctgacctgctgggagtcagacagacagaatatggagcagtcccaggagaaaggctcctagaggctactggaaaagtctgggtcctagaggaggagggggatgaggagagagaggctgaggtgagccctttccccaaacagccccaggtcctgggcactgaaagaacagaagaggctgctgagagccagaccgcagggagggaagctgtgggaggccaggaggcaggggagagctttgagggccaggtagacctgcgtggtaaggaggctgagatgaggcaggacttggggatcagggccgaccgggccaggatggaagagctggtacaggcagaggaggcccaggaggagagagggagcagcagggatccagtggctgagctgccctcagatggagaggctgaaggcactgccgacttggaggcaactccagaggccaggcctgaggaggagctcacaggggaggagagtgaggcggcccagactagctgtggcctactgggcgtggaatggggtggcctcacacacagcgtcaccaaaggccaaggacctgagctgatggggggcgcccagaccccaactaagcaacccgaggaaagggaggcaggggaggtggagctcatgggagttctggccctgagcaaagaggagcaggagaggagcctggaggcaggtcccaggcacgcggggtctgtaaagcctgaggcctccgaggccttcccaggagcctgggaaaaccgcacgagaaaggacatggagagaggaaatactcaggaggatgcggccgatggcgagcagcgggaggaggaggagactgcgggaggccagaccctggcggctgaggctgaaggagaccgagagtctgaactatcagaagtcccagaggcaggcggggaggggctgacaacccaggacgcgggatgtggaactgaggagggagaggcatctgtctcagagaaccaggagctggacggaagcacaggggcagacgcagggccttgcccgtcactgggagaggcctatgccagagaaactgaggatgaggaggcggaggctgacagaacatccagaagaggctggaggctgcaagcggtggctgtgggcctcccggaccgtgaggatgcacagactggctctgtggctgctgggattatggggggtgatgtggtcccacacatcagcgctgctggcgctggtgaagctttggaaggggtgcttgggcaaggctgggactcgaaagaaaaggaagaggcagcagcaggagagcatgcaggtgggcaagaatttggtctggagggctcagcagaggaagaggtgactggcagaggcagccaagtagaggcttttgagtccagggagggaggaccttggggagggcgggtagaggccgaggaatctgcaggcgcagaggacagctgtgggctggatcccgcgggctcccagacagcgagggcagaggggatgggagccatggtggaggctggggggcttctagaaaagtggacgctgttggaagaagaggctgttggatggcaggagagagaacagagggaagacagtgaggggcggtgtggggactaccaccctgagggagaggcaccaaggctccttgatgcagagggtctcatggtgaccgggggccggagggcagaggccaaggagactgagccagaaagcctggaacatgtcaggggccaggaggagcagccaacacaccaggcccctgcagaagctgcgccggagtcagtcggggaagccgagacggctgaggccatgggcagtgccagaggaggtgctgccaacagctggagcgaggccccgctccccgggtccctcctagacgtctctgtcccaaggagtcgcgtgcacctctcgagaagctcctcacagcgtcgctcccggccctcttttcgtcggactccggcctgggagcagcaggaggagcccccagcccccaaccctcctgaggaggagctgtcagctcctgagcagagacccctccagctggaggaacccctggagccaagccctctgaggcatgatgggaccccggtgccagccaggagaaggcccctgggacacgggtttggcctcgcgcaccctggcatgatgcaggagctgcaagcccgtctgggccggcctaagccccagtgactgagacccggtgctctgggagccaggccctgagtgggtgccagaaggcttgctccaatgccactgagccctgctccctctgccactgtggacacatcctctccaccctctgggcctcagtgtcttgatgtatcatt

SEQ ID NO: 199670 - DNA, 3792 bp, Artificial Sequence
  derived and/or modified sequence
agctttctggacacacagacagagacagacaggatggacttcctccggctatacctccctgggctgcaccaggccttgaggggggcactggattccctcggcacctttgtctcctacctcctgggagatgcagtccccactgtagagcgggaggcgcaggcggctgaggaactgggggtggtggcggtgggaaagacagggaagattgtagaggaggaagcccaggaggacctggagggccttagaggcagccaaaacgagggggctggaaggctgagagggcctggagatgacagaagacatgaagtggggagctcagctgtagaacagacctggggctggggagatggcagctcccatgggtcccaagcagagaggcaggacagtggggctggggagacagccaaggctgccaggtgccaggagccaagcgcccacttggaggccagaaagaaatccaaggcagggtctggggcttgccaagacaggagcggccaagcccaggagaggcaggagtcccatgagcaggaagtgaacagagaagagaggctgagaagctgggaacaggaggaggaggaggaagaggtcagggcaagagagccagggatggccagaggggcggagtcagagtggacctggcatggggagacggaggggaaggctggtgctgttgggccaaaggcggcaggggacaaccgggagatggagcagggggtcagggaggcagatgcaggggaaactgaggagcctggggccgaaggggctgggaaaggagaagaggtggtagtggtggagaaggcctgtgaaagcactagggcatgggggacgtggggcccaggggcagagcctgaggactggggaatcttaggcagagaggaggccaggacaaccccaggtagggaagaggccagggcaattttagatggggaggaagccaggacaatctcaggcggggaggaggctgagacagcctcaggcggggaggaggctgaaacagcctcaggcggggaggaggccgggacagcctcgggaggggaggaggccgggatagcctcaggcggggaggctgggacagcctcaggaggggaggaggccgggacagcctcaggaggggaggaggccgggacagcctcaggaggggacgaggcctggacaacctcaggcaaagaggaggctgacctgctgggagtcagacagacagaatatggagcagtcccaggagaaaggctcctagaggctactggaaaagtctgggtcctagaggaggagggggatgaggagagagaggctgaggtgagccctttccccaaacagccccaggtcctgggcactgaaagaacagaagaggctgctgagagccagaccgcagggagggaagctgtgggaggccaggaggcaggggagagctttgagggccaggtagacctgcgtggtaaggaggctgagatgaggcaggacttggggatcagggccgaccgggccaggatggaagagctggtacaggcagaggaggcccaggaggagagagggagcagcagggatccagtggctgagctgccctcagatggagaggctgaaggcactgccgacttggaggcaactccagaggccaggcctgaggaggagctcacaggggaggagagtgaggcggcccagactagctgtggcctactgggcgtggaatggggtggcctcacacacagcgtcaccaaaggccaaggacctgagctgatggggggcgcccagaccccaactaagcaacccgaggaaagggaggcaggggaggtggagctcatgggagttctggccctgagcaaagaggagcaggagaggagcctggaggcaggtcccaggcacgcggggtctgtaaagcctgaggcctccgaggccttcccaggagcctgggaaaaccgcacgagaaaggacatggagagaggaaatactcaggaggatgcggccgatggcgagcagcgggaggaggaggagactgcgggaggccagaccctggcggctgaggctgaaggagaccgagagtctgaactatcagaagtcccagaggcaggcggggaggggctgacaacccaggacgcgggatgtggaactgaggagggagaggcatctgtctcagagaaccaggagctggacggaagcacaggggcagacgcagggccttgcccgtcactgggagaggcctatgccagagaaactgaggatgaggaggcggaggctgacagaacatccagaagaggctggaggctgcaagcggtggctgtgggcctcccggaccgtgaggatgcacagactggctctgtggctgctgggattatggggggtgatgtggtcccacacatcagcgctgctggcgctggtgaagctttggaaggggtgcttgggcaaggctgggactcgaaagaaaaggaagaggcagcagcaggagagcatgcaggtgggcaagaatttggtctggagggctcagcagaggaagaggtgactggcagaggcagccaagtagaggcttttgagtccagggagggaggaccttggggagggcgggtagaggccgaggaatctgcaggcgcagaggacagctgtgggctggatcccgcgggctcccagacagcgagggcagaggggatgggagccatggtggaggctggggggcttctagaaaagtggacgctgttggaagaagaggctgttggatggcaggagagagaacagagggaagacagtgaggggcggtgtggggactaccaccctgagggagaggcaccaaggctccttgatgcagagggtctcatggtgaccgggggccggagggcagaggccaaggagactgagccagaaagcctggaacatgtcaggggccaggaggagcagccaacacaccaggcccctgcagaagctgcgccggagtcagtcggggaagccgagacggctgaggccatgggcagtgccagaggaggtgctgccaacagctggagcgaggccccgctccccgggtccctcctagacgtctctgtcccaaggagtcgcgtgcacctctcgagaagctcctcacagcgtcgctcccggccctcttttcgtcggactccggcctgggagcagcaggaggagcccccagcccccaaccctcctgaggaggagctgtcagctcctgagcagagacccctccagctggaggaacccctggagccaagccctctgaggcatgatgggaccccggtgccagccaggagaaggcccctgggacacgggtttggcctcgcgcaccctggcatgatgcaggagctgcaagcccgtctgggccggcctaagccccagtgactgagacccggtgctctgggagccaggccctgagtgggtgccagaaggcttgctccaatgccactgagccctgctccctctgccactgtggacacatcctctccaccctctgggcctcagtgtcttgatgtatcattcatggagcaggcaaaaccagacgtctgggaagaccgtgaacttaaggagtctgattctccgacacaggctggtggaccacctaccccactgagaccacctctcagggtgcctgccctggttcctccccagcctgagtcagctgtctggactgcaaggaggctgggcacgggggctcacgcctgtcaccccagagctttgggaggccaaggtgggaggatcgcttgagaccaggagttcgagaccagcctgggcagcatagcaagatccccatcttttaaaaacaaaataaaacaataaagactgcaaggaagactgagggaacagcga

SEQ ID NO: 199671 - DNA, 3210 bp, Artificial Sequence
  derived and/or modified sequence
atggattttttgcggctctaccttcctggtctgcaccaggccctgaggggtgcccttgactcgttgggcacattcgtatcatacctattaggggatgctgttccaaccgtggaaagagaggcccaggctgctgaggagctgggtgtcgtggcagtgggcaaaacggggaagattgtggaggaggaagcccaagaagaccttgaaggtcttcgaggatctcagaatgaaggagctggcaggctccggggacctggggatgatagacggcatgaggtgggcagcagtgcagtagaacagacatggggatggggagatggatctagccacggctctcaagcagagcgtcaagacagtggagccggtgagaccgccaaggccgctcgctgtcaagagccaagcgcacaccttgaagccagaaaaaaaagtaaggccggatccggcgcttgtcaggatagatccggacaggcacaggagcgacaggaatcacacgagcaggaggtgaatcgcgaagagcgattgcgaagctgggagcaagaggaggaggaggaggaggttcgcgcacgtgagcctgggatggctaggggagctgagtcggagtggacgtggcatggcgagaccgaaggtaaggccggtgccgtcgggccaaaagcggctggtgataaccgggagatggagcaaggagtgcgggaagcagacgcaggcgagacagaagaacctggagccgagggggcaggtaagggtgaggaagttgtggtggtcgagaaggcatgtgagtcaacacgagcatggggcacttgggggcctggcgctgagcctgaagactggggcatcctggggcgtgaggaggctagaactaccccgggacgggaagaagccagagccatactggacggggaagaagctaggacgatttcgggaggcgaagaagctgaaacagcctctggcggtgaagaggccgagaccgcttcaggaggtgaggaagcaggaaccgcttccggcggagaggaggccggtatcgcttctggaggggaggcaggaaccgcttcagggggagaggaggccggaactgcctcaggtggcgatgaggcttggacaaccagcggcaaggaggaagccgatctgctgggcgtgagacagacggaatatggggctgtgcctggcgaaagactcctggaggctaccggtaaggtctgggtgctcgaggaggagggggacgaagagcgcgaagctgaggtgtctccctttcccaagcagccccaagtcctcggcacggaaaggacagaggaggctgctgagtcacagaccgcgggacgagaggctgtcggcggacaggaggctggcgagtcttttgaggggcaggtggatcttagggggaaggaggctgagatgcggcaggacctggggatccgcgcagatcgggctcgcatggaggagctggtccaagcagaggaagcgcaggaggaacgcggatcttctagggatcctgtggcagagttgcccagtgatggcgaggccgagggcaccgccgacctggaagctacacctgaggcgagacccgaagaagagctcacgggagaggaatccgaggctgcgcagacatcttgtggactgctcggagtggaatggggaggccttacacacagcgtgacgaagggacagggacccgagctaatgggcggtgcgcagacccccaccaagcagccagaagaacgcgaggctggagaggtggaacttatgggcgtgctggctctgtctaaggaagaacaggagcggagtctggaagctggccctcgacatgccggatcggtgaagcctgaagcgtccgaagctttccctggtgcttgggaaaaccgaaccagaaaagacatggagagggggaacacacaggaggatgcggctgatggcgagcagcgggaggaagaagagacggcaggagggcagactcttgcggctgaagccgaaggcgaccgcgagtctgagctgtccgaagtgcctgaggccggaggagagggcctgacgacacaagatgcaggctgtggtacggaagaaggcgaggctagtgtatccgaaaaccaagaactcgacggctccaccggagccgatgcaggtccgtgcccgagcctgggcgaagcttatgccagggaaacggaggacgaagaggccgaagcagaccggactagccgcaggggctggagactgcaagcagtggcggtgggcctgcccgacagggaagacgcccagacaggcagcgtagccgctgggatcatgggcggtgacgttgtgcctcacataagcgctgctggtgccggtgaggccctggaaggagtgctaggacaggggtgggattcaaaggagaaggaggaagccgctgctggtgaacacgcaggcggacaagagtttggcctcgaaggatcagctgaagaggaggtcaccggacgcggtagccaggttgaggccttcgagtcgagagaagggggtccctggggcggaagggtcgaagctgaagaaagtgctggtgcagaagactcatgcggcctcgatcccgcaggatcccagacggcacgggctgagggtatgggcgctatggtcgaagctgggggactccttgagaaatggaccctgctcgaggaggaagccgtcgggtggcaggaacgagagcaaagagaggactctgaggggaggtgcggtgattaccatccagaaggagaagctcccagactcctggatgccgagggtttgatggtcactggcggacgcagagccgaggcgaaggagacagagcccgaaagcctggaacatgttcggggtcaggaagaacaacctacacaccaggccccagctgaggcggcacccgagtcagtgggcgaggctgaaactgctgaggcaatggggtctgccagagggggagcagctaattcctggagtgaggcgccactgccagggagtttactcgatgtgagcgtgcctcgcagcagggtgcatttgtcacgaagctcatcccaacgcaggagccggcctagctttaggcgaaccccagcctgggaacagcaggaggagcctccggctcctaaccctccagaagaagaactgagcgccccagaacagcggccactgcagctagaggagccactggagcctagatgggaggatcgcctcagaccaggggtgagggatcagcccggacagcattcaaagatcccgattttctag

SEQ ID NO: 199672 - DNA, 3267 bp, Artificial Sequence
  derived and/or modified sequence
atggactttctgagattgtatttaccaggactccatcaggccctgcgtggagccttggactccctcggcactttcgtctcttatctgttgggcgacgcggtgcccactgtagagcgggaggcacaggcagccgaggagttgggggtcgtggctgtcggcaagactggtaagatcgtcgaagaggaggctcaagaagatcttgagggacttcgtggcagccagaacgaaggcgcaggtcgtttgcgtgggcctggcgacgatcgacgccacgaagtaggatccagcgccgttgagcaaacatggggatggggtgatggcagcagccacggcagtcaggcagagcggcaggatagcggcgctggcgagactgctaaggcggctcggtgccaagaaccaagcgctcatctcgaggcaagaaaaaagtccaaggccggtagtggcgcatgccaggataggagcggccaagcacaggagagacaggagtctcatgaacaggaagtgaacagggaggaacgactgcgcagctgggagcaggaagaggaagaggaggaagttagggctcgcgaacctggcatggccagaggtgccgaaagcgagtggacatggcatggggagactgaggggaaggcaggcgcagtaggtccaaaggccgcaggagataatcgggagatggaacagggcgtgcgagaggctgacgcgggagagaccgaagagccgggagcagaaggggctggcaagggggaagaggttgtagttgtggagaaggcttgcgagtctaccagggcatggggcacctgggggccaggggctgagcccgaagactggggtatcctgggacgggaggaggcacgtaccactcccggtagagaagaagccagggcaattctggacggagaagaagcccgtacaatttccggaggggaggaggccgagacagcctctgggggtgaggaggcagagaccgcatcagggggagaagaagccggtacagctagcggcggagaagaagcaggtattgcttctggcggagaagccggtacagcctcgggcggtgaagaggctggtaccgcatccggaggcgacgaagcctggactacaagcgggaaggaggaggccgacctgctgggggtacggcagactgagtacggagcggtccctggtgaacgcctccttgaagcaaccggaaaggtgtgggtgctggaggaggaaggtgatgaggaaagagaggccgaagtctcccctttcccaaagcaaccacaggtcctgggcaccgaaagaaccgaggaagccgctgagtcacagacagctggcagggaggcggtgggaggccaggaagctggagagagcttcgagggccaagtagaccttaggggaaaagaagcggaaatgcggcaagaccttggtattcgtgctgatcgagccagaatggaagagctcgtgcaggcagaagaagcccaggaagagcggggttcttctagggaccctgtggcagaactgcccagcgacggagaggctgagggcacagcagacctggaggccacacctgaagcccgacccgaggaggagctgaccggggaagaatctgaagcagctcagacttcctgtggcctgctcggagtggaatgggggggtctgacacattctgtgaccaaagggcagggcccagagctgatggggggtgctcagacaccaacaaaacagcctgaagaaagggaggccggagaagtcgagctgatgggcgtgctggcgctgagcaaggaagagcaggaacggtccctggaggctgggccaagacacgctggcagcgtgaagccggaagcttctgaggcgttccctggtgcctgggagaatagaactcggaaggacatggagagggggaacacgcaggaggatgctgccgatggcgagcagcgagaggaagaagaaacagcaggcggacaaacattagccgctgaagccgagggagatcgcgagtcagagctgagtgaagtacccgaggccggaggggagggcctgaccacacaagatgcaggttgcggtacagaggagggcgaggcctccgtttctgagaatcaggaactggatggcagtaccggggcagacgcagggccttgtccaagcctgggcgaggcctatgcaagagaaactgaggatgaggaagcagaagctgacagaaccagcaggagaggctggaggctgcaggccgtggcggtggggctacctgaccgcgaggatgcccaaaccgggtcagtggcagcagggatcatgggcggagacgtggtgcctcacatctccgcagcaggggcaggggaggctctcgagggagttttaggccagggttgggactccaaggagaaagaggaagctgctgcaggagaacacgccggaggacaagagttcggcctcgaaggcagcgccgaggaggaggtcactggaagagggagccaggtggaggctttcgaatctagagagggaggcccatggggcggtagggttgaagctgaagaatcagctggtgccgaggactcctgtggcctagatcctgcgggaagtcaaactgccagagctgagggtatgggggcaatggtggaggctggcggattgcttgagaaatggactttgctggaggaggaggctgtgggctggcaggagagggagcagcgggaggattccgaaggaaggtgcggagattaccatccagagggcgaagctccccgattgctggacgctgaggggcttatggtgaccggaggaagacgagccgaggccaaagaaacggaacctgagagtctagagcacgtccgcggtcaagaggagcaacccacacaccaagcccctgctgaggcagctcccgaatccgtaggcgaggcagaaacagccgaagcgatgggctcggcaagagggggtgcagccaattcttggtcggaggcaccacttcccggtagtctgcttgatgtatccgtgccaagaagtagggtgcaccttagccggtccagcagccagaggagaagtcgcccatcttttaggcgaacaccggcatgggaacagcaagaagagcctcctgcaccgaaccctcccgaggaagagttgtctgctcccgagcaaaggccactccaactcgaggagcctctggagccgagccccctgagacacgatgggactcccgtgcctgccaggaggcgccctctggggcatggcttcgggcttgcacacccaggaatgatgcaggagcttcaggccaggttgggaaggccaaagcctcagtag

SEQ ID NO: 199673 - DNA, 3294 bp, Artificial Sequence
  derived and/or modified sequence
atggattttcttcgcctttatctgccgggtttacaccaggccctgaggggggctctggacagtctaggcactttcgtgtcttatctcctgggggacgcggtgcctactgtggagagagaagctcaggctgcagaggaactgggagtggtcgcagtggggaagacaggaaagattgtcgaagaagaagcacaggaggatttggaaggcttgaggggaagccagaacgagggcgcaggtagactgaggggcccaggcgatgatcgtagacacgaagtagggtcttctgccgtagaacagacgtgggggtggggcgacggcagtagccacggtagtcaggccgaacgacaggattccggggcaggcgaaaccgcaaaagccgcacggtgtcaggagcctagtgcccatctagaagcacggaaaaagagtaaggcaggtagcggagcctgtcaggaccggtcggggcaggctcaggagcggcaagagtcacacgagcaggaagtcaatcgggaggaacggctcagaagctgggaacaagaggaggaagaagaggaggtgagagccagagagcccggaatggcacggggagccgagtctgaatggacctggcacggagaaaccgagggaaaagccggagccgtcgggcctaaagcagccggagacaacagggaaatggagcagggcgtgagagaggcagatgcaggagaaactgaagagcctggggctgaaggtgcaggaaagggagaggaggtcgtcgtagtggagaaggcctgcgagtctacccgcgcatggggcacttggggacctggcgcagaacccgaggattggggcatcctgggtagagaggaggctcgcacaacccctggacgtgaggaggctcgggcaatcctggatggtgaagaagcgaggacaatttccggtggcgaagaagcagagaccgcatccgggggtgaagaggccgagactgcgtccggcggtgaggaagccggaaccgcaagcggcggtgaggaagctggtattgctagcggcggagaggccggaaccgctagcggtggcgaagaggccggtacagcctctggcggtgaggaggcaggtaccgcctctggtggtgacgaagcgtggacaacaagcgggaaagaagaggccgacctgctgggagtgaggcagacagagtatggtgcagtcccaggtgagcgactactcgaagctactggaaaagtatgggtgctggaggaagaaggtgacgaggagcgggaggccgaggtctcaccatttcctaaacaacctcaggtactggggacagagagaactgaagaggcggcagaatctcagacagccggaagagaggccgtgggcggacaggaggctggcgaatcctttgaggggcaggtggatctgcgcggtaaggaggcagagatgcgccaggatttaggcataagagccgacagagccagaatggaagaactcgtgcaggcagaagaggcccaagaagaaagaggctcaagtcgcgacccagtcgctgagctgccgtcagacggagaggctgagggaacagcggacctggaagccacgcccgaggctcgacctgaggaggagctaactggtgaggaatccgaagctgcgcagacctcctgcgggctgctcggagtcgaatgggggggacttactcactctgtaactaaaggtcagggacccgagctgatggggggtgctcaaacccccacaaagcagcctgaggagcgggaggccggagaggtagaactaatgggtgtgcttgctttgagtaaggaggaacaggaaaggtcactcgaggctggcccacgtcatgccggaagcgtcaagccagaagcgagcgaggcttttcctggcgcatgggagaatcggacacggaaggacatggaacgcggaaacacccaggaggatgctgccgacggtgaacaacgcgaggaggaagaaaccgcaggcggacagaccctcgcggcagaggcagaaggagatagagagtctgaactttcagaggtgccggaggcagggggtgagggactgactacccaagacgctggctgtggcaccgaagaaggtgaagctagtgtgtccgaaaaccaggaactggatgggagcaccggagcggatgccggtccatgtccgtcactgggggaggcctatgcacgggagaccgaggacgaagaagccgaggcagaccgtacctctcgtagagggtggcgcttacaggccgtcgcagtgggtctccccgacagggaagatgctcagactggcagcgtcgcagccggaataatgggcggagatgtggtgccccacatcagcgcggcaggggcaggcgaggcactggagggcgtactggggcagggctgggattccaaggagaaagaggaagcagctgctggagagcatgccggtggacaggagttcggactggagggatccgctgaagaggaggtaacagggaggggatcccaagttgaggcgtttgagagtcgcgagggcggaccatggggcggacgggtcgaggcagaggagagcgccggtgctgaggactcgtgcgggttagatcctgccggaagtcaaactgcacgggcagaagggatgggcgctatggtagaggccggtggcctactggagaaatggaccctgttagaagaagaagccgtgggttggcaagagcgtgagcaacgggaagactccgagggcagatgcggagactatcaccctgaaggcgaggctcccagacttcttgacgccgaaggcctcatggtgactgggggacgccgagccgaagctaaagaaactgagcctgagagcctggaacacgtgcgcggtcaggaggagcaacccacacaccaagcccctgcagaagctgcccctgaatctgttggcgaagccgagaccgccgaagcgatggggagcgctcgagggggtgccgcaaattcctggagcgaagcaccgctgcccggtagtcttttagatgtgagcgtaccgcgaagtcgagttcacctgtctaggagtagctctcagagacgatctagaccatctttccgcaggacgcctgcctgggaacaacaagaggagccaccagccccaaatcctcccgaggaggagctgagtgctcctgagcagcggcctctccaactggaggagccgctggagccctccccccttaggcacgacggcacacctgtgccggcacgccgtcggccactgggacatggtttcggcttggcacacccgggtatgatgcaggaattacaggccaggttagggcgaccaaagccccaatag

SEQ ID NO: 199674 - protein, 1371 aa, Artificial Sequence
  derived and/or modified sequence
MTTKRSLFVRLVPCRCLRGEEETVTTLDYSHCSLEQVPKEIFTFEKTLEELYLDANQIEELPKQLFNCQSLHKLSLPDNDLTTLPASIANLINLRELDVSKNGIQEFPENIKNCKVLTIVEASVNPISKLPDGFSQLLNLTQLYLNDAFLEFLPANFGRLTKLQILELRENQLKMLPKTMNRLTQLERLDLGSNEFTEVPEVLEQLSGLKEFWMDANRLTFIPGFIGSLKQLTYLDVSKNNIEMVEEGISTCENLQDLLLSSNSLQQLPETIGSLKNITTLKIDENQLMYLPDSIGGLISVEELDCSFNEVEALPSSIGQLTNLRTFAADHNYLQQLPPEIGSWKNITVLFLHSNKLETLPEEMGDMQKLKVINLSDNRLKNLPFSFTKLQQLTAMWLSDNQSKPLIPLQKETDSETQKMVLTNYMFPQQPRTEDVMFISDNESFNPSLWEEQRKQRAQVAFECDEDKDEREAPPREGNLKRYPTPYPDELKNMVKTVQTIVHRLKDEETNEDSGRDLKPHEDQQDINKDVGVKTSESTTTVKSKVDEREKYMIGNSVQKISEPEAEISPGSLPVTANMKASENLKHIVNHDDVFEESEELSSDEEMKMAEMRPPLIETSINQPKVVALSNNKKDDTKETDSLSDEVTHNSNQNNSNCSSPSRMSDSVSLNTDSSQDTSLCSPVKQTHIDINSKIRQEDENFNSLLQNGDILNSSTEEKFKAHDKKDFNLPEYDLNVEERLVLIEKSVDSTATADDTHKLDHINMNLNKLITNDTFQPEIMERSKTQDIVLGTSFLSINSKEETEHLENGNKYPNLESVNKVNGHSEETSQSPNRTEPHDSDCSVDLGISKSTEDLSPQKSGPVGSVVKSHSITNMEIGGLKIYDILSDNGPQQPSTTVKITSAVDGKNIVRSKSATLLYDQPLQVFTGSSSSSDLISGTKAIFKFDSNHNPEEPNIIRGPTSGPQSAPQIYGPPQYNIQYSSSAAVKDTLWHSKQNPQIDHASFPPQLLPRSESTENQSYAKHSANMNFSNHNNVRANTAYHLHQRLGPARHGEMWAISPNDRLIPAVTRSTIQRQSSVSSTASVNLGDPGSTRRAQIPEGDYLSYREFHSAGRTPPMMPGSQRPLSARTYSIDGPNASRPQSARPSINEIPERTMSVSDFNYSRTSPSKRPNARVGSEHSLLDPPGKSKVPRDWREQVLRHIEAKKLEKMPLSNGQMGQPLRPQANYSQIHHPPQASVARHPSREQLIDYLMLKVAHQPPYTQPHCSPRQGHELAKQEIRVRVEKDPELGFSISGGVGGRGNPFRPDDDGIFVTRVQPEGPASKLLQPGDKIIQANGYSFINIEHGQAVSLLKTFQNTVELIIVREVSS

SEQ ID NO: 199675 - DNA, 4023 bp, Artificial Sequence
  derived and/or modified sequence
atgactacaaaaaggtccctgtttgtgcgcctcgtcccgtgcagatgtcttaggggagaggaagaaactgtcacgacattggactattcacattgctccttagaacaggtgcctaaggaaatcttcacctttgagaagacccttgaggagctctatctggatgcgaatcagatcgaagaactaccgaaacagcttttcaattgccagagtctgcataaattatccctcccagacaacgatttgacaaccctacccgcctctatcgctaatcttatcaatctccgcgaactggatgttagcaaaaacggaatccaggagtttcccgagaatataaagaattgcaaggtactgactatcgtggaggcctctgtgaatcccatatccaagttaccagacggattttcacagctgctgaatctcactcagctgtatttgaacgatgcttttctggagttcctgccagcaaattttggtagactgacaaagctgcaaattctcgaactgagggagaatcaattaaagatgctgcctaagacgatgaatagactgactcaattagagcgcttggatctaggatccaacgagtttaccgaggttccagaggtgctagaacagctgtccggactcaaagaattctggatggacgccaaccgattgacattcattcccggcttcatcgggtccctgaagcagctgacctaccttgacgttagcaaaaataatatcgaaatggtcgaggaagggataagcacttgcgagaacctgcaggacctactcttatctagcaactcactccaacagctaccagaaaccatcggatccctaaaaaatatcacaactctcaagattgatgagaatcagctgatgtacctacccgacagcatcggcggccttatctccgtagaagagctggattgctccttcaatgaggtagaggcacttcctagcagtatcggacagctgaccaacttgaggacttttgctgcagaccacaattacctccagcaactccccccagagatcggctcctggaagaatatcaccgtgctttttctccacagtaacaagctggagactctccctgaggagatgggggatatgcagaagctgaaggtgattaatctcagcgacaaccgcctgaaaaaccttccatttagcttcaccaaactgcagcagctgacagccatgtggctgagtgataatcagagtaagccactgattcccctacagaaggaaaccgactcagagacccagaaaatggttctgacgaattacatgttccctcagcagccacgtactgaagacgtgatgttcatttcagacaacgaatcatttaacccatccctgtgggaggagcagagaaagcagagggcacaggtcgctttcgaatgcgacgaggataaggacgagcgcgaggctccaccccgagaggggaatcttaaacggtatccaaccccttacccagacgagctgaaaaatatggtgaagaccgtgcagactatcgtgcacagattgaaagatgaggaaaccaacgaggatagcgggagggatttgaaacctcatgaggaccaacaggacattaacaaagacgtcggggttaagacaagtgagtctaccaccactgtgaagagcaaagtcgatgagcgagaaaaatacatgattggaaactccgttcagaaaatttcagaacctgaagctgagattagcccgggatcactgcccgtgacagccaacatgaaagcgtcagagaacctcaagcatattgtgaatcacgacgatgtctttgaggagagcgaagaactgtcttctgacgaggagatgaagatggcggaaatgcgtccacctcttatcgagacatccattaatcagcccaaagtggtggccctgtctaataataaaaaagacgatacaaaagagactgactcccttagtgacgaagtcactcacaacagcaaccaaaacaactccaactgttcctccccaagccggatgagtgatagcgtgtcactgaatacagacagttctcaggataccagcctctgctcacctgtgaaacaaactcacatcgatatcaactctaagattcgtcaggaagatgagaactttaacagcttgctccagaatggtgatatactgaattctagtactgaggagaaattcaaggcccacgataagaaggactttaatctccctgaatacgacctgaatgtcgaagagcgactggtgctgatagagaagagcgttgactcaactgctacggcagacgacactcacaagcttgatcacattaacatgaatctcaacaagcttatcaccaacgatacgttccagcccgagattatggagagaagcaagacacaagacatcgtcttgggcacttcgtttctttccatcaatagcaaagaggagacagagcacctggaaaatggcaataaatatccaaatctggagagcgtgaataaagtcaacggacactcggaggagacctctcagtccccaaatcgcacagagccccacgacagcgactgtagtgtcgaccttgggatctccaagagtaccgaagatctcagcccacaaaagtcagggccggtgggctcagtggtgaagtctcacagtatcactaacatggagatcggcggactgaaaatctatgatatcctctctgataatggaccacagcagccaagtactaccgtaaagattacgtctgcagtcgacgggaaaaatattgtcagaagcaaatccgccacgctgttatatgatcaaccgcttcaggttttcactggcagcagtagcagcagcgacctaataagtggcaccaaagctatctttaagtttgatagtaatcataatccggaagagccgaatataatcaggggcccgacgtccggaccccagtctgccccacagatttacggcccaccccaatacaacatacagtactcttccagcgccgccgtcaaagataccctgtggcactcgaagcagaatccccaaatagatcacgcatctttccctcctcaactcctgccgcgctctgagagcaccgagaaccagtcatatgctaagcacagcgcaaacatgaactttagcaatcacaacaatgtccgcgccaatactgcctaccatctgcatcagcggctgggccccgcgcgccacggcgagatgtgggcaattagcccaaatgatcgtctcatcccagctgtgacccgaagcaccattcagcggcaatccagtgtgtcttcaacagcatcagtgaacctcggagatcccggcagcacaagaagggctcagatcccagagggcgattacttatcttacagagagttccacagtgctggaaggacaccaccgatgatgccggggtcacagcgacctctgtctgcccgaacctatagcatcgatggcccaaatgcttcgcgcccccaaagtgctagaccctccatcaatgagatccccgaaagaactatgtcagttagcgactttaattattctagaacgtctcccagtaaacgccctaatgccagagtggggtcagaacactccctactggacccacctgggaaatctaaagtgcccagagactggcgcgagcaggtgctgcgccacattgaggccaagaaactcgagaaaatgcctctgtccaacggccagatggggcagcccttgcggccacaggccaattacagtcagattcatcatccgccacaggcatctgtggccaggcacccctcccgtgagcagctgatcgactacctcatgctaaaagtggcgcatcagccaccctatacacaaccacactgttcaccacgccaaggccacgagcttgcaaagcaagagggaatcttcgtcactcgggtgcagccggagggcccggcttccaaacttctccaacccggcgataagataatccaggccaatggctatagctttatcaatattgaacacggacaggcagtaagcttgctgaaaacattccaaaacaccgtcgagctgattattgtacgcgaggtttcttcttag

SEQ ID NO: 199676 - DNA, 4083 bp, Artificial Sequence
  derived and/or modified sequence
atgaccactaagaggtctctgttcgtcaggctggtaccgtgtcgctgcctgagaggggaggaggaaactgtgaccaccttagactattcccactgctcgctggaacaggtccccaaggagatcttcacatttgaaaagacactggaggaactgtatctggatgcaaaccagatagaggagcttcctaagcagctcttcaactgtcaaagtctgcacaaactgtcactcccagacaacgatcttactactctacccgcgtctatcgcaaacttgatcaacttaagagagctggacgtctcaaagaatggcatccaggaatttccggagaacattaagaactgcaaggtgctgaccattgtggaagccagcgtaaatcccattagcaaattgccagacggcttctcccagctgttaaacctcacgcaattgtatttgaatgacgccttcttggagtttttacccgcgaactttggtaggctcacgaagctgcagatcttggagctccgggagaatcagttaaagatgcttccaaaaaccatgaatcggctgacccagctggaacgcctggaccttgggtccaacgagtttacagaagtgcccgaagtgctggaacagctgtcgggactgaaagagttttggatggacgccaataggctaacatttattcccggattcattggaagcctgaagcagctgacctatttggatgtcagcaaaaataatattgaaatggtggaggaagggatatccacatgcgagaatcttcaggatctcctcctctcctcgaattcccttcagcaactgcccgagaccattgggtccctcaaaaacattactactctgaagatcgatgagaaccaactgatgtacctgcctgatagtatagggggtttaatcagcgtggaagaacttgactgctcgttcaatgaagtggaggccctgccctcttcgatcggacagctcaccaacctgaggaccttcgccgccgaccataactatctgcagcagctgccgccagaaatcggttcctggaaaaatatcacagtgctttttctgcacagcaataaacttgagaccctgcccgaggagatgggggacatgcaaaagctcaaagtgattaacctttctgataataggctgaaaaatctcccttttagcttcactaagctacagcagcttaccgcaatgtggctcagcgacaaccaatcaaagcctctgattcctctgcaaaaggaaaccgactcggaaacccaaaaaatggtgctaacaaactacatgtttcctcaacagcctagaaccgaagatgttatgtttatttccgataatgaaagtttcaacccttctctatgggaagaacagagaaaacagagggcgcaggtggcattcgagtgtgatgaagataaggatgaaagagaagctcctcctcgtgaggggaatctgaaacggtacccgaccccataccctgatgagctgaaaaatatggtgaaaacagtgcagacaattgttcataggctaaaagatgaggaaacgaacgaggattcaggacgagatcttaagccccatgaggaccaacaggacatcaacaaagatgttggagtcaagacatcagagagcaccaccacggtgaagtccaaggtagacgagcgcgaaaaatacatgattggaaacagcgtgcagaagatttcagaacctgaagcagaaatctccccagggtctctccccgtaaccgccaacatgaaggccagcgagaatctgaaacacatagtaaatcatgacgatgtcttcgaagaatccgaggagctctcttccgatgaagaaatgaagatggccgaaatgcgaccaccgctgattgaaacaagcatcaaccagccaaaggttgtcgcactgtctaacaataagaaagacgatacaaaggaaacggattccctgagcgacgaggttacccacaacagtaaccagaataatagtaattgctcatcacccagccgcatgtctgacagcgtctccctcaatactgatagtagccaggacacctccctgtgctctcccgtcaagcaaacccacatagatattaactcaaagattaggcaagaggacgaaaactttaattccttgctccagaatggagacatcctgaattccagcacagaagaaaagtttaaagctcatgataagaaagatttcaacttgcctgagtacgacctgaacgtagaggagagacttgtgcttatcgagaagagcgtggacagcacggctaccgccgacgacacacacaaacttgatcacatcaatatgaacttgaataagctgattacaaacgataccttccagcccgaaatcatggagagatcaaaaacgcaggacatagtgctgggtactagtttcctcagcatcaatagcaaagaggaaaccgagcacctggaaaacggcaataagtaccccaatctcgaaagcgtgaataaggtaaatggccactcagaagagacctcgcagagtccaaaccgtacggaacctcacgattctgactgctcagtggatctcggaatcagtaagagtactgaagacttgtctccccagaagagtgggccagtgggtagtgttgtcaagtcgcacagcatcaccaatatggagatcgggggcctgaaaatatatgacattctgtcagacaacggccctcaacagccctcgactacggtgaaaatcactagcgcagtggacggtaagaatatagttcgcagtaagagtgccacactcctgtacgatcagccactgcaggtctttactggtagcagctcctcaagcgaccttataagcggcacaaaagcgatctttaagttcgactccaaccacaatccggaggagcctaacattatccgaggccccaccagtggtccacagtccgccccacaaatctacgggcctcctcaatacaacatccagtatagcagttctgcagctgttaaagataccctctggcattccaagcagaatcctcaaattgatcatgcatcttttcccccacagctcctgccccgatccgagtcaaccgaaaaccagtcatacgccaagcattcagcgaatatgaattttagcaatcacaacaacgtgcgggccaacactgcatatcatctgcaccagagactggggcccgcccgacatggggaaatgtgggccatcagccccaatgatcggctgatccccgccgtgaccaggtcgaccattcaacggcagtcttctgtctcaagtaccgcctctgtgaatctcggggacccaggttctacccgtagggcacagatcccagagggggactacctttcctaccgcgagttccactctgcgggccgtaccccacccatgatgcccggcagccagcgtccactcagtgccagaacttacagtatcgatggcccaaacgctagccgccctcagtctgcccgtccttctatcaatgaaatcccagagcgcaccatgtctgtctcagattttaattacagcagaacaagtccctcaaaaagacctaatgcaagggtggggagcgagcacagcctgttagacccaccgggaaaaagcaaggtgccccgagactggagggaacaggtactcagacacattgaagccaagaaactggagaagatgcctctgagtaacgggcagatgggtcagcccctgcggccgcaggcctctgtggccaggcatcctagtagagaacaactaattgactacttgatgctgaaggttgcccaccagcctccatatacacaaccgcactgctcaccaaggcaagggcacgagcttgccaagcaggaaattagagtgcgggtggagaaagatcccgaattaggcttttccatctctggcggcgtggggggaagaggcaatcccttccggcctgacgatgacggcatctttgtgactcgcgtgcagccggaagggccagcgagtaaactcctccagcccggggataaaataattcaagccaatggatactcttttataaatattgaacatggtcaggctgtaagtcttctcaaaactttccagaacaccgtcgagctgattatcgtgcgagaggtatcgagttag

SEQ ID NO: 199677 - DNA, 4116 bp, Artificial Sequence
  derived and/or modified sequence
atgaccacaaaacgcagtctcttcgtgcgattggtcccgtgcagatgcctgcggggcgaggaagagacagttactactctggactactcgcactgtagcctggaacaggtgcccaaggagatatttacatttgagaagacccttgaagaactttacctagacgccaaccagattgaggaactacccaagcagctgtttaattgccagtcactgcataaactgagccttccagacaatgatcttaccacattgccagcttccattgccaacctgatcaacctcagggaattggatgtttccaagaacgggatccaggagttccccgagaacataaaaaattgtaaggttctgactattgtggaagcttccgtgaatcctatctctaagctgcctgatgggttttcccagctgctgaaccttactcagttgtatctgaacgacgcttttctggagtttttaccagccaacttcggaaggctgacaaaactgcagattcttgagctgcgcgaaaaccagctgaagatgctgcctaaaacaatgaacagactgactcagctcgaaaggctggacttagggagcaatgaatttacagaagtgcccgaagtgcttgagcagctgtccggccttaaagaattctggatggacgccaacaggcttacttttatccccggctttatcgggtcccttaaacagttgacttatctggacgttagtaaaaataacattgagatggtggaagaggggatctctacttgtgagaacctgcaggacctgctcttgtcaagtaatagcctgcagcaactcccagaaactattggcagtctaaagaatatcacgaccctgaagattgacgaaaatcagttaatgtacctgcctgacagcattggaggacttattagtgttgaggagctagactgttctttcaatgaggtagaggcccttccatcatcgatagggcaactcacaaacctgcgaactttcgccgccgaccataattacttgcagcagctaccaccagagataggctcttggaagaacataactgtgctctttcttcatagtaataagttggagacactccctgaggagatgggggatatgcaaaagctgaaggtgattaacctgtctgacaatcgcttgaagaacctccctttttccttcaccaaattgcagcagctgaccgccatgtggcttagcgataaccagtctaagcccctaattcctctgcagaaggagacagatagcgagactcagaagatggtactcactaactatatgtttcctcagcaaccgcgcactgaggacgtgatgttcatttccgacaacgagtcatttaatcctagcctttgggaggaacagcggaagcagcgcgcccaggtggccttcgagtgcgacgaggataaggacgagagagaggctcccccgcgtgaaggcaatctaaagcgctaccctaccccttatcccgacgagctaaagaacatggtcaaaactgtgcagaccatcgtacacaggcttaaagatgaggaaaccaacgaagacagtgggcgggacttaaagccccatgaggatcagcaagacataaacaaggatgtgggggttaaaacatcagagagcactaccactgtcaagagcaaagtggatgagcgtgagaaatacatgatcggcaacagtgtgcaaaagatttctgagcccgaagcagagattagccctggatccctgccagtgactgcaaatatgaaggcttccgaaaatctgaagcatatcgtgaatcatgatgacgtttttgaagaatctgaagagttatcttccgacgaggaaatgaaaatggcggagatgaggccccccctcattgagacctctataaatcagcctaaagtcgtggcgctctctaacaacaagaaggacgatacgaaagaaaccgattccctgagtgatgaggtgacccacaacagtaaccagaataactccaattgttcatcgccttcccgcatgtcagattctgtctcattgaacacagattcttctcaggacacctccctgtgctctcctgtgaaacagacacacattgacatcaactcaaagatccggcaggaggacgagaacttcaactcactcctgcagaatggcgatatcttgaattcctcaacagaagaaaaattcaaggcccatgataaaaaggactttaatttaccagagtacgatctgaacgtggaagagcgcctcgtgctaattgaaaaaagcgtagactccacagcaactgccgacgatactcacaagctagaccacattaacatgaaccttaataagcttatcacaaacgataccttccaacctgaaattatggagcgcagcaaaacacaggacattgtactgggtacctccttcttaagtataaatagtaaagaagagacggagcatctggagaacggcaataagtatccaaacctggagtcagtaaacaaggtcaacggacactctgaggagactagccagagtccaaatcgcacagagcctcatgacagcgattgtagcgtggacctaggcatatctaagagcaccgaggacctgtctcctcagaaatcagggccagtaggatctgtcgtgaagagtcattcgatcactaacatggagatagggggcttgaaaatctatgacatcctctctgataatggtccgcagcagccatccaccaccgtaaaaatcacgagtgctgtggacggcaaaaatattgtcaggtctaagtccgcaacattattatacgatcagccgctgcaggtgtttacaggaagttcttcttcatctgatctgatttccgggaccaaggcaatctttaagttcgattccaatcataaccccgaggagccaaatattatacgcgggcctacctcgggaccacagagtgctcctcagatttatgggccccctcaatataacattcagtattcctcctccgcggctgtaaaggataccctgtggcacagcaaacagaacccccagatcgaccatgccagtttcccaccccaacttctgccacggtctgagtcaaccgaaaaccaatcttacgcgaaacattctgccaacatgaatttctcaaaccataataatgtaagagctaacacagcctaccatctgcatcagaggctgggccctgcccgccacggggaaatgtgggccatttcgccaaatgaccggctaataccggcagtgacaagaagtacaatccagagacagagttccgtgtctagcaccgcctccgtcaacctgggggaccccggaagtacacgccgggctcaaatcccggaaggagactacctgtcttatagggagtttcacagtgcaggtagaactccacctatgatgcccggcagccagcgtcctctgtctgcaaggacatactcaattgacggtcctaatgcctccagacctcagagcgcaaggcccagtatcaacgagattcctgagagaactatgtctgtaagtgatttcaactactccaggacttcacctagtaaaagacccaacgcccgcgttggctccgagcacagccttcttgaccctcctgggaagtctaaggttccgagagattggagggagcaagtgctgaggcatattgaggccaagaagttggaaaagatgcccctctctaacggtcagatgggtcagcccttgcgcccccaggccaattacagccagatccatcatccaccacaggcatccgtggctaggcaccctagccgcgagcaactgatagattatctgatgctaaaggtcgctcatcaacccccttatacgcagccacactgttctccaagacagggtcacgaactggctaagcaagaaataagggtgcgagtcgaaaaagatcctgagttggggttctctatcagcggcggggtgggaggcaggggcaacccattcagaccagacgatgatggcatctttgtgactagagtacaaccggaaggacccgcaagcaaattactgcaaccgggtgataaaattatacaagctaatggctattccttcatcaatatcgagcatgggcaggcagtgtccttgctgaaaacctttcagaacaccgtggaactgattattgtgcgcgaagtctccagttag

SEQ ID NO: 199678 - DNA, 4023 bp, Artificial Sequence
  derived and/or modified sequence
atgaccaccaagaggagcctgtttgtgcggctggtgccctgccgctgcctgcggggggaggaggagaccgtgaccaccctggactacagccactgcagcctggagcaggtgcccaaggagatcttcacctttgagaagaccctggaggagctgtacctggatgccaaccagatcgaggagctgcccaagcagctgttcaactgccagagcctgcacaagctgagcctgcctgacaatgacctgaccaccctgcctgccagcatcgccaacctgatcaacctgcgggagctggatgtgtccaagaatggcatccaggagttccctgagaacatcaagaactgcaaggtgctgaccatcgtggaggcctctgtgaaccccatcagcaagctgcctgatggcttcagccagctgctgaacctgacccagctgtacctgaatgatgccttcctggagttcctgcctgccaactttggccgcctgaccaagctgcagatcctggagctgcgggagaaccagctgaagatgctgcccaagaccatgaaccggctgacccagctggagcggctggacctgggcagcaatgagttcacagaggtgcctgaggtgctggagcagctgagcggcctgaaggagttctggatggatgccaaccggctgaccttcatccctggcttcatcggcagcctgaagcagctgacctacctggatgtgtccaagaacaacatcgagatggtggaggagggcatcagcacctgtgagaacctgcaggacctgctgctgagcagcaacagcctgcagcagctgcctgagaccatcggcagcctgaagaacatcaccaccctgaagattgatgagaaccagctgatgtacctgcctgacagcattggaggcctcatctctgtggaggagctggactgcagcttcaatgaggtggaggccctgcccagcagcatcggccagctgaccaacctgcggacctttgctgctgaccacaactacctgcagcagctgcccccagaaattggctcctggaagaacatcaccgtgctcttcctgcacagcaacaagctggagaccctgcctgaggagatgggagacatgcagaagctgaaggtgatcaacctgagtgacaaccggctgaagaacctgcccttctccttcaccaagctgcagcagctgacagccatgtggctgagtgacaaccagagcaagcccctcatccccctgcagaaggagacagattctgagacccagaagatggtgctgaccaactacatgttcccccagcagcccaggacagaagatgtgatgttcatcagtgacaatgaaagcttcaaccccagcctgtgggaggagcagaggaagcagagggcccaggtggcctttgaatgtgatgaggacaaggatgagcgggaggccccaccccgggagggcaacctgaagcgctaccccaccccctacccagatgagctgaagaacatggtgaagacagtgcagaccatcgtgcaccggctgaaggatgaggagaccaatgaagacagcggccgggacctgaagccccatgaggaccagcaggacatcaacaaggatgtgggcgtgaagaccagcgagagcaccaccaccgtgaagagcaaggtggatgagcgggagaagtacatgattggcaacagcgtgcagaagatcagcgagcctgaggccgagatcagccctggcagcctgcctgtgacagccaacatgaaggccagcgagaacctgaagcacatcgtgaaccatgatgatgtgtttgaggagagcgaggagctgagcagtgatgaggagatgaagatggccgagatgaggcctcccctgattgagaccagcatcaaccagcccaaggtggtggccctgagcaacaacaagaaggatgacaccaaggagacagacagcctgagtgatgaggtgacccacaacagcaaccagaacaacagcaactgcagcagccccagcaggatgtctgattctgtgtccctgaacacagacagcagccaggacaccagcctgtgcagccctgtgaagcagacccacatcgacatcaacagcaagatccggcaggaggatgagaacttcaacagcctgctgcagaatggagacatcctgaacagcagcacagaggagaagttcaaggcccatgacaagaaggacttcaacctgcctgaatatgacctgaatgtggaggagcggctggtgctgattgagaagtctgtggacagcacagccacagcagatgacacccacaagctggaccacatcaacatgaacctgaacaagctgatcaccaatgacaccttccagcctgagatcatggagaggagcaagacccaggacatcgtgctgggcaccagcttcctgagcatcaacagcaaggaggagacagagcacctggagaatggaaacaagtaccccaacctggagagcgtgaacaaggtgaatggccacagcgaggagaccagccagagccccaacagaacagagccccatgacagcgactgcagcgtggacctgggcatcagcaagagcacagaggacctgagcccccagaagagcggccctgtgggctctgtggtgaagagccacagcatcaccaacatggagatcggcggcctgaagatctatgacatcctgagtgacaatggcccccagcagcccagcaccaccgtgaagatcaccagcgctgtggatggcaagaacatcgtgcgcagcaagagcgccaccctgctgtatgaccagcccctgcaggtgttcaccggcagcagcagcagcagtgacctgatcagcggcaccaaggccatcttcaagtttgacagcaaccacaaccctgaggagcccaacatcatccggggccccaccagcggcccccagagcgccccccagatctacggccccccccagtacaacatccagtacagcagcagcgctgctgtgaaggacaccctgtggcacagcaagcagaacccccagattgaccacgccagcttccccccccagctgctgcccaggtctgagagcacagagaaccagagctatgccaagcacagcgccaacatgaacttcagcaaccacaacaacgtgcgggccaacacagcctaccacctgcaccagaggctgggccctgcccggcatggagagatgtgggccatcagccccaatgacaggctcatcccagctgtgaccaggagcaccatccagaggcagagctctgtgagcagcacagcctctgtgaacctgggggaccccggcagcacccggcgggcccagatccctgagggggactacctgagctaccgggagttccacagcgctggccgcaccccacccatgatgcctggcagccagaggcccctgagcgcccggacctacagcattgatggccccaatgccagccggccccagagcgcccggcccagcatcaatgagatccctgagaggaccatgtctgtgtctgacttcaactacagcaggaccagccccagcaagaggcccaatgcccgggtgggcagcgagcacagcctgctggaccccccaggcaagagcaaggtgccccgggactggagggagcaggtgctgcggcacatcgaggccaagaagctggagaagatgcccctgagcaatggccagatgggccagcccctgcggccccaggccaactacagccagatccaccaccccccccaggcctctgtggcccggcaccccagccgggagcagctgattgactacctgatgctgaaggtggcccaccagcccccctacacccagccccactgcagcccccggcagggccacgagctggccaagcaggagggcatctttgtgaccagggtgcagcctgagggccctgccagcaagctgctgcagcccggggacaagatcatccaggccaacggctacagcttcatcaacatcgagcacggccaggccgtgtccctgctgaagaccttccagaacacagtggagctgatcatcgtgcgggaggtgagcagctag

SEQ ID NO: 199679 - DNA, 4083 bp, Artificial Sequence
  derived and/or modified sequence
atgaccaccaagaggagcctgtttgtgcggctggtgccctgccgctgcctgcggggggaggaggagaccgtgaccaccctggactacagccactgcagcctggagcaggtgcccaaggagatcttcacctttgagaagaccctggaggagctgtacctggatgccaaccagatcgaggagctgcccaagcagctgttcaactgccagagcctgcacaagctgagcctgcctgacaatgacctgaccaccctgcctgccagcatcgccaacctgatcaacctgcgggagctggatgtgtccaagaatggcatccaggagttccctgagaacatcaagaactgcaaggtgctgaccatcgtggaggcctctgtgaaccccatcagcaagctgcctgatggcttcagccagctgctgaacctgacccagctgtacctgaatgatgccttcctggagttcctgcctgccaactttggccgcctgaccaagctgcagatcctggagctgcgggagaaccagctgaagatgctgcccaagaccatgaaccggctgacccagctggagcggctggacctgggcagcaatgagttcacagaggtgcctgaggtgctggagcagctgagcggcctgaaggagttctggatggatgccaaccggctgaccttcatccctggcttcatcggcagcctgaagcagctgacctacctggatgtgtccaagaacaacatcgagatggtggaggagggcatcagcacctgtgagaacctgcaggacctgctgctgagcagcaacagcctgcagcagctgcctgagaccatcggcagcctgaagaacatcaccaccctgaagattgatgagaaccagctgatgtacctgcctgacagcattggaggcctcatctctgtggaggagctggactgcagcttcaatgaggtggaggccctgcccagcagcatcggccagctgaccaacctgcggacctttgctgctgaccacaactacctgcagcagctgcccccagaaattggctcctggaagaacatcaccgtgctcttcctgcacagcaacaagctggagaccctgcctgaggagatgggagacatgcagaagctgaaggtgatcaacctgagtgacaaccggctgaagaacctgcccttctccttcaccaagctgcagcagctgacagccatgtggctgagtgacaaccagagcaagcccctcatccccctgcagaaggagacagattctgagacccagaagatggtgctgaccaactacatgttcccccagcagcccaggacagaagatgtgatgttcatcagtgacaatgaaagcttcaaccccagcctgtgggaggagcagaggaagcagagggcccaggtggcctttgaatgtgatgaggacaaggatgagcgggaggccccaccccgggagggcaacctgaagcgctaccccaccccctacccagatgagctgaagaacatggtgaagacagtgcagaccatcgtgcaccggctgaaggatgaggagaccaatgaagacagcggccgggacctgaagccccatgaggaccagcaggacatcaacaaggatgtgggcgtgaagaccagcgagagcaccaccaccgtgaagagcaaggtggatgagcgggagaagtacatgattggcaacagcgtgcagaagatcagcgagcctgaggccgagatcagccctggcagcctgcctgtgacagccaacatgaaggccagcgagaacctgaagcacatcgtgaaccatgatgatgtgtttgaggagagcgaggagctgagcagtgatgaggagatgaagatggccgagatgaggcctcccctgattgagaccagcatcaaccagcccaaggtggtggccctgagcaacaacaagaaggatgacaccaaggagacagacagcctgagtgatgaggtgacccacaacagcaaccagaacaacagcaactgcagcagccccagcaggatgtctgattctgtgtccctgaacacagacagcagccaggacaccagcctgtgcagccctgtgaagcagacccacatcgacatcaacagcaagatccggcaggaggatgagaacttcaacagcctgctgcagaatggagacatcctgaacagcagcacagaggagaagttcaaggcccatgacaagaaggacttcaacctgcctgaatatgacctgaatgtggaggagcggctggtgctgattgagaagtctgtggacagcacagccacagcagatgacacccacaagctggaccacatcaacatgaacctgaacaagctgatcaccaatgacaccttccagcctgagatcatggagaggagcaagacccaggacatcgtgctgggcaccagcttcctgagcatcaacagcaaggaggagacagagcacctggagaatggaaacaagtaccccaacctggagagcgtgaacaaggtgaatggccacagcgaggagaccagccagagccccaacagaacagagccccatgacagcgactgcagcgtggacctgggcatcagcaagagcacagaggacctgagcccccagaagagcggccctgtgggctctgtggtgaagagccacagcatcaccaacatggagatcggcggcctgaagatctatgacatcctgagtgacaatggcccccagcagcccagcaccaccgtgaagatcaccagcgctgtggatggcaagaacatcgtgcgcagcaagagcgccaccctgctgtatgaccagcccctgcaggtgttcaccggcagcagcagcagcagtgacctgatcagcggcaccaaggccatcttcaagtttgacagcaaccacaaccctgaggagcccaacatcatccggggccccaccagcggcccccagagcgccccccagatctacggccccccccagtacaacatccagtacagcagcagcgctgctgtgaaggacaccctgtggcacagcaagcagaacccccagattgaccacgccagcttccccccccagctgctgcccaggtctgagagcacagagaaccagagctatgccaagcacagcgccaacatgaacttcagcaaccacaacaacgtgcgggccaacacagcctaccacctgcaccagaggctgggccctgcccggcatggagagatgtgggccatcagccccaatgacaggctcatcccagctgtgaccaggagcaccatccagaggcagagctctgtgagcagcacagcctctgtgaacctgggggaccccggcagcacccggcgggcccagatccctgagggggactacctgagctaccgggagttccacagcgctggccgcaccccacccatgatgcctggcagccagaggcccctgagcgcccggacctacagcattgatggccccaatgccagccggccccagagcgcccggcccagcatcaatgagatccctgagaggaccatgtctgtgtctgacttcaactacagcaggaccagccccagcaagaggcccaatgcccgggtgggcagcgagcacagcctgctggaccccccaggcaagagcaaggtgccccgggactggagggagcaggtgctgcggcacatcgaggccaagaagctggagaagatgcccctgagcaatggccagatgggccagcccctgcggccccaggcctctgtggcccggcaccccagccgggagcagctgattgactacctgatgctgaaggtggcccaccagcccccctacacccagccccactgcagcccccggcagggccacgagctggccaagcaggagatccgggtgcgggtggagaaggaccctgagctgggcttcagcatctctggaggagtgggcggccggggcaaccccttccggccagatgatgatggcatctttgtgaccagggtgcagcctgagggccctgccagcaagctgctgcagcccggggacaagatcatccaggccaacggctacagcttcatcaacatcgagcacggccaggccgtgtccctgctgaagaccttccagaacacagtggagctgatcatcgtgcgggaggtgagcagctag

SEQ ID NO: 199680 - DNA, 4116 bp, Artificial Sequence
  derived and/or modified sequence
atgaccaccaagaggagcctgtttgtgcggctggtgccctgccgctgcctgcggggggaggaggagaccgtgaccaccctggactacagccactgcagcctggagcaggtgcccaaggagatcttcacctttgagaagaccctggaggagctgtacctggatgccaaccagatcgaggagctgcccaagcagctgttcaactgccagagcctgcacaagctgagcctgcctgacaatgacctgaccaccctgcctgccagcatcgccaacctgatcaacctgcgggagctggatgtgtccaagaatggcatccaggagttccctgagaacatcaagaactgcaaggtgctgaccatcgtggaggcctctgtgaaccccatcagcaagctgcctgatggcttcagccagctgctgaacctgacccagctgtacctgaatgatgccttcctggagttcctgcctgccaactttggccgcctgaccaagctgcagatcctggagctgcgggagaaccagctgaagatgctgcccaagaccatgaaccggctgacccagctggagcggctggacctgggcagcaatgagttcacagaggtgcctgaggtgctggagcagctgagcggcctgaaggagttctggatggatgccaaccggctgaccttcatccctggcttcatcggcagcctgaagcagctgacctacctggatgtgtccaagaacaacatcgagatggtggaggagggcatcagcacctgtgagaacctgcaggacctgctgctgagcagcaacagcctgcagcagctgcctgagaccatcggcagcctgaagaacatcaccaccctgaagattgatgagaaccagctgatgtacctgcctgacagcattggaggcctcatctctgtggaggagctggactgcagcttcaatgaggtggaggccctgcccagcagcatcggccagctgaccaacctgcggacctttgctgctgaccacaactacctgcagcagctgcccccagaaattggctcctggaagaacatcaccgtgctcttcctgcacagcaacaagctggagaccctgcctgaggagatgggagacatgcagaagctgaaggtgatcaacctgagtgacaaccggctgaagaacctgcccttctccttcaccaagctgcagcagctgacagccatgtggctgagtgacaaccagagcaagcccctcatccccctgcagaaggagacagattctgagacccagaagatggtgctgaccaactacatgttcccccagcagcccaggacagaagatgtgatgttcatcagtgacaatgaaagcttcaaccccagcctgtgggaggagcagaggaagcagagggcccaggtggcctttgaatgtgatgaggacaaggatgagcgggaggccccaccccgggagggcaacctgaagcgctaccccaccccctacccagatgagctgaagaacatggtgaagacagtgcagaccatcgtgcaccggctgaaggatgaggagaccaatgaagacagcggccgggacctgaagccccatgaggaccagcaggacatcaacaaggatgtgggcgtgaagaccagcgagagcaccaccaccgtgaagagcaaggtggatgagcgggagaagtacatgattggcaacagcgtgcagaagatcagcgagcctgaggccgagatcagccctggcagcctgcctgtgacagccaacatgaaggccagcgagaacctgaagcacatcgtgaaccatgatgatgtgtttgaggagagcgaggagctgagcagtgatgaggagatgaagatggccgagatgaggcctcccctgattgagaccagcatcaaccagcccaaggtggtggccctgagcaacaacaagaaggatgacaccaaggagacagacagcctgagtgatgaggtgacccacaacagcaaccagaacaacagcaactgcagcagccccagcaggatgtctgattctgtgtccctgaacacagacagcagccaggacaccagcctgtgcagccctgtgaagcagacccacatcgacatcaacagcaagatccggcaggaggatgagaacttcaacagcctgctgcagaatggagacatcctgaacagcagcacagaggagaagttcaaggcccatgacaagaaggacttcaacctgcctgaatatgacctgaatgtggaggagcggctggtgctgattgagaagtctgtggacagcacagccacagcagatgacacccacaagctggaccacatcaacatgaacctgaacaagctgatcaccaatgacaccttccagcctgagatcatggagaggagcaagacccaggacatcgtgctgggcaccagcttcctgagcatcaacagcaaggaggagacagagcacctggagaatggaaacaagtaccccaacctggagagcgtgaacaaggtgaatggccacagcgaggagaccagccagagccccaacagaacagagccccatgacagcgactgcagcgtggacctgggcatcagcaagagcacagaggacctgagcccccagaagagcggccctgtgggctctgtggtgaagagccacagcatcaccaacatggagatcggcggcctgaagatctatgacatcctgagtgacaatggcccccagcagcccagcaccaccgtgaagatcaccagcgctgtggatggcaagaacatcgtgcgcagcaagagcgccaccctgctgtatgaccagcccctgcaggtgttcaccggcagcagcagcagcagtgacctgatcagcggcaccaaggccatcttcaagtttgacagcaaccacaaccctgaggagcccaacatcatccggggccccaccagcggcccccagagcgccccccagatctacggccccccccagtacaacatccagtacagcagcagcgctgctgtgaaggacaccctgtggcacagcaagcagaacccccagattgaccacgccagcttccccccccagctgctgcccaggtctgagagcacagagaaccagagctatgccaagcacagcgccaacatgaacttcagcaaccacaacaacgtgcgggccaacacagcctaccacctgcaccagaggctgggccctgcccggcatggagagatgtgggccatcagccccaatgacaggctcatcccagctgtgaccaggagcaccatccagaggcagagctctgtgagcagcacagcctctgtgaacctgggggaccccggcagcacccggcgggcccagatccctgagggggactacctgagctaccgggagttccacagcgctggccgcaccccacccatgatgcctggcagccagaggcccctgagcgcccggacctacagcattgatggccccaatgccagccggccccagagcgcccggcccagcatcaatgagatccctgagaggaccatgtctgtgtctgacttcaactacagcaggaccagccccagcaagaggcccaatgcccgggtgggcagcgagcacagcctgctggaccccccaggcaagagcaaggtgccccgggactggagggagcaggtgctgcggcacatcgaggccaagaagctggagaagatgcccctgagcaatggccagatgggccagcccctgcggccccaggccaactacagccagatccaccaccccccccaggcctctgtggcccggcaccccagccgggagcagctgattgactacctgatgctgaaggtggcccaccagcccccctacacccagccccactgcagcccccggcagggccacgagctggccaagcaggagatccgggtgcgggtggagaaggaccctgagctgggcttcagcatcagcggcggcgtgggcggccggggcaaccccttccggccagatgatgatggcatctttgtgaccagggtgcagcctgagggccctgccagcaagctgctgcagcccggggacaagatcatccaggccaacggctacagcttcatcaacattgaacatggccaggccgtgtccctgctgaagaccttccagaacacagtggagctgatcatcgtgcgggaggtgagcagctag

SEQ ID NO: 199681 - DNA, 4023 bp, Artificial Sequence
  derived and/or modified sequence
atgaccaccaagcggagcctgttcgtgcggctggtgccctgccggtgtttacggggcgaggaagaaacagttacaaccctcgattatagtcactgctcactggagcaagtacctaaggagatattcacgtttgagaagaccttggaagaactgtaccttgatgccaatcagatcgaggagctgcccaagcagctgttcaattgccaatcactgcacaaactgtccctacctgacaatgatctgaccacattgcctgcctcaatcgccaacctgatcaaccttcgcgaactggatgtgagcaaaaatggtatacaagaattccccgagaacatcaagaattgcaaagtccttactatcgtcgaggcaagcgtcaaccccataagtaaattacccgacggattttctcagctgttaaatctaacccaattatatctgaacgatgcctttctcgagttcctcccagctaatttcggccggttgaccaagcttcagattctggagctgagggagaaccagttgaagatgctgcccaagactatgaatcgactcacccagttagagagattggatctgggcagcaacgagttcactgaagttcctgaagtgctcgaacaactgagcgggctgaaagagttttggatggacgctaacagactgacctttattcccggcttcattgggtccttaaagcagctgacctatcttgatgtatccaagaataatatagagatggtggaggagggaattagtacctgcgagaatctgcaggaccttttgttgagctccaatagcctgcagcagctaccagaaaccattggaagcctgaaaaatataacgactctgaagatagatgaaaaccaattgatgtatctgcccgacagcattggtgggttaatcagcgtggaggagctggactgcagttttaacgaagtggaggcactcccatcatcgattgggcagcttaccaatctacgcacgtttgccgcagaccacaattatctgcagcagctgccccccgaaatcggctcttggaagaatattaccgttttatttctgcattccaataagctggagactctccccgaagagatgggcgacatgcagaaattaaaggtaatcaacctgtcagacaatcggctcaaaaatttgcccttttcgttcactaagttacagcagctgacggcgatgtggctgtcagacaatcagagtaaacccctcatccccttacagaaggagactgacagtgaaacccagaaaatggtgctaacaaactatatgttcccgcagcaacctcgaactgaggacgttatgttcatctcagacaacgagtcttttaacccttccctgtgggaggagcaaagaaagcagcgcgcacaggtggcgtttgagtgtgacgaggacaaggacgagagggaggcccccccacgcgaaggcaatctcaagagatacccaacgccctatcctgatgaacttaaaaacatggtgaagactgtgcagactatcgtgcatcgcctgaaggacgaagagaccaacgaagactccgggcgggaccttaaaccccacgaggatcaacaagatattaacaaagacgtgggtgtgaagaccagtgaatccactaccaccgtgaaatctaaggtggacgaacgcgagaaatatatgatcggaaactctgttcaaaagatatcagagcccgaagctgagatctcccccggctcactccccgtcacagccaatatgaaggcttcagaaaatcttaaacatatagtcaatcatgatgacgtatttgaggaatccgaggagctgtccagcgacgaggaaatgaagatggccgagatgagaccacccttgatcgagaccagcatcaatcaaccaaaggtggtggccctctccaataataagaaagacgacacaaaggaaacagactcactgagtgacgaggtgacccacaatagcaaccagaataactcaaattgctctagcccaagtagaatgtctgactctgtatctctgaacaccgattctagccaggatacctctctttgtagccccgtcaagcaaacacacatagatattaactcaaagatccgccaggaggacgagaacttcaattctttactgcagaacggagatattttgaactcctcaaccgaggagaaattcaaggcacacgataaaaaagactttaacctacctgagtacgacctcaatgtggaggagaggttggtgctcatagagaaatctgtggattccaccgctaccgctgacgacacccataaactcgatcacattaacatgaacctaaacaaactcataaccaacgatactttccagcccgagatcatggagcggagcaaaacccaagatatcgtcctgggcacgtctttcctctccattaactccaaagaggaaactgagcatcttgaaaacgggaataaatatccgaatctggagagcgtcaacaaagtgaacgggcatagtgaggagacctcacagagccccaatcgcacagagccacacgactctgactgctccgtggatttgggcatctcgaaaagtaccgaagacctgagtccacagaagagtggccctgttggctccgtcgttaaatcccactctatcacgaacatggagatcgggggcttgaaaatctacgacatactttccgataatggcccacaacagccgtctaccacagtgaagatcacctctgcagttgacgggaaaaacatcgtgaggtccaagagtgccaccctgttgtatgaccaacccctgcaggtgtttactggctcaagttcatcctcggacctgatctctggcacaaaagctatttttaagtttgattcaaaccataatcctgaagagcccaacattataagggggcccactagtggcccacagtccgctccccagatctatggccctcctcagtataacatccaatactcttcctccgctgcagtgaaagacaccctctggcacagtaaacagaacccacaaatcgaccacgcctcttttccacctcagttgctgcccaggagcgagtcaaccgaaaaccaatcctacgccaaacattcggccaacatgaatttcagcaaccataataatgtccgcgcaaacacagcttaccatttgcaccagagactcggacctgcaagacacggggagatgtgggccataagcccaaacgacaggctcatcccagctgtcactaggtctaccattcaaaggcaatcctccgtatcatccacggcttccgttaacttaggtgaccccgggtctaccagacgggctcagattcccgagggagactacctgtcttatcgggagttccattctgcagggcggacacccccgatgatgccaggatcgcagaggccattgagtgctcgaacttacagtattgatggcccaaacgcatccagaccccaatccgcccgcccctctatcaacgagattcccgagaggaccatgtccgtctccgacttcaattactctcgtacaagcccctccaagcgcccgaacgccagggtgggctccgagcactctctactggaccctcccggtaagagtaaggttcccagggattggcgcgagcaggtgctgagacacatagaggctaagaagttggaaaagatgccactctctaacggacagatgggacagccgttaaggccccaggctaactactcgcagatacaccatccaccccaagcaagtgtcgctagacatccgtcccgtgagcaattaatcgattatctgatgctgaaagtggcccaccagccgccatacacccagccccattgttcacccagacaaggccatgaattggccaagcaagaggggatttttgttacccgcgtgcagcctgagggccccgcaagcaaactcctgcaacccggcgataagataatacaagctaacggctactcttttattaatatcgaacatggccaggctgtgagcctgttgaaaactttccagaacactgtcgagctgataatcgtaagagaagtgtccagttag

SEQ ID NO: 199682 - DNA, 4083 bp, Artificial Sequence
  derived and/or modified sequence
atgaccaccaagcggagcctgttcgtgcggctggtgccctgccggtgccttaggggcgaagaagaaacagtgacaactctggactattctcattgctccttagaacaggtgcctaaagagatttttacttttgagaaaaccctggaggagctgtatctagatgctaaccagattgaagaacttcccaaacaattgtttaactgtcagtccctgcataagctaagcctccctgacaacgaccttacgaccctgccggcttccattgccaacctcatcaacctgagagaattggatgtttccaaaaacgggatccaggaatttcccgaaaatataaaaaattgtaaggtgctaacaatcgtagaagcaagcgttaatccaatctcaaagctgcccgatgggttttctcagctgctcaacctgacccagctgtacctgaacgacgctttccttgaatttttacccgcgaattttggaaggctgactaagctccagatattggagcttagagagaatcagttaaagatgttacctaagactatgaatagactgactcagctcgagagattagacctgggctccaatgaatttacagaagttccagaggtgctggaacagctgtccggcctgaaggagttctggatggacgccaacaggctaacttttatacccggcttcattggctccctcaagcagctgacatacttagacgtgtctaagaataacatcgagatggtggaggagggtatctctacttgtgaaaatctgcaagacctcctcctcagctctaatagcctgcagcagctccctgagacaattggatccctcaagaacatcacaacacttaaaatcgacgaaaaccagctgatgtacctgcccgattccatcggtggcctcatctcagttgaggagctggattgctctttcaatgaagtcgaggccctcccgtcatcaatcggacagctcacaaacctcaggaccttcgctgcggaccacaattacctgcagcagctccctcccgagattggcagctggaagaacataactgtgctgttcttacattcaaataaactggagacattgcctgaagaaatgggcgacatgcagaaactcaaggtcattaatctgagcgataatagactcaaaaatctcccattttctttcacaaaactgcagcaactgacggccatgtggctcagcgacaaccagagcaagcccctcatccctctgcagaaagaaaccgactccgagacacaaaaaatggtgttgaccaattacatgtttcctcagcagccaaggactgaggacgtcatgttcatcagcgataatgaatcgtttaatccttctctctgggaggaacagaggaagcagagggctcaggtagcatttgagtgcgatgaagataaggatgaaagggaagcacctccacgggagggtaaccttaagcggtatcccacaccctatccggacgagctgaagaacatggtcaagactgtgcagaccatagtccatcgcctgaaagatgaggagaccaatgaggattccggccgtgatctgaaaccccatgaagatcagcaagacattaataaggacgtcggcgtgaaaacttctgagtcaaccaccactgttaagagtaaagttgacgagagggagaagtacatgataggtaacagcgttcagaagatttcggagccggaggcggagatcagtcccggtagtctccccgtgactgctaacatgaaagccagtgagaatctgaagcacatcgtgaatcacgatgatgtcttcgaagagagcgaggagttgtcgtccgacgaggaaatgaagatggcagagatgcgaccccccctaattgaaaccagtataaatcagcctaaggtagtggccctgtctaacaataagaaagacgacactaaagagactgattccctcagtgatgaggttacacacaattctaaccaaaataatagcaattgttcctcgcctagcagaatgagcgacagcgtttctcttaacaccgatagttctcaggatactagcctttgctcaccggttaagcaaacccacatcgatattaatagcaaaattcggcaagaggacgaaaattttaattctttgctgcaaaatggcgatattttgaatagctctacagaagagaaattcaaggcacacgataaaaaggatttcaacctcccggagtatgatctaaacgtagaagaacgattagtcctgattgagaaaagtgtggatagtacagccactgctgacgatacccataaactcgaccatattaacatgaacctgaataagctgatcacgaacgatacattccagccagagataatggagcggtcaaagactcaggacatcgttctgggtactagcttcctcagcatcaacagcaaagaggaaacggaacacctggaaaacggtaacaaataccctaacctggagtcagtgaacaaggtgaacggacatagtgaggagactagccagtcgcccaaccgaacagaaccccacgactctgactgctccgtggacctgggaatcagcaaatcgacagaggatctctccccccaaaagtcaggtccagtaggctccgtggtgaaaagccactctattaccaatatggaaattggtggtctgaagatttatgatatactgtctgacaacggcccccagcagccttctactaccgtcaaaatcaccagcgccgtggatggaaagaatattgtgcgcagcaaaagcgcaacccttctatacgatcagccgctccaggtgttcacaggctccagttcctccagtgatctgattagcgggaccaaggctatttttaaattcgactcaaaccacaatccagaagagccaaatataatcagagggcctacctcagggcctcagtcagcccctcaaatatacgggccacctcagtataacatccagtatagcagcagtgccgcagtaaaggatactctctggcacagtaagcagaacccccaaatcgatcacgcctccttccctccccaacttttaccccgaagcgaaagtaccgaaaatcaatcttacgccaaacacagcgccaacatgaacttctcaaaccataacaatgtccgtgccaatactgcctaccatctacatcagaggctgggaccggcaagacacggggagatgtgggctattagtcccaatgacaggctgatccccgccgtaacacgctccactattcaaaggcaatcttctgtgagctcaacagcctccgttaacctcggtgatcctggtagtacccgcagggcacagatccccgaaggagactacctcagctatcgggagtttcattccgccgggcgcacaccacccatgatgcctggtagccagagaccactgagcgctaggacctattcaattgatgggccaaatgccagtagaccccagtccgcacgcccaagcataaacgagattcctgagcggaccatgagtgtctcagactttaattactcccggactagcccctcgaaacgccctaacgctagggtgggtagcgagcatagcctgctggaccccccagggaagtccaaggtgccaagggactggcgtgaacaagtactgagacacatcgaagcgaagaagctggaaaagatgcccctgtccaacggacagatggggcaacccttaaggccccaagctagcgtcgccagacacccatctagggagcagctgatcgactatctgatgctcaaggtagcccaccagcccccctatactcagcctcattgctctccacggcagggccatgagttggctaagcaggagatccgtgtgcgcgtggagaaggaccccgagctggggttttccatcagtggaggcgtcggtggcaggggaaaccctttccgtcctgacgacgacggcatttttgtcactcgcgtgcaacccgagggacccgctagcaagcttctgcagcctggcgataagatcatccaggccaatggctatagcttcataaacattgagcatgggcaggctgtgagtcttctaaaaacttttcaaaatacggttgagctaattatcgtgagagaagtcagctcttag

SEQ ID NO: 199683 - DNA, 4116 bp, Artificial Sequence
  derived and/or modified sequence
atgaccaccaagcggagcctgttcgtgcggctggtgccctgccggtgtctcagaggagaggaagaaacagtaaccaccctggattatagccactgttccttggaacaagtgccaaaagagatcttcaccttcgagaaaactctcgaagaactgtacttggatgcaaatcaaatagaagagctcccgaaacagctatttaattgtcagtcactacacaaactatccctccctgacaacgacctgacaacacttcccgcctctattgccaacctcatcaacctacgagagctggacgtatcaaaaaacggaatccaggagtttccggagaatattaaaaactgtaaagtgctaacaatcgtagaagcctccgtgaaccccatctccaaactcccagatggtttctctcagttgcttaatctgacccagctgtatcttaacgatgcatttttagagttcttgcccgcaaattttggtagactcaccaaactccagatcctcgaattgagggaaaatcagctgaaaatgcttcctaaaaccatgaatagactgacccagctcgagcgactcgatcttgggagcaacgagttcactgaagtgccagaggtgctcgaacaactcagcggactgaaagaattctggatggatgccaatcgtctcactttcatccctggcttcatcggaagtctgaaacaactaacatacctggacgtttcaaaaaacaacatcgaaatggtcgaggaaggcatttcaacgtgtgagaatctccaggacctgctgctgtcctcaaatagcctgcagcagctgccagagaccatcggatcactaaagaacatcactacgcttaaaattgacgagaatcagctcatgtatctccctgactctatcggtggacttatctctgtcgaggagttggattgtagttttaacgaagtagaagcgctcccaagctcgattgggcagctcactaacctgcgcacatttgccgccgatcacaattatctgcagcaactcccccctgagatcggctcttggaaaaacatcaccgtcctgtttcttcactccaataagcttgaaaccctgccagaagaaatgggcgatatgcagaagctgaaggtcattaacctgagcgacaaccgacttaagaatttacctttttcctttaccaaactgcaacagttgaccgcaatgtggctgtccgacaaccagagcaagccgctgatcccactccaaaaggagactgattccgaaacccagaagatggtgctgacaaactatatgtttccacagcagcccagaaccgaggatgtgatgttcatctccgataacgaatcctttaatccaagcctgtgggaggagcaacgtaaacagcgtgcccaggttgcttttgaatgtgacgaagataaggatgagcgcgaagctccaccccgggaggggaacttaaagcgatacccaaccccttaccccgacgagttgaagaatatggttaagacagtgcagacgatcgtccataggcttaaggatgaggagactaatgaggacagtggacgagacttgaaacctcatgaagatcagcaggatataaacaaggacgtgggtgtcaaaactagtgagagcaccactacagttaagtctaaagtggatgaaagggagaaatatatgatcgggaactctgtacaaaagatctctgaacccgaggcggagatttctcctggaagcctaccggtcacagctaatatgaaggccagcgaaaatctaaaacatatagtgaaccatgatgacgtattcgaggaatctgaagagctgagcagtgacgaggagatgaaaatggccgagatgcggccaccactgatcgaaacctcaattaatcagccaaaagtcgtcgccttgtctaataacaagaaggatgacacgaaagaaaccgacagtctcagtgatgaagtgactcacaactcaaatcagaataattccaactgttcaagcccctcccgcatgagtgactctgtttcactgaatacagattcaagtcaagatacctctctctgtagtcctgttaagcagactcacattgacatcaattcaaagatacgccaggaggacgaaaatttcaattctctgctgcagaacggcgatattctgaactccagcactgaggagaagtttaaggctcatgacaaaaaggacttcaaccttcccgagtacgacctgaacgttgaggagcggctggtcctgatcgagaagtccgttgactcaaccgcaaccgctgatgatactcacaaactggatcacatcaacatgaatctgaacaagcttattactaatgacactttccagccggagatcatggagcgcagcaaaactcaggatatcgttctcggcacatccttcttgtccataaactctaaagaggaaacagaacatttggagaatggcaacaaatacccaaacctggagtcagttaacaaggtcaacggccacagcgaggaaacatctcagagcccgaaccgcaccgaacctcatgactctgactgttcagtcgaccttggaatctctaaaagcaccgaggatctgtccccgcagaagtcgggacccgtaggcagtgtagtcaagtcgcactctattaccaatatggagattggcggccttaagatctatgatatactgtctgacaatggcccccagcagccctcgacgacggtgaagattactagcgctgtggatggtaagaatatcgtccgctccaagagtgcgactctactttacgaccagccattacaagtctttaccgggtcaagtagtagtagcgacctgatatctgggacgaaggcaatcttcaagttcgatagcaatcacaaccccgaggagcctaacattattaggggaccaacctctgggcctcagagcgcaccacagatctacgggccccctcagtacaacattcagtactctagttccgccgccgtgaaagatacgctgtggcacagcaagcaaaatccccagatagaccacgctagctttcccccgcaactgctgcctagaagtgagagcaccgagaatcagtcttatgccaagcacagcgctaacatgaatttttctaaccataacaatgttcgcgctaataccgcctaccatctacatcagcgactgggaccagcccgacatggtgagatgtgggccatcagccctaacgatagactgattccggccgtgacaagatcaaccattcagcgacagtcatcagtctcatccaccgcttcagtcaatctcggggatccggggagcaccaggcgtgcccagattccagagggagactacttaagctaccgggagttccacagtgcaggacgaacgccaccaatgatgcctggatctcaacgacctcttagcgctaggacgtactccatcgacgggcctaatgcatccaggcctcagtctgctcgtccaagcattaatgagataccagagagaacgatgtcagtgagcgactttaactactcacggacatctccatccaagcggcccaacgcacgtgtcggtagtgagcacagtttgttggatccaccaggaaagagtaaagtcccacgtgactggcgtgagcaggtcttgaggcacattgaagctaaaaagttagagaaaatgccactatccaatgggcagatgggccagccactccgcccccaggccaattattcccagattcaccatccgccccaagcctctgtggcacggcatccgagccgtgaacaactgattgactatctgatgctgaaagtggctcatcagccaccatatacacagccacattgttcacctaggcaggggcacgaactagcgaaacaagaaattagggtgcgcgtcgagaaggaccccgagctggggttttcaatcagtggaggtgtcggggggcggggaaacccatttcggccagacgatgatggaattttcgtcactagagttcagcccgaagggcccgcgagcaaactcctacagcccggggacaagattattcaagctaacggatacagctttattaatattgaacacgggcaggcggtatcccttttgaagaccttccaaaacacagtggagctcatcattgttcgcgaggtgagtagttag

SEQ ID NO: 199684 - DNA, 4023 bp, Artificial Sequence
  derived and/or modified sequence
atgaccactaaacggtcacttttcgtgaggctggtcccctgtcggtgtttacggggagaggaggagacagtcaccactctagactattcacattgctctctggaacaggtacccaaggagatttttacctttgagaaaaccctggaggaactctatctagacgctaaccaaatagaggaactcccaaagcagctcttcaattgccaaagcttgcataaactgagtctcccagacaacgacttgacaactctgcctgcatccatcgccaacctcattaatcttagagagcttgacgttagcaagaatgggatccaggaattccctgagaatattaagaattgcaaagtactcaccatcgtcgaggcctctgtcaatccgatctcaaagcttcccgacggctttagccaactgttaaatctgactcagctatatctaaacgatgcattcctcgaattcttgcctgcgaatttcggtcgcctgactaagttgcagattctggagctaagggaaaaccagttgaagatgctccccaaaacaatgaaccggctaacacagttagagaggttggacttagggtccaacgagtttaccgaggtcccggaagtgttggaacaactatccggactaaaggagttttggatggatgctaacaggctaacttttatccccggatttatcggttcgcttaaacaactgacttacctggacgtgtccaaaaataacattgaaatggtcgaagaaggaatctccacttgcgaaaatctgcaggatttactactgtcatccaatagcctccagcagcttcctgagacaattggctccctgaaaaacattaccaccctgaaaattgacgagaatcaattaatgtacctgcccgattcaatagggggactaatctctgttgaagaactggattgctcctttaatgaggtagaggccctaccctcatctatcggtcagcttaccaatcttcgtacatttgctgcggaccacaactacctgcagcagctacctcccgaaataggcagctggaagaacatcaccgtgctgtttcttcactcgaataaactcgaaactctacccgaggagatgggagacatgcagaagctgaaggtaataaacttgtctgataataggcttaaaaacctgcccttttccttcacaaaattacagcagctgaccgccatgtggctctctgacaaccagagcaagcccctcatcccgttacagaaggaaacagactccgaaactcaaaagatggtattaaccaattacatgtttccccaacagccgaggacggaagacgttatgtttatctccgataatgagtcctttaacccatctctctgggaggaacagaggaaacaacgcgctcaggtggcatttgagtgcgacgaggacaaagacgagcgcgaggcccctccacgagaggggaacttgaagcgttaccccaccccttatccagacgagctgaagaacatggtcaagacggtccagactatcgtccacaggcttaaggatgaagagacgaatgaggactcgggcagagacttgaagccccacgaagatcaacaggacattaacaaggatgtgggagtcaagacctccgagtccacaaccaccgtcaagtcaaaggtagatgaacgagaaaagtacatgatcggaaactcagtgcagaagattagcgaaccagaagctgagatttcacccggtagcctgcctgtaacggctaatatgaaggcttcagagaacctgaagcacatcgtcaatcatgatgatgtgttcgaggagtcggaagagttatcctctgatgaagagatgaagatggcggagatgaggccacctctcattgagacctcgattaaccagccgaaagtggtcgccctgtcaaataacaaaaaagatgataccaaggaaaccgattcactgagcgacgaggtgactcataattccaatcagaataattcaaactgctctagccccagccgcatgagcgactcagtgtcactcaacactgattcctcacaggatacttctttgtgcagcccagtgaaacagacacacattgacattaactccaaaatcaggcaggaagatgagaactttaatagcctgctccagaatggcgacatcctgaactcttccacagaagagaagtttaaagcccatgacaagaaggacttcaaccttcctgaatacgacctcaatgttgaagagcggctggtgctgatcgaaaaatctgtggattccaccgccaccgccgacgacacccacaagctggaccacataaatatgaatctaaataagcttatcacgaatgatacatttcagccagagattatggagaggagcaagacgcaggatatagtgcttgggacctcatttctgagtataaatagcaaagaagagaccgaacacctggagaatggaaacaagtacccgaacttggagagcgtaaataaggtcaatggccattctgaggaaactagccagagtcccaataggaccgagcctcacgattcggattgctcagtggatttaggcattagcaagtctacggaagatttatccccccagaagtccggccctgtaggctcggtggtaaagtcgcacagcatcacgaacatggagatagggggattgaaaatctatgacattctgagtgataatgggccacagcaaccatcgactactgtgaagattaccagcgccgtcgatggcaaaaatatcgtgaggtcgaagagtgcgacactgttatatgaccagcctctgcaggtttttacagggagtagttcctctagcgacttaatttccgggacgaaggcaatctttaagtttgattccaaccataaccccgaggagcccaacataatcaggggcccaacaagtggaccacagtccgctccgcagatatacggaccccctcagtacaacattcagtactctagctcagccgctgttaaagacacactgtggcattccaagcagaatcctcagatcgatcacgcctcattccctcctcaactgctgcccaggagcgaatctactgagaaccagagctatgcaaaacacagtgcaaacatgaatttctcgaatcacaacaacgtgcgggctaacaccgcttaccacctgcaccagcgcttaggaccggctagacatggagaaatgtgggccatctcccccaacgaccgcctaattccagccgtaacccgcagtaccattcaacggcaaagctcagttagcagtactgccagtgttaacctgggagatcctgggtcgacccgtcgtgctcaaatccctgagggcgactatctgtcttatagagagttccactccgcagggaggaccccacctatgatgcccggatcgcagcgaccgctcagcgccaggacttactccattgacggccctaacgcctccaggccccaaagtgccagaccatcaatcaacgaaatacctgagcgtaccatgagtgtctccgatttcaactattctagaacctctccttcaaagagacccaacgccagagtgggatccgagcatagtttgctcgaccctccaggtaagtccaaagttccgagggattggagggaacaagtcctgagacacatcgaagccaagaagcttgaaaagatgccactgagcaatggccaaatgggtcagcccctccggcctcaggcgaattacagccaaatccaccatccaccacaggcgtcagtcgctcgccatcctagtcgcgagcagttgatcgactacttgatgttaaaagttgcacatcagcccccttatacccaaccacactgttcccctagacaaggacatgagctggccaaacaagaaggcatctttgtgactcgcgtgcagcccgagggcccagcatctaagctactccagcctggggataagattatccaggccaacggatacagttttatcaatatagagcatggccaagccgtaagcctgctgaagaccttccaaaatacagtcgaactcatcatcgtaagagaagtcagttcgtag

SEQ ID NO: 199685 - DNA, 4083 bp, Artificial Sequence
  derived and/or modified sequence
atgacgactaagcggtcactttttgttaggctggtgccttgccgctgtctaaggggggaagaggaaaccgtgacaactttagactattctcattgctctctggaacaagtgccaaaggaaatcttcacgtttgagaaaacccttgaggagttatacctcgatgctaatcagatcgaggaattgcccaagcagctgtttaactgccagtctctccacaaattaagcctccccgataatgaccttacaaccctaccagcttccatcgcgaacctgattaacttaagggaactggacgtgtccaaaaatggcattcaggagtttccagagaatatcaagaactgcaaagtcctgaccatcgtggaggcctctgttaacccaatcagcaaactgcctgacgggtttagccaattactgaatctaacgcagctatacctaaacgacgccttcctggaattcctgccagcaaactttggcaggcttacaaagctgcaaattttggagctgagagagaaccaactgaagatgctgcccaaaacgatgaaccgtctgacacagttagagaggctggacttagggagcaatgagtttactgaggtgccagaggtgcttgaacaattgtccgggctcaaagagttctggatggatgctaataggttgacctttatcccgggattcattggtagcttgaaacagctcacttacttagatgtgtcgaaaaataacatcgagatggtggaggagggcatcagcacctgcgagaatcttcaggacctgctgttgagcagtaattctcttcagcagttgcctgagactattggctcactcaagaatatcacaaccctgaagatcgatgagaaccagctgatgtatctgcctgactccattggaggcctgatctccgttgaggaactcgactgcagtttcaacgaggtggaggcattgccatcttcaatcggccagctgactaatctcaggaccttcgcagcagaccataactacctgcagcaactgccccctgagattggcagctggaaaaatatcactgtgctgtttcttcactctaacaaactggaaaccttacctgaggaaatgggggacatgcagaagctcaaggtgatcaatctctctgataatcgcctaaagaatctgccattttctttcactaagttgcagcagttaactgccatgtggctcagtgacaaccagagtaagccgttgatccctctgcagaaagaaacagactcggagacccagaaaatggtgctgacaaactacatgtttccacaacagccccgtacagaggatgttatgtttatttctgataatgaatccttcaaccccagcctctgggaggagcagcggaagcagagggcccaggttgcctttgaatgcgatgaggacaaggatgagcgtgaggcaccacctagggagggcaatctcaagcgataccctacaccgtatcccgacgaactgaaaaacatggtaaagactgttcagaccattgtgcaccgactgaaggacgaggaaactaacgaggattccggtcgagacctcaagcctcacgaggaccagcaggacatcaacaaagacgtcggtgttaagaccagtgagtctacaacaacagtcaagtcaaaggtggatgagagggaaaagtacatgattggcaactccgtgcagaaaatctccgagcccgaagccgagatctccccaggatctctgccagtgaccgcgaacatgaaagcctcggagaacctgaagcacattgtgaaccacgacgatgtgttcgaagagtcggaggagttgtcttctgacgaggaaatgaaaatggctgagatgcgtccccctttaattgaaacctccataaatcaaccgaaagtcgtggcactaagcaacaataagaaggatgacacaaaggagacagactctctgtcagatgaagtcacccataattctaatcagaataattcaaattgtagctcccccagccgaatgtctgactctgtgtctctcaacactgattcgtctcaggatacttcgttatgctcacctgtcaagcagacacatatcgacatcaattcaaagattcgccaggaggatgagaactttaattccctgctccaaaacggcgatatcctcaatagcagcacggaagaaaaatttaaggcccatgacaagaaggacttcaatcttccggaatatgacctgaatgttgaggaaagactagtgctgatcgagaaatccgtggacagtactgcaaccgcggatgacactcacaagctggatcacataaacatgaacctcaacaagctcattacgaacgatacttttcaacccgagatcatggagcgaagtaagactcaagacatagtacttggcactagtttcctaagcataaattcaaaggaggaaactgaacatctcgagaatggcaacaaataccccaacttagagtccgtgaataaggttaatggacactcagaagagactagccagtcaccaaaccgaaccgagccacacgatagcgattgcagcgtggacctcggaatctccaagagtacggaagacctgagtccccagaagtctggacctgtcggctccgtggtgaaatcccacagcataactaatatggagatagggggactgaagatttatgatattttgagcgacaatggcccacagcaaccctcgactacagtgaagatcacatccgcagttgacggtaagaacattgtgcgtagcaagtcagccacactgctttacgaccagccattgcaggtgttcactggctcctcaagctcttccgacctcatatccgggacaaaggcaatcttcaagtttgactccaaccacaatccagaggagcctaatataatacgcggaccaacttcaggtccccagtctgcccctcagatttatggccctccacaatacaacattcagtatagtagctccgccgcagtcaaggataccctttggcattccaaacagaaccctcagatcgaccatgcctccttccccccacagctgctgccccgaagtgaatccacggaaaatcagagctatgcgaagcacagtgctaatatgaactttagtaaccataacaacgtacgcgctaacacagcttaccatctgcatcaacggctgggtccagctcgccacggcgaaatgtgggcgatttcccccaacgataggctgattccggcagttacaaggtccaccatacaaagacaatcctccgttagctctaccgctagcgtgaacttaggcgaccctgggagtacacggcgtgcacaaattcctgaaggcgactatctctcatatcgtgagttccactccgctggcagaactccacccatgatgccaggttcccagcggccactaagtgcccgaacatacagcatcgatgggcctaatgcttctaggcctcagagcgccagaccctctatcaacgagataccagaacggactatgtctgttagtgatttcaactactctcggacctcaccttcaaagcgacctaacgctagagtgggctctgagcattccctgctcgatccgccagggaaaagtaaagtccctcgggactggcgagaacaggtgttgcgacatatagaggcgaagaagctggagaaaatgccgctctcaaacggccagatggggcagcctctgagaccacaggcaagcgtcgctcgacacccttcccgggagcagttgatcgattatttgatgcttaaggtggcgcaccagccaccatacactcagccccactgcagcccccgtcagggccacgaactagccaaacaggagatcagggtgagagttgagaaagatccggagctgggcttcagcatcagtggcggagtgggcggtagagggaatcctttccgtccggatgatgacggcatattcgtcaccagagtgcagcccgagggaccggctagcaaattactccaacctggtgataaaataattcaggccaacgggtatagttttatcaacatcgagcacggccaggcagtcagccttctcaagaccttccagaatactgtggaacttatcattgtccgagaggtgagcagctag

SEQ ID NO: 199686 - DNA, 4116 bp, Artificial Sequence
  derived and/or modified sequence
atgactaccaaacgctcactgtttgtccgtctagtcccttgtagatgtctgcggggagaggaggagaccgtgacgacacttgattacagtcattgcagcctggaacaggtcccaaaggaaatcttcactttcgagaaaactttggaagagctctatttggatgcaaaccagattgaagaattaccaaagcaactttttaactgtcaatcgttgcataagttaagcttgccggacaatgatctgactacgctgcctgcttctatagctaatctgattaacttgagagaactagacgttagcaaaaacggcatccaggaattccctgaaaatatcaagaattgtaaagtgttaaccattgtggaggccagtgtgaacccaatcagtaagctgcccgatggtttttcgcagttgttaaacctgactcagctgtatctgaacgacgccttcctggagtttctgccagccaacttcggcaggttaaccaaactccaaattttagaactacgggaaaaccagttaaaaatgctgcccaaaacaatgaaccggttgacccaactggagagactggacctgggcagcaatgagttcactgaggtgcctgaggttttggagcagctttctggattgaaagagttttggatggacgccaaccgtctgacattcatccccggattcatcggctctctgaaacagcttacatatcttgatgtgtcaaaaaacaacatagagatggttgaagaggggataagtacctgcgaaaatcttcaggacttgttgcttagctctaacagcctgcagcagcttcctgagactattggatcactgaaaaatattactaccctaaagattgacgaaaaccaactcatgtatttgccagattccattggagggttgatatccgtggaagagctggactgctcctttaacgaggtggaagccctcccctccagcattggtcagcttaccaatcttaggacatttgccgctgatcacaattacctccagcagcttcccccagagatcgggtcttggaaaaacatcactgtgctgttcctccactcgaacaaattggagaccctgcccgaagagatgggggatatgcaaaagctgaaagtgatcaacttgtccgacaataggctgaagaacctgccattcagcttcaccaagcttcagcagctcacagctatgtggctaagcgataaccagagcaagcccctcattccactccagaaggaaactgacagtgagacgcagaaaatggtattgactaattacatgttcccacagcagccacggaccgaggatgtcatgttcatttccgacaatgaatctttcaatcctagtctatgggaggaacagaggaaacagagggcacaagtggcatttgagtgcgatgaagataaagatgagcgtgaagcaccacctagagaagggaacttgaagcggtaccccacgccgtatccggatgagttgaaaaacatggttaagactgtgcagaccatcgttcaccgcctcaaggatgaagagacgaacgaggactctgggagagatctcaaaccccatgaagaccagcaggacataaataaggacgtcggggtgaaaacctccgaatccaccacgacggtgaaaagtaaagtggatgagagggagaagtacatgatcggaaacagcgtccagaaaatttccgaaccggaggcagagatatctcccggatcccttccagtgacagccaatatgaaagcctccgagaatctgaaacatattgtcaaccacgacgacgtcttcgaagagtcagaggagctgagctcggatgaggagatgaagatggccgagatgaggccccctttaatcgagacctctatcaaccagccaaaggtggtcgctctgtcaaataacaagaaggacgacaccaaggaaacagacagcctctccgatgaggttacgcataatagcaatcagaacaattccaactgttccagccctagccggatgagtgactctgtgtcgctgaatactgacagctcacaggatacttccttgtgttcaccggttaaacagacgcacatcgatataaattctaagattagacaggaggatgaaaactttaatagtctgctgcagaatggggatatcttaaacagcagcaccgaagagaagtttaaagcacacgataagaaggacttcaacctcccggagtacgacctgaatgtggaggaacgtttggtattaatagagaaaagtgtcgactccactgcaacggcggacgacactcataaactggaccacataaatatgaatctcaacaaactcataaccaatgatactttccaacccgagattatggaacggtccaaaactcaagacatcgtgctggggacatcttttttaagcataaattctaaagaggaaaccgagcatctggagaacgggaacaaataccctaacttggaatccgtgaataaggtaaacggacacagtgaggaaaccagccaatcgcccaataggaccgagcctcatgattcagactgcagtgttgaccttgggatctctaagagtaccgaggatctaagtccacagaagtcaggccctgttggaagtgttgtgaaatcccactccataactaatatggaaatcggaggccttaaaatttatgacatcctgagcgacaatggaccccagcagccatccacaacagtcaaaattacgagcgcagtggacggcaaaaatattgttcgcagtaagagcgctactctcttgtatgaccaacctcttcaggtcttcacgggaagctcctccagtagcgacctgattagtggcacaaaagcgatttttaagtttgattcaaatcacaatcccgaggaacctaatatcattcgcggtcctaccagcggtcctcagtcggctccacaaatctacgggccacctcaatacaatatccagtactcttcttccgccgcagtcaaggatactctttggcacagtaagcagaatcctcaaatcgatcacgcaagctttcccccacagctactcccccgttccgagagcacagaaaatcagtcctacgccaagcatagtgctaacatgaatttttccaaccataataacgtcagagccaacacagcgtaccacttacatcaacgccttggccctgcccgacacggcgagatgtgggctatcagtccaaatgatcggttgattccggcagtgacacgctcaaccattcagcgccagagtagcgtgagttccaccgcatccgtgaatctaggggatccagggtcgacgcgcagagcccagatccccgagggagattacttgtcataccgggaattccacagcgctggaaggacaccaccaatgatgcctggatcccagcggcctctctcagctcgcacctatagtattgatgggccaaacgctagtaggccacagtccgctcgtccatctattaacgaaattcccgagcgcaccatgtctgtgagtgactttaactattctagaacatctcccagcaaacgtcccaacgctagggttggatcagaacacagcttgctcgaccccccaggcaaatctaaagtccccagggattggagagagcaggtcctgagacacattgaagctaaaaagttggagaaaatgcccttatcgaatgggcagatgggtcagcccttacgtccacaagccaattattcacaaattcatcatcctccacaggcaagtgtcgcaagacaccctagcagggaacagttgattgattatctgatgctgaaggtcgcccatcagcccccatatacccagccgcactgctcgcccagacagggacatgaacttgcaaagcaggaaattcgagtgcgggtcgaaaaggacccagaactgggcttctcaatctcaggcggagtgggcggtcggggaaatccgtttagacccgatgatgatggcatcttcgttaccagggtccagcctgagggcccagcatccaaactgctgcagccaggcgacaaaatcatccaggccaatggttactcttttattaatatcgagcatggtcaggctgtgagtctgctgaagacgtttcagaacacagttgagctgatcatcgtgcgagaggtatcaagttag

SEQ ID NO: 199687 - DNA, 4023 bp, Artificial Sequence
  derived and/or modified sequence
atgaccaccaagagaagcctgttcgtgagactggtgccctgcagatgcctgagaggcgaggaggagaccgtgaccaccctggactacagccactgcagcctggagcaggtgcccaaggagatcttcaccttcgagaagaccctggaggagctgtacctggacgccaaccagatcgaggagctgcccaagcagctgttcaactgccagagcctgcacaagctgagcctgcccgacaacgacctgaccaccctgcccgccagcatcgccaacctgatcaacctgagagagctggacgtgagcaagaacggcatccaggagttccccgagaacatcaagaactgcaaggtgctgaccatcgtggaggccagcgtgaaccccatcagcaagctgcccgacggcttcagccagctgctgaacctgacccagctgtacctgaacgacgccttcctggagttcctgcccgccaacttcggcagactgaccaagctgcagatcctggagctgagagagaaccagctgaagatgctgcccaagaccatgaacagactgacccagctggagagactggacctgggcagcaacgagttcaccgaggtgcccgaggtgctggagcagctgagcggcctgaaggagttctggatggacgccaacagactgaccttcatccccggcttcatcggcagcctgaagcagctgacctacctggacgtgagcaagaacaacatcgagatggtggaggagggcatcagcacctgcgagaacctgcaggacctgctgctgagcagcaacagcctgcagcagctgcccgagaccatcggcagcctgaagaacatcaccaccctgaagatcgacgagaaccagctgatgtacctgcccgacagcatcggcggcctgatcagcgtggaggagctggactgcagcttcaacgaggtggaggccctgcccagcagcatcggccagctgaccaacctgagaaccttcgccgccgaccacaactacctgcagcagctgccccccgagatcggcagctggaagaacatcaccgtgctgttcctgcacagcaacaagctggagaccctgcccgaggagatgggcgacatgcagaagctgaaggtgatcaacctgagcgacaacagactgaagaacctgcccttcagcttcaccaagctgcagcagctgaccgccatgtggctgagcgacaaccagagcaagcccctgatccccctgcagaaggagaccgacagcgagacccagaagatggtgctgaccaactacatgttcccccagcagcccagaaccgaggacgtgatgttcatcagcgacaacgagagcttcaaccccagcctgtgggaggagcagagaaagcagagagcccaggtggccttcgagtgcgacgaggacaaggacgagagagaggccccccccagagagggcaacctgaagagataccccaccccctaccccgacgagctgaagaacatggtgaagaccgtgcagaccatcgtgcacagactgaaggacgaggagaccaacgaggacagcggcagagacctgaagccccacgaggaccagcaggacatcaacaaggacgtgggcgtgaagaccagcgagagcaccaccaccgtgaagagcaaggtggacgagagagagaagtacatgatcggcaacagcgtgcagaagatcagcgagcccgaggccgagatcagccccggcagcctgcccgtgaccgccaacatgaaggccagcgagaacctgaagcacatcgtgaaccacgacgacgtgttcgaggagagcgaggagctgagcagcgacgaggagatgaagatggccgagatgagaccccccctgatcgagaccagcatcaaccagcccaaggtggtggccctgagcaacaacaagaaggacgacaccaaggagaccgacagcctgagcgacgaggtgacccacaacagcaaccagaacaacagcaactgcagcagccccagcagaatgagcgacagcgtgagcctgaacaccgacagcagccaggacaccagcctgtgcagccccgtgaagcagacccacatcgacatcaacagcaagatcagacaggaggacgagaacttcaacagcctgctgcagaacggcgacatcctgaacagcagcaccgaggagaagttcaaggcccacgacaagaaggacttcaacctgcccgagtacgacctgaacgtggaggagagactggtgctgatcgagaagagcgtggacagcaccgccaccgccgacgacacccacaagctggaccacatcaacatgaacctgaacaagctgatcaccaacgacaccttccagcccgagatcatggagagaagcaagacccaggacatcgtgctgggcaccagcttcctgagcatcaacagcaaggaggagaccgagcacctggagaacggcaacaagtaccccaacctggagagcgtgaacaaggtgaacggccacagcgaggagaccagccagagccccaacagaaccgagccccacgacagcgactgcagcgtggacctgggcatcagcaagagcaccgaggacctgagcccccagaagagcggccccgtgggcagcgtggtgaagagccacagcatcaccaacatggagatcggcggcctgaagatctacgacatcctgagcgacaacggcccccagcagcccagcaccaccgtgaagatcaccagcgccgtggacggcaagaacatcgtgagaagcaagagcgccaccctgctgtacgaccagcccctgcaggtgttcaccggcagcagcagcagcagcgacctgatcagcggcaccaaggccatcttcaagttcgacagcaaccacaaccccgaggagcccaacatcatcagaggccccaccagcggcccccagagcgccccccagatctacggccccccccagtacaacatccagtacagcagcagcgccgccgtgaaggacaccctgtggcacagcaagcagaacccccagatcgaccacgccagcttccccccccagctgctgcccagaagcgagagcaccgagaaccagagctacgccaagcacagcgccaacatgaacttcagcaaccacaacaacgtgagagccaacaccgcctaccacctgcaccagagactgggccccgccagacacggcgagatgtgggccatcagccccaacgacagactgatccccgccgtgaccagaagcaccatccagagacagagcagcgtgagcagcaccgccagcgtgaacctgggcgaccccggcagcaccagaagagcccagatccccgagggcgactacctgagctacagagagttccacagcgccggcagaaccccccccatgatgcccggcagccagagacccctgagcgccagaacctacagcatcgacggccccaacgccagcagaccccagagcgccagacccagcatcaacgagatccccgagagaaccatgagcgtgagcgacttcaactacagcagaaccagccccagcaagagacccaacgccagagtgggcagcgagcacagcctgctggacccccccggcaagagcaaggtgcccagagactggagagagcaggtgctgagacacatcgaggccaagaagctggagaagatgcccctgagcaacggccagatgggccagcccctgagaccccaggccaactacagccagatccaccaccccccccaggccagcgtggccagacaccccagcagagagcagctgatcgactacctgatgctgaaggtggcccaccagcccccctacacccagccccactgcagccccagacagggccacgagctggccaagcaggagggcatcttcgtgaccagagtgcagcccgagggccccgccagcaagctgctgcagcccggcgacaagatcatccaggccaacggctacagcttcatcaacatcgagcacggccaggccgtgagcctgctgaagaccttccagaacaccgtggagctgatcatcgtgagagaggtgagcagctag

SEQ ID NO: 199688 - DNA, 4083 bp, Artificial Sequence
  derived and/or modified sequence
atgaccaccaagagaagcctgttcgtgagactggtgccctgcagatgcctgagaggcgaggaggagaccgtgaccaccctggactacagccactgcagcctggagcaggtgcccaaggagatcttcaccttcgagaagaccctggaggagctgtacctggacgccaaccagatcgaggagctgcccaagcagctgttcaactgccagagcctgcacaagctgagcctgcccgacaacgacctgaccaccctgcccgccagcatcgccaacctgatcaacctgagagagctggacgtgagcaagaacggcatccaggagttccccgagaacatcaagaactgcaaggtgctgaccatcgtggaggccagcgtgaaccccatcagcaagctgcccgacggcttcagccagctgctgaacctgacccagctgtacctgaacgacgccttcctggagttcctgcccgccaacttcggcagactgaccaagctgcagatcctggagctgagagagaaccagctgaagatgctgcccaagaccatgaacagactgacccagctggagagactggacctgggcagcaacgagttcaccgaggtgcccgaggtgctggagcagctgagcggcctgaaggagttctggatggacgccaacagactgaccttcatccccggcttcatcggcagcctgaagcagctgacctacctggacgtgagcaagaacaacatcgagatggtggaggagggcatcagcacctgcgagaacctgcaggacctgctgctgagcagcaacagcctgcagcagctgcccgagaccatcggcagcctgaagaacatcaccaccctgaagatcgacgagaaccagctgatgtacctgcccgacagcatcggcggcctgatcagcgtggaggagctggactgcagcttcaacgaggtggaggccctgcccagcagcatcggccagctgaccaacctgagaaccttcgccgccgaccacaactacctgcagcagctgccccccgagatcggcagctggaagaacatcaccgtgctgttcctgcacagcaacaagctggagaccctgcccgaggagatgggcgacatgcagaagctgaaggtgatcaacctgagcgacaacagactgaagaacctgcccttcagcttcaccaagctgcagcagctgaccgccatgtggctgagcgacaaccagagcaagcccctgatccccctgcagaaggagaccgacagcgagacccagaagatggtgctgaccaactacatgttcccccagcagcccagaaccgaggacgtgatgttcatcagcgacaacgagagcttcaaccccagcctgtgggaggagcagagaaagcagagagcccaggtggccttcgagtgcgacgaggacaaggacgagagagaggccccccccagagagggcaacctgaagagataccccaccccctaccccgacgagctgaagaacatggtgaagaccgtgcagaccatcgtgcacagactgaaggacgaggagaccaacgaggacagcggcagagacctgaagccccacgaggaccagcaggacatcaacaaggacgtgggcgtgaagaccagcgagagcaccaccaccgtgaagagcaaggtggacgagagagagaagtacatgatcggcaacagcgtgcagaagatcagcgagcccgaggccgagatcagccccggcagcctgcccgtgaccgccaacatgaaggccagcgagaacctgaagcacatcgtgaaccacgacgacgtgttcgaggagagcgaggagctgagcagcgacgaggagatgaagatggccgagatgagaccccccctgatcgagaccagcatcaaccagcccaaggtggtggccctgagcaacaacaagaaggacgacaccaaggagaccgacagcctgagcgacgaggtgacccacaacagcaaccagaacaacagcaactgcagcagccccagcagaatgagcgacagcgtgagcctgaacaccgacagcagccaggacaccagcctgtgcagccccgtgaagcagacccacatcgacatcaacagcaagatcagacaggaggacgagaacttcaacagcctgctgcagaacggcgacatcctgaacagcagcaccgaggagaagttcaaggcccacgacaagaaggacttcaacctgcccgagtacgacctgaacgtggaggagagactggtgctgatcgagaagagcgtggacagcaccgccaccgccgacgacacccacaagctggaccacatcaacatgaacctgaacaagctgatcaccaacgacaccttccagcccgagatcatggagagaagcaagacccaggacatcgtgctgggcaccagcttcctgagcatcaacagcaaggaggagaccgagcacctggagaacggcaacaagtaccccaacctggagagcgtgaacaaggtgaacggccacagcgaggagaccagccagagccccaacagaaccgagccccacgacagcgactgcagcgtggacctgggcatcagcaagagcaccgaggacctgagcccccagaagagcggccccgtgggcagcgtggtgaagagccacagcatcaccaacatggagatcggcggcctgaagatctacgacatcctgagcgacaacggcccccagcagcccagcaccaccgtgaagatcaccagcgccgtggacggcaagaacatcgtgagaagcaagagcgccaccctgctgtacgaccagcccctgcaggtgttcaccggcagcagcagcagcagcgacctgatcagcggcaccaaggccatcttcaagttcgacagcaaccacaaccccgaggagcccaacatcatcagaggccccaccagcggcccccagagcgccccccagatctacggccccccccagtacaacatccagtacagcagcagcgccgccgtgaaggacaccctgtggcacagcaagcagaacccccagatcgaccacgccagcttccccccccagctgctgcccagaagcgagagcaccgagaaccagagctacgccaagcacagcgccaacatgaacttcagcaaccacaacaacgtgagagccaacaccgcctaccacctgcaccagagactgggccccgccagacacggcgagatgtgggccatcagccccaacgacagactgatccccgccgtgaccagaagcaccatccagagacagagcagcgtgagcagcaccgccagcgtgaacctgggcgaccccggcagcaccagaagagcccagatccccgagggcgactacctgagctacagagagttccacagcgccggcagaaccccccccatgatgcccggcagccagagacccctgagcgccagaacctacagcatcgacggccccaacgccagcagaccccagagcgccagacccagcatcaacgagatccccgagagaaccatgagcgtgagcgacttcaactacagcagaaccagccccagcaagagacccaacgccagagtgggcagcgagcacagcctgctggacccccccggcaagagcaaggtgcccagagactggagagagcaggtgctgagacacatcgaggccaagaagctggagaagatgcccctgagcaacggccagatgggccagcccctgagaccccaggccagcgtggccagacaccccagcagagagcagctgatcgactacctgatgctgaaggtggcccaccagcccccctacacccagccccactgcagccccagacagggccacgagctggccaagcaggagatcagagtgagagtggagaaggaccccgagctgggcttcagcatcagcggcggcgtgggcggcagaggcaaccccttcagacccgacgacgacggcatcttcgtgaccagagtgcagcccgagggccccgccagcaagctgctgcagcccggcgacaagatcatccaggccaacggctacagcttcatcaacatcgagcacggccaggccgtgagcctgctgaagaccttccagaacaccgtggagctgatcatcgtgagagaggtgagcagctag

SEQ ID NO: 199689 - DNA, 4116 bp, Artificial Sequence
  derived and/or modified sequence
atgaccaccaagagaagcctgttcgtgagactggtgccctgcagatgcctgagaggcgaggaggagaccgtgaccaccctggactacagccactgcagcctggagcaggtgcccaaggagatcttcaccttcgagaagaccctggaggagctgtacctggacgccaaccagatcgaggagctgcccaagcagctgttcaactgccagagcctgcacaagctgagcctgcccgacaacgacctgaccaccctgcccgccagcatcgccaacctgatcaacctgagagagctggacgtgagcaagaacggcatccaggagttccccgagaacatcaagaactgcaaggtgctgaccatcgtggaggccagcgtgaaccccatcagcaagctgcccgacggcttcagccagctgctgaacctgacccagctgtacctgaacgacgccttcctggagttcctgcccgccaacttcggcagactgaccaagctgcagatcctggagctgagagagaaccagctgaagatgctgcccaagaccatgaacagactgacccagctggagagactggacctgggcagcaacgagttcaccgaggtgcccgaggtgctggagcagctgagcggcctgaaggagttctggatggacgccaacagactgaccttcatccccggcttcatcggcagcctgaagcagctgacctacctggacgtgagcaagaacaacatcgagatggtggaggagggcatcagcacctgcgagaacctgcaggacctgctgctgagcagcaacagcctgcagcagctgcccgagaccatcggcagcctgaagaacatcaccaccctgaagatcgacgagaaccagctgatgtacctgcccgacagcatcggcggcctgatcagcgtggaggagctggactgcagcttcaacgaggtggaggccctgcccagcagcatcggccagctgaccaacctgagaaccttcgccgccgaccacaactacctgcagcagctgccccccgagatcggcagctggaagaacatcaccgtgctgttcctgcacagcaacaagctggagaccctgcccgaggagatgggcgacatgcagaagctgaaggtgatcaacctgagcgacaacagactgaagaacctgcccttcagcttcaccaagctgcagcagctgaccgccatgtggctgagcgacaaccagagcaagcccctgatccccctgcagaaggagaccgacagcgagacccagaagatggtgctgaccaactacatgttcccccagcagcccagaaccgaggacgtgatgttcatcagcgacaacgagagcttcaaccccagcctgtgggaggagcagagaaagcagagagcccaggtggccttcgagtgcgacgaggacaaggacgagagagaggccccccccagagagggcaacctgaagagataccccaccccctaccccgacgagctgaagaacatggtgaagaccgtgcagaccatcgtgcacagactgaaggacgaggagaccaacgaggacagcggcagagacctgaagccccacgaggaccagcaggacatcaacaaggacgtgggcgtgaagaccagcgagagcaccaccaccgtgaagagcaaggtggacgagagagagaagtacatgatcggcaacagcgtgcagaagatcagcgagcccgaggccgagatcagccccggcagcctgcccgtgaccgccaacatgaaggccagcgagaacctgaagcacatcgtgaaccacgacgacgtgttcgaggagagcgaggagctgagcagcgacgaggagatgaagatggccgagatgagaccccccctgatcgagaccagcatcaaccagcccaaggtggtggccctgagcaacaacaagaaggacgacaccaaggagaccgacagcctgagcgacgaggtgacccacaacagcaaccagaacaacagcaactgcagcagccccagcagaatgagcgacagcgtgagcctgaacaccgacagcagccaggacaccagcctgtgcagccccgtgaagcagacccacatcgacatcaacagcaagatcagacaggaggacgagaacttcaacagcctgctgcagaacggcgacatcctgaacagcagcaccgaggagaagttcaaggcccacgacaagaaggacttcaacctgcccgagtacgacctgaacgtggaggagagactggtgctgatcgagaagagcgtggacagcaccgccaccgccgacgacacccacaagctggaccacatcaacatgaacctgaacaagctgatcaccaacgacaccttccagcccgagatcatggagagaagcaagacccaggacatcgtgctgggcaccagcttcctgagcatcaacagcaaggaggagaccgagcacctggagaacggcaacaagtaccccaacctggagagcgtgaacaaggtgaacggccacagcgaggagaccagccagagccccaacagaaccgagccccacgacagcgactgcagcgtggacctgggcatcagcaagagcaccgaggacctgagcccccagaagagcggccccgtgggcagcgtggtgaagagccacagcatcaccaacatggagatcggcggcctgaagatctacgacatcctgagcgacaacggcccccagcagcccagcaccaccgtgaagatcaccagcgccgtggacggcaagaacatcgtgagaagcaagagcgccaccctgctgtacgaccagcccctgcaggtgttcaccggcagcagcagcagcagcgacctgatcagcggcaccaaggccatcttcaagttcgacagcaaccacaaccccgaggagcccaacatcatcagaggccccaccagcggcccccagagcgccccccagatctacggccccccccagtacaacatccagtacagcagcagcgccgccgtgaaggacaccctgtggcacagcaagcagaacccccagatcgaccacgccagcttccccccccagctgctgcccagaagcgagagcaccgagaaccagagctacgccaagcacagcgccaacatgaacttcagcaaccacaacaacgtgagagccaacaccgcctaccacctgcaccagagactgggccccgccagacacggcgagatgtgggccatcagccccaacgacagactgatccccgccgtgaccagaagcaccatccagagacagagcagcgtgagcagcaccgccagcgtgaacctgggcgaccccggcagcaccagaagagcccagatccccgagggcgactacctgagctacagagagttccacagcgccggcagaaccccccccatgatgcccggcagccagagacccctgagcgccagaacctacagcatcgacggccccaacgccagcagaccccagagcgccagacccagcatcaacgagatccccgagagaaccatgagcgtgagcgacttcaactacagcagaaccagccccagcaagagacccaacgccagagtgggcagcgagcacagcctgctggacccccccggcaagagcaaggtgcccagagactggagagagcaggtgctgagacacatcgaggccaagaagctggagaagatgcccctgagcaacggccagatgggccagcccctgagaccccaggccaactacagccagatccaccaccccccccaggccagcgtggccagacaccccagcagagagcagctgatcgactacctgatgctgaaggtggcccaccagcccccctacacccagccccactgcagccccagacagggccacgagctggccaagcaggagatcagagtgagagtggagaaggaccccgagctgggcttcagcatcagcggcggcgtgggcggcagaggcaaccccttcagacccgacgacgacggcatcttcgtgaccagagtgcagcccgagggccccgccagcaagctgctgcagcccggcgacaagatcatccaggccaacggctacagcttcatcaacatcgagcacggccaggccgtgagcctgctgaagaccttccagaacaccgtggagctgatcatcgtgagagaggtgagcagctag

SEQ ID NO: 199690 - DNA, 6805 bp, Artificial Sequence
  derived and/or modified sequence
cggcggagatcctcgttggggctgggaaactcctgcaaaactcgagaccaggaagccagcccgcaccccaacccccaccaaagccacctactcttcttctgtgggaggccagtccacatccgctctcacccgagagagatattcagctggatccaaagtgactgatgaagggaaggaaatcatgtcaagcgaagccttgaaaaagctgccctgagacggtgtcccgccgaaagaatgttggctcaattaagaaacatcagggagataaattcaacccagtgtgtctaaaaatgactacaaaacgaagtttgtttgtgcggttggtaccatgtcgctgtctacgaggggaagaggagactgtcactactcttgattattctcattgcagcttagaacaagttccgaaagagatttttacttttgaaaaaaccttggaggaactctatttagatgctaatcagattgaagagcttccaaagcaactttttaactgtcagtctttacacaaactgagtttgccagacaatgatttaacaacgttaccagcatccattgcaaaccttattaatctcagggaactggatgtcagcaagaatggaatacaggagtttccagaaaatataaaaaattgtaaagttttgacaattgtggaggccagtgtaaaccctatttccaagctccctgatggattttctcagctgttaaacctaacccagttgtatctgaatgatgcttttcttgagttcttgccagcaaattttggcagattaactaaactccaaatattagagcttagagaaaaccagttaaaaatgttgcctaaaactatgaatagactgacccagctggaaagactggatttgggaagtaacgaattcacggaagtgcctgaagtacttgagcaactaagtggattgaaagagttttggatggatgctaatagactgacttttattccagggtttattggtagtttgaaacagctcacatatttggatgtttctaaaaataatattgaaatggttgaagaaggaatttcaacatgtgaaaaccttcaagacctcctattatcaagcaattcacttcagcagcttcctgagactattggttcgttgaagaatataacaacgcttaaaatagatgaaaaccagttaatgtatctgccagactctataggagggttaatatcagtagaagaactggattgtagtttcaatgaagttgaagctttgccttcatctattgggcagcttactaacttaagaacttttgctgctgatcataattacttacagcagttgcccccagagattggaagctggaaaaatataactgtgctgtttctccattccaataaacttgagacacttccagaggaaatgggtgatatgcaaaaattaaaagtcattaatttaagtgataatagattaaagaatttaccctttagctttacaaagctacagcaattgacagctatgtggctctcagataatcagtccaaacccctgatacctcttcaaaaagaaactgattcagagacccagaaaatggtgcttaccaactacatgttccctcaacagccaaggactgaggatgttatgtttatatcagataatgaaagttttaacccttcattgtgggaggaacagaggaaacagcgggctcaagttgcatttgaatgtgatgaagacaaagatgaaagggaggcacctcccagggagggaaatttaaaaagatatccaacaccatacccagatgagcttaagaatatggtcaaaactgttcaaaccattgtacatagattaaaagatgaagagaccaatgaagactcaggaagagatttgaaaccacatgaagatcaacaagatataaataaagatgtgggtgtgaagacctcagaaagtactactacagtaaaaagcaaagttgatgaaagagaaaaatatatgataggaaactctgtacagaagatcagtgaacctgaagctgagattagtcctgggagtttaccagtgactgcaaatatgaaagcctctgagaacttgaagcatattgttaaccatgatgatgtttttgaggaatctgaagaactttcttctgatgaagagatgaaaatggcggagatgcgaccaccattaattgaaacctctattaaccagccaaaagtcgtagcacttagtaataacaaaaaagatgatacaaaggaaacagattctttatcagatgaagttacacacaatagcaatcagaataacagcaattgttcttctccatctcggatgtctgattcagtttctcttaatactgatagtagtcaagacacctcactctgctctccagtgaaacaaactcatattgatattaattccaaaatcaggcaagaagatgaaaattttaacagccttttacaaaatggagatattttaaacagttcaacagaggaaaagttcaaagctcatgataaaaaagattttaacttacctgaatatgatttgaatgttgaagagcgattagttctaattgagaaaagtgttgactcaacagccacagctgatgacactcacaaattagatcatatcaatatgaatcttaataaacttataactaatgatacatttcaaccagagatcatggaaagatcaaaaacacaggatattgtgcttggaacaagctttttaagcattaattctaaagaggaaactgagcacttggaaaatggaaacaagtatcctaatttggaatccgtaaataaggtaaatggacattctgaggaaacttcccagtctcctaataggactgaaccacatgacagtgattgttctgttgacttaggtatttccaaaagcactgaagatctctcccctcagaaaagtggtccagttggatctgttgtgaaatctcatagcataactaatatggagattggagggctaaaaatctatgatattcttagtgataatggacctcagcagccaagtacaaccgttaaaatcacatctgctgttgatggaaaaaatatagtcaggagcaagtctgccacactgttgtatgatcaaccattgcaggtatttactggttcttcctcatcttctgatttaatatcaggaacaaaggcaattttcaagtttgattcaaatcataatcccgaagagccaaatataataagaggccccacaagtggcccacaatctgcacctcaaatatatggtcctccacagtataatatccaatacagtagcagtgctgcagtcaaagacactttgtggcactccaaacaaaatccccaaatagaccatgccagttttcctcctcagctccttcctagatcagagagcacagaaaatcaaagttatgctaaacattctgccaatatgaatttctctaatcataacaatgttcgagctaatactgcataccatttacatcagagacttggcccagcaagacatggggaaatgtgggccatctcaccaaacgaccgacttattcctgcagtaactcgaagtacaatccagcgacaaagtagtgtgtcctccacagcctctgtaaatcttggtgatccaggctctacaaggcgggctcagattcctgaaggagattatttatcatacagagagttccactcagcgggaagaactcctccaatgatgccaggatcacagagacccctttctgcacgaacatacagcatagatggtccaaatgcatcaagacctcagagtgctcgaccctctattaatgaaataccagagagaactatgtcagttagtgatttcaattattcacggactagtccttcaaaaagaccaaatgcaagggttggttctgagcattctttattagatcctccaggaaaaagtaaagttcctcgtgactggagagaacaagtacttcgacatattgaagccaaaaagttagaaaagatgcctttgagtaatggacagatgggccagcctctcaggcctcaggcaaattatagtcaaatacatcacccccctcaggcatctgtggcaaggcatccctctagagaacaactaattgattacttgatgctgaaagtggcccaccagcctccatatacacagccccattgttctcctagacaaggccatgaactggcaaaacaagagggtatatttgtaacaagggtacaacctgaaggaccagcatcaaaattactgcagccaggtgataaaattattcaggctaatggctacagttttataaatattgaacatggacaagcagtgtccttgctaaaaactttccagaatacagttgaactcatcattgtacgagaagtttcctcataagcactgtggacaaaaaaagcggggaagacagcaagatttattggaagatacttacaggggaaattaatattttgactatttttatatataaagaagaactcaaaaaattatgttcaaatttgtacattaatgaaataatggaacttgtggttagagggaaagaaccactgtacagaatataaaggagactgttgaattcataccatataaaacttgttaggtttttaaacatagcaatcaaggctacaaaaacaaacctgtgttgtttttgtatagattgtaggtttatttttggatttcatatacatgactgaactgtgtgcaaggcaatagttagccttgattttagcccagagacagatggcagagctatctctctcatagcttttatgcccttatttttattcaactggtattaatgtttttctcctgaaactactttttttgatgtgggcaagagatttgaagtgttggcttttgctatgtgcatattgaattgaagagtgagtaggtgaaggtggtgctggtgggttcactttccaaggccagactaaaacagttattttctataaaaatctggaagcaaagaatggggatggggagagctacgtggtagtatgtttttattaggagaataatgcaataaaatatgtaatgtcttttttataaagcaaaaaagacaataattgcatttatgagctcggcaggatctgttcttgtcatagccattgactatacatttgctactggtgattcagtttttaattttttagtcacaggaaatttttaactctactgtagatgcatgtccatgcattttctgtgttatggaaatccactgatttttttttttttttcaaatggtggtacttgcaatctgttttataattagtgctccatttaaatctaatttataatttttattttaagcagcaaatgaaacaaaaatggccagttttaagattgtgttgcctgtaacacaaaatgttacgaaggtttaggaaagcctctttgatttttgtttggccttgcattgccttggtaaagtaaaaggaaacagtacacttggagctaggaaaccaaagcaagctttgtgaaactggcacagtgatagagaattgctgtggagagttatagagcaaagggatgggtccttgaggcctgccagtgtgtaaaggtgttcaaataaagggctgtttctacaggtaacattaaatgtgaactcaacacttccagagtctttaaagggtttctatgtgtatcagtgtaatagtgttttaccaccaactgcctttctttgttcctagttactgtaacaaatatttgatgatagaggtttattaattttgtttatccagaccattaattttatttgtttttgttctatgtaatcaaataaaatttgagtaacatgtaatggtaaggattaatgcatggttatttggaccagaaaaaagtgccatagaagaccaataactgtttagttgaggctagtctggaacctttcattagagcaatatttggttattgcacttcatttttatttactaagaaatgcaatttgggaatttttaatctgttatgctttgtttatcaaccttgattttaattaagacttttataagactagcttaaaacaccaaccaacattatttttgcaaaagtgagttggactcactttccattcttgctagtcagagtaagtaggcagcacttttaaaaatatgtgaactcaaatattgcacttctttcaagatgttatcaattggttattgtactgtatagttttaataattttgattgaaaccctttaacaactctttgtaaattttaactcattttagttgattttcagtactatttacataggaattgatttttatggatatagtagaagaaatgtgctgtattttgataaaattcacttattgtatgtgtgttgtaatctaaaaaaaaaaagaatgacaaacagcttctttaagacaagtctcggtgttccctttattcttagtttgtttttaaatattaattttggcattctaaaatagctaacatttcttttattgatttcagattttcacaggcacattctacttttaatcagaaatatatttaataagtataattgtgaagttttcaactactttaccttgaaccacatataccaattataattttggaaaaggaattaagcctcacggaacaatggatcttcagcaaaccttaacttcattgtctgcacattacattgaagtattataaatgcaacagatgttatatgcactggcattttatcctactctagttagttaaaattttatagtattcttgcaacacataaagttgcgtaagaaactttaccaagaggagtattatagccaagttttctttgaaagtattggaaaactaaaattaaatgacaaggactttgaattagaattttgctgtaataaagtttcaaaatttgaataaaataattaaattttttgagg

SEQ ID NO: 199691 - DNA, 6865 bp, Artificial Sequence
  derived and/or modified sequence
cggcggagatcctcgttggggctgggaaactcctgcaaaactcgagaccaggaagccagcccgcaccccaacccccaccaaagccacctactcttcttctgtgggaggccagtccacatccgctctcacccgagagagatattcagctggatccaaagtgactgatgaagggaaggaaatcatgtcaagcgaagccttgaaaaagctgccctgagacggtgtcccgccgaaagaatgttggctcaattaagaaacatcagggagataaattcaacccagtgtgtctaaaaatgactacaaaacgaagtttgtttgtgcggttggtaccatgtcgctgtctacgaggggaagaggagactgtcactactcttgattattctcattgcagcttagaacaagttccgaaagagatttttacttttgaaaaaaccttggaggaactctatttagatgctaatcagattgaagagcttccaaagcaactttttaactgtcagtctttacacaaactgagtttgccagacaatgatttaacaacgttaccagcatccattgcaaaccttattaatctcagggaactggatgtcagcaagaatggaatacaggagtttccagaaaatataaaaaattgtaaagttttgacaattgtggaggccagtgtaaaccctatttccaagctccctgatggattttctcagctgttaaacctaacccagttgtatctgaatgatgcttttcttgagttcttgccagcaaattttggcagattaactaaactccaaatattagagcttagagaaaaccagttaaaaatgttgcctaaaactatgaatagactgacccagctggaaagactggatttgggaagtaacgaattcacggaagtgcctgaagtacttgagcaactaagtggattgaaagagttttggatggatgctaatagactgacttttattccagggtttattggtagtttgaaacagctcacatatttggatgtttctaaaaataatattgaaatggttgaagaaggaatttcaacatgtgaaaaccttcaagacctcctattatcaagcaattcacttcagcagcttcctgagactattggttcgttgaagaatataacaacgcttaaaatagatgaaaaccagttaatgtatctgccagactctataggagggttaatatcagtagaagaactggattgtagtttcaatgaagttgaagctttgccttcatctattgggcagcttactaacttaagaacttttgctgctgatcataattacttacagcagttgcccccagagattggaagctggaaaaatataactgtgctgtttctccattccaataaacttgagacacttccagaggaaatgggtgatatgcaaaaattaaaagtcattaatttaagtgataatagattaaagaatttaccctttagctttacaaagctacagcaattgacagctatgtggctctcagataatcagtccaaacccctgatacctcttcaaaaagaaactgattcagagacccagaaaatggtgcttaccaactacatgttccctcaacagccaaggactgaggatgttatgtttatatcagataatgaaagttttaacccttcattgtgggaggaacagaggaaacagcgggctcaagttgcatttgaatgtgatgaagacaaagatgaaagggaggcacctcccagggagggaaatttaaaaagatatccaacaccatacccagatgagcttaagaatatggtcaaaactgttcaaaccattgtacatagattaaaagatgaagagaccaatgaagactcaggaagagatttgaaaccacatgaagatcaacaagatataaataaagatgtgggtgtgaagacctcagaaagtactactacagtaaaaagcaaagttgatgaaagagaaaaatatatgataggaaactctgtacagaagatcagtgaacctgaagctgagattagtcctgggagtttaccagtgactgcaaatatgaaagcctctgagaacttgaagcatattgttaaccatgatgatgtttttgaggaatctgaagaactttcttctgatgaagagatgaaaatggcggagatgcgaccaccattaattgaaacctctattaaccagccaaaagtcgtagcacttagtaataacaaaaaagatgatacaaaggaaacagattctttatcagatgaagttacacacaatagcaatcagaataacagcaattgttcttctccatctcggatgtctgattcagtttctcttaatactgatagtagtcaagacacctcactctgctctccagtgaaacaaactcatattgatattaattccaaaatcaggcaagaagatgaaaattttaacagccttttacaaaatggagatattttaaacagttcaacagaggaaaagttcaaagctcatgataaaaaagattttaacttacctgaatatgatttgaatgttgaagagcgattagttctaattgagaaaagtgttgactcaacagccacagctgatgacactcacaaattagatcatatcaatatgaatcttaataaacttataactaatgatacatttcaaccagagatcatggaaagatcaaaaacacaggatattgtgcttggaacaagctttttaagcattaattctaaagaggaaactgagcacttggaaaatggaaacaagtatcctaatttggaatccgtaaataaggtaaatggacattctgaggaaacttcccagtctcctaataggactgaaccacatgacagtgattgttctgttgacttaggtatttccaaaagcactgaagatctctcccctcagaaaagtggtccagttggatctgttgtgaaatctcatagcataactaatatggagattggagggctaaaaatctatgatattcttagtgataatggacctcagcagccaagtacaaccgttaaaatcacatctgctgttgatggaaaaaatatagtcaggagcaagtctgccacactgttgtatgatcaaccattgcaggtatttactggttcttcctcatcttctgatttaatatcaggaacaaaggcaattttcaagtttgattcaaatcataatcccgaagagccaaatataataagaggccccacaagtggcccacaatctgcacctcaaatatatggtcctccacagtataatatccaatacagtagcagtgctgcagtcaaagacactttgtggcactccaaacaaaatccccaaatagaccatgccagttttcctcctcagctccttcctagatcagagagcacagaaaatcaaagttatgctaaacattctgccaatatgaatttctctaatcataacaatgttcgagctaatactgcataccatttacatcagagacttggcccagcaagacatggggaaatgtgggccatctcaccaaacgaccgacttattcctgcagtaactcgaagtacaatccagcgacaaagtagtgtgtcctccacagcctctgtaaatcttggtgatccaggctctacaaggcgggctcagattcctgaaggagattatttatcatacagagagttccactcagcgggaagaactcctccaatgatgccaggatcacagagacccctttctgcacgaacatacagcatagatggtccaaatgcatcaagacctcagagtgctcgaccctctattaatgaaataccagagagaactatgtcagttagtgatttcaattattcacggactagtccttcaaaaagaccaaatgcaagggttggttctgagcattctttattagatcctccaggaaaaagtaaagttcctcgtgactggagagaacaagtacttcgacatattgaagccaaaaagttagaaaagatgcctttgagtaatggacagatgggccagcctctcaggcctcaggcatctgtggcaaggcatccctctagagaacaactaattgattacttgatgctgaaagtggcccaccagcctccatatacacagccccattgttctcctagacaaggccatgaactggcaaaacaagagattcgagtgagggttgaaaaggatccagaacttggatttagcatatcaggtggtgtcgggggtagaggaaacccattcagacctgatgatgatggtatatttgtaacaagggtacaacctgaaggaccagcatcaaaattactgcagccaggtgataaaattattcaggctaatggctacagttttataaatattgaacatggacaagcagtgtccttgctaaaaactttccagaatacagttgaactcatcattgtacgagaagtttcctcataagcactgtggacaaaaaaagcggggaagacagcaagatttattggaagatacttacaggggaaattaatattttgactatttttatatataaagaagaactcaaaaaattatgttcaaatttgtacattaatgaaataatggaacttgtggttagagggaaagaaccactgtacagaatataaaggagactgttgaattcataccatataaaacttgttaggtttttaaacatagcaatcaaggctacaaaaacaaacctgtgttgtttttgtatagattgtaggtttatttttggatttcatatacatgactgaactgtgtgcaaggcaatagttagccttgattttagcccagagacagatggcagagctatctctctcatagcttttatgcccttatttttattcaactggtattaatgtttttctcctgaaactactttttttgatgtgggcaagagatttgaagtgttggcttttgctatgtgcatattgaattgaagagtgagtaggtgaaggtggtgctggtgggttcactttccaaggccagactaaaacagttattttctataaaaatctggaagcaaagaatggggatggggagagctacgtggtagtatgtttttattaggagaataatgcaataaaatatgtaatgtcttttttataaagcaaaaaagacaataattgcatttatgagctcggcaggatctgttcttgtcatagccattgactatacatttgctactggtgattcagtttttaattttttagtcacaggaaatttttaactctactgtagatgcatgtccatgcattttctgtgttatggaaatccactgatttttttttttttttcaaatggtggtacttgcaatctgttttataattagtgctccatttaaatctaatttataatttttattttaagcagcaaatgaaacaaaaatggccagttttaagattgtgttgcctgtaacacaaaatgttacgaaggtttaggaaagcctctttgatttttgtttggccttgcattgccttggtaaagtaaaaggaaacagtacacttggagctaggaaaccaaagcaagctttgtgaaactggcacagtgatagagaattgctgtggagagttatagagcaaagggatgggtccttgaggcctgccagtgtgtaaaggtgttcaaataaagggctgtttctacaggtaacattaaatgtgaactcaacacttccagagtctttaaagggtttctatgtgtatcagtgtaatagtgttttaccaccaactgcctttctttgttcctagttactgtaacaaatatttgatgatagaggtttattaattttgtttatccagaccattaattttatttgtttttgttctatgtaatcaaataaaatttgagtaacatgtaatggtaaggattaatgcatggttatttggaccagaaaaaagtgccatagaagaccaataactgtttagttgaggctagtctggaacctttcattagagcaatatttggttattgcacttcatttttatttactaagaaatgcaatttgggaatttttaatctgttatgctttgtttatcaaccttgattttaattaagacttttataagactagcttaaaacaccaaccaacattatttttgcaaaagtgagttggactcactttccattcttgctagtcagagtaagtaggcagcacttttaaaaatatgtgaactcaaatattgcacttctttcaagatgttatcaattggttattgtactgtatagttttaataattttgattgaaaccctttaacaactctttgtaaattttaactcattttagttgattttcagtactatttacataggaattgatttttatggatatagtagaagaaatgtgctgtattttgataaaattcacttattgtatgtgtgttgtaatctaaaaaaaaaaagaatgacaaacagcttctttaagacaagtctcggtgttccctttattcttagtttgtttttaaatattaattttggcattctaaaatagctaacatttcttttattgatttcagattttcacaggcacattctacttttaatcagaaatatatttaataagtataattgtgaagttttcaactactttaccttgaaccacatataccaattataattttggaaaaggaattaagcctcacggaacaatggatcttcagcaaaccttaacttcattgtctgcacattacattgaagtattataaatgcaacagatgttatatgcactggcattttatcctactctagttagttaaaattttatagtattcttgcaacacataaagttgcgtaagaaactttaccaagaggagtattatagccaagttttctttgaaagtattggaaaactaaaattaaatgacaaggactttgaattagaattttgctgtaataaagtttcaaaatttgaataaaataattaaattttttgagg

SEQ ID NO: 199692 - DNA, 6410 bp, Artificial Sequence
  derived and/or modified sequence
ttttgtttttttttttttcggcggagatcctcgttggggctgggaaactcctgcaaaactcgagaccaggaagccagcccgcaccccaacccccaccaaagccacctactcttcttctgtgggaggccagtccacatccgctctcacccgagagagatattcagctggatccaaagtgactgatgaagggaaggaaatcatgtcaagcgaagccttgaaaaagctgccctgagacggtgtcccgccgaaagaatgttggctcaattaagaaacatcagggagataaattcaacccagtgtgtctaaaaatgactacaaaacgaagtttgtttgtgcggttggtaccatgtcgctgtctacgaggggaagaggagactgtcactactcttgattattctcattgcagcttagaacaagttccgaaagagatttttacttttgaaaaaaccttggaggaactctatttagatgctaatcagattgaagagcttccaaagcaactttttaactgtcagtctttacacaaactgagtttgccagacaatgatttaacaacgttaccagcatccattgcaaaccttattaatctcagggaactggatgtcagcaagaatggaatacaggagtttccagaaaatataaaaaattgtaaagttttgacaattgtggaggccagtgtaaaccctatttccaagctccctgatggattttctcagctgttaaacctaacccagttgtatctgaatgatgcttttcttgagttcttgccagcaaattttggcagattaactaaactccaaatattagagcttagagaaaaccagttaaaaatgttgcctaaaactatgaatagactgacccagctggaaagactggatttgggaagtaacgaattcacggaagtgcctgaagtacttgagcaactaagtggattgaaagagttttggatggatgctaatagactgacttttattccagggtttattggtagtttgaaacagctcacatatttggatgtttctaaaaataatattgaaatggttgaagaaggaatttcaacatgtgaaaaccttcaagacctcctattatcaagcaattcacttcagcagcttcctgagactattggttcgttgaagaatataacaacgcttaaaatagatgaaaaccagttaatgtatctgccagactctataggagggttaatatcagtagaagaactggattgtagtttcaatgaagttgaagctttgccttcatctattgggcagcttactaacttaagaacttttgctgctgatcataattacttacagcagttgcccccagagattggaagctggaaaaatataactgtgctgtttctccattccaataaacttgagacacttccagaggaaatgggtgatatgcaaaaattaaaagtcattaatttaagtgataatagattaaagaatttaccctttagctttacaaagctacagcaattgacagctatgtggctctcagataatcagtccaaacccctgatacctcttcaaaaagaaactgattcagagacccagaaaatggtgcttaccaactacatgttccctcaacagccaaggactgaggatgttatgtttatatcagataatgaaagttttaacccttcattgtgggaggaacagaggaaacagcgggctcaagttgcatttgaatgtgatgaagacaaagatgaaagggaggcacctcccagggagggaaatttaaaaagatatccaacaccatacccagatgagcttaagaatatggtcaaaactgttcaaaccattgtacatagattaaaagatgaagagaccaatgaagactcaggaagagatttgaaaccacatgaagatcaacaagatataaataaagatgtgggtgtgaagacctcagaaagtactactacagtaaaaagcaaagttgatgaaagagaaaaatatatgataggaaactctgtacagaagatcagtgaacctgaagctgagattagtcctgggagtttaccagtgactgcaaatatgaaagcctctgagaacttgaagcatattgttaaccatgatgatgtttttgaggaatctgaagaactttcttctgatgaagagatgaaaatggcggagatgcgaccaccattaattgaaacctctattaaccagccaaaagtcgtagcacttagtaataacaaaaaagatgatacaaaggaaacagattctttatcagatgaagttacacacaatagcaatcagaataacagcaattgttcttctccatctcggatgtctgattcagtttctcttaatactgatagtagtcaagacacctcactctgctctccagtgaaacaaactcatattgatattaattccaaaatcaggcaagaagatgaaaattttaacagccttttacaaaatggagatattttaaacagttcaacagaggaaaagttcaaagctcatgataaaaaagattttaacttacctgaatatgatttgaatgttgaagagcgattagttctaattgagaaaagtgttgactcaacagccacagctgatgacactcacaaattagatcatatcaatatgaatcttaataaacttataactaatgatacatttcaaccagagatcatggaaagatcaaaaacacaggatattgtgcttggaacaagctttttaagcattaattctaaagaggaaactgagcacttggaaaatggaaacaagtatcctaatttggaatccgtaaataaggtaaatggacattctgaggaaacttcccagtctcctaataggactgaaccacatgacagtgattgttctgttgacttaggtatttccaaaagcactgaagatctctcccctcagaaaagtggtccagttggatctgttgtgaaatctcatagcataactaatatggagattggagggctaaaaatctatgatattcttagtgataatggacctcagcagccaagtacaaccgttaaaatcacatctgctgttgatggaaaaaatatagtcaggagcaagtctgccacactgttgtatgatcaaccattgcaggtatttactggttcttcctcatcttctgatttaatatcaggaacaaaggcaattttcaagtttgattcaaatcataatcccgaagagccaaatataataagaggccccacaagtggcccacaatctgcacctcaaatatatggtcctccacagtataatatccaatacagtagcagtgctgcagtcaaagacactttgtggcactccaaacaaaatccccaaatagaccatgccagttttcctcctcagctccttcctagatcagagagcacagaaaatcaaagttatgctaaacattctgccaatatgaatttctctaatcataacaatgttcgagctaatactgcataccatttacatcagagacttggcccagcaagacatggggaaatgtgggccatctcaccaaacgaccgacttattcctgcagtaactcgaagtacaatccagcgacaaagtagtgtgtcctccacagcctctgtaaatcttggtgatccaggctctacaaggcgggctcagattcctgaaggagattatttatcatacagagagttccactcagcgggaagaactcctccaatgatgccaggatcacagagacccctttctgcacgaacatacagcatagatggtccaaatgcatcaagacctcagagtgctcgaccctctattaatgaaataccagagagaactatgtcagttagtgatttcaattattcacggactagtccttcaaaaagaccaaatgcaagggttggttctgagcattctttattagatcctccaggaaaaagtaaagttcctcgtgactggagagaacaagtacttcgacatattgaagccaaaaagttagaaaagatgcctttgagtaatggacagatgggccagcctctcaggcctcaggcaaattatagtcaaatacatcacccccctcaggcatctgtggcaaggcatccctctagagaacaactaattgattacttgatgctgaaagtggcccaccagcctccatatacacagccccattgttctcctagacaaggccatgaactggcaaaacaagagattcgagtgagggttgaaaaggatccagaacttggatttagcatatcaggtggtgtcgggggtagaggaaacccattcagacctgatgatgatggtatatttgtaacaagggtacaacctgaaggaccagcatcaaaattactgcagccaggtgataaaattattcaggctaatggctacagttttataaatattgaacatggacaagcagtgtccttgctaaaaactttccagaatacagttgaactcatcattgtacgagaagtttcctcataagcactgtggacaaaaaaagcggggaagacagcaagatttattggaagatacttacaggggaaattaatattttgactatttttatatataaagaagaactcaaaaaattatgttcaaatttgtacattaatgaaataatggaacttgtggttagagggaaagaaccactgtacagaatataaaggagactgttgaattcataccatataaaacttgttaggtttttaaacatagcaatcaaggctacaaaaacaaacctgtgttgtttttgtatagattgtaggtttatttttggatttcatatacatgactgaactgtgtgcaaggcaatagttagccttgattttagcccagagacagatggcagagctatctctctcatagcttttatgcccttatttttattcaactggtattaatgtttttctcctgaaactactttttttgatgtgggcaagagatttgaagtgttggcttttgctatgtgcatattgaattgaagagtgagtaggtgaaggtggtgctggtgggttcactttccaaggccagactaaaacagttattttctataaaaatctggaagcaaagaatggggatggggagagctacgtggtagtatgtttttattaggagaataatgcaataaaatatgtaatgtcttttttataaagcaaaaaagacaataattgcatttatgagctcggcaggatctgttcttgtcatagccattgactatacatttgctactggtgattcagtttttaattttttagtcacaggaaatttttaactctactgtagatgcatgtccatgcattttctgtgttatggaaatccactgatttttttttttttttcaaatggtggtacttgcaatctgttttataattagtgctccatttaaatctaatttataatttttattttaagcagcaaatgaaacaaaaatggccagttttaagattgtgttgcctgtaacacaaaatgttacgaaggtttaggaaagcctctttgatttttgtttggccttgcattgccttggtaaagtaaaaggaaacagtacacttggagctaggaaaccaaagcaagctttgtgaaactggcacagtgatagagaattgctgtggagagttatagagcaaagggatgggtccttgaggcctgccagtgtgtaaaggtgttcaaataaagggctgtttctacaggtaacattaaatgtgaactcaacacttccagagtctttaaagggtttctatgtgtatcagtgtaatagtgttttaccaccaactgcctttctttgttcctagttactgtaacaaatatttgatgatagaggtttattaattttgtttatccagaccattaattttatttgtttttgttctatgtaatcaaataaaatttgagtaacatgtaatggtaaggattaatgcatggttatttggaccagaaaaaagtgccatagaagaccaataactgtttagttgaggctagtctggaacctttcattagagcaatatttggttattgcacttcatttttatttactaagaaatgcaatttgggaatttttaatctgttatgctttgtttatcaaccttgattttaattaagacttttataagactagcttaaaacaccaaccaacattatttttgcaaaagtgagttggactcactttccattcttgctagtcagagtaagtaggcagcacttttaaaaatatgtgaactcaaatattgcacttctttcaagatgttatcaattggttattgtactgtatagttttaataattttgattgaaaccctttaacaactctttgtaaattttaactcattttagttgattttcagtactatttacataggaattgatttttatggatatagtagaagaaatgtgctgtattttgataaaattcacttattgtatgtgtgttgtaatctaaaaaaaaaaagaatgacaaacagcttctttaagacaa

SEQ ID NO: 199693 - protein, 363 aa, Artificial Sequence
  derived and/or modified sequence
MSMDVTFLGTGAAYPSPTRGASAVVLRCEGECWLFDCGEGTQTQLMKSQLKAGRITKIFITHLHGDHFFGLPGLLCTISLQSGSMVSKQPIEIYGPVGLRDFIWRTMELSHTELVFHYVVHELVPTADQCPAEELKEFAHVNRADSPPKEEQGRTILLDSEENSYLLFDDEQFVVKAFRLFHRIPSFGFSVVEKKRPGKLNAQKLKDLGVPPGPAYGKLKNGISVVLENGVTISPQDVLKKPIVGRKICILGDCSGVVGDGGVKLCFEADLLIHEATLDDAQMDKAKEHGHSTPQMAATFAKLCRAKRLVLTHFSQRYKPVALAREGETDGIAELKKQAESVLDLQEVTLAEDFMVISIPIKK

SEQ ID NO: 199694 - DNA, 1092 bp, Artificial Sequence
  derived and/or modified sequence
atgagtatggacgtaacgtttctcggaaccggagcagcatacccctcacctactcggggggcctccgccgtagttttgcgatgcgaaggtgaatgttggcttttcgattgtggagaagggacacagacccaactgatgaaaagtcagcttaaggcaggccgtattacaaaaatctttataacccaccttcacggcgaccattttttcgggctccctggcttgctatgcaccatcagcttgcaaagtggatcaatggtctctaaacaacctatagagatttacggcccagttggcctacgagacttcatctggcggacgatggaacttagccatacagagctcgtgtttcattatgtggtgcatgaattggttcccactgcagaccaatgccctgccgaagagctcaaagagttcgcccacgttaacagagccgacagtccacccaaagaagagcaggggcgcaccatcctgttggactccgaagagaattcttatctcctttttgatgatgaacagtttgtagttaaagctttccgcttgtttcatcgcattccatctttcggattcagcgtggtggagaaaaagcggccagggaagctgaacgcacagaagcttaaagatttgggcgtgccacctgggccagcctacggcaaattaaagaatggcatctctgtggttcttgaaaatggcgttactattagcccccaggacgtgctcaaaaaaccgattgtaggaagaaagatctgtatactgggcgactgttcaggtgttgtaggcgatggcggggtcaaactctgtttcgaagctgacctcctgattcatgaagccaccctggatgacgcacaaatggacaaggcgaaggaacatggtcactccacgcctcagatggccgccaccttcgccaaactttgcagagcaaagcggctggtcctcactcacttctctcagagatacaaacctgttgcactcgccagagagggagagacagacggaatagctgagctgaaaaagcaagctgagtctgtgctggatctccaggaggtaaccttggctgaggacttcatggtgatctcgatccccattaagaagtag

SEQ ID NO: 199695 - DNA, 1092 bp, Artificial Sequence
  derived and/or modified sequence
atgtccatggatgtgaccttcctgggcaccggggccgcctaccccagccccaccaggggggccagcgctgtggtgctgcgctgtgaaggagagtgctggctgtttgactgtggggagggcacccagacccagctgatgaagagccagctgaaggccggccgcatcaccaagatcttcatcacccacctgcacggggaccacttcttcggcctgcccggcctgctgtgcaccatcagcctgcagagcggctccatggtgtccaagcagcccatcgagatctacggccctgtgggcctgcgggacttcatctggaggaccatggagctgagccacacagagctggtgttccactacgtggtgcatgagctggtgcccacagctgaccagtgcccagctgaggagctgaaggagtttgcccacgtgaacagagctgacagcccccccaaggaggagcagggccgcaccatcctgctggacagcgaggagaacagctacctgctgtttgatgatgagcagtttgtggtgaaggccttccgcctcttccaccgcatccccagctttggcttctctgtggtggagaagaagaggcctgggaagctgaatgcccagaagctgaaggacctgggcgtgcccccaggccctgcctacggcaagctgaagaatggcatctctgtggtgctggagaatggagtgaccatcagcccccaggatgtgctgaagaagcccatcgtgggcaggaagatctgcatcctgggggactgcagcggcgtggtgggagatggcggcgtgaagctgtgctttgaagctgacctgctgatccacgaggccaccctggatgatgcccagatggacaaggccaaggagcacggccacagcaccccccagatggccgccacctttgccaagctgtgccgggccaagaggctggtgctgacccacttcagccagcgctacaagcctgtggccctggcccgggagggggagacagatggcattgctgagctgaagaagcaggccgagagcgtgctggacctgcaggaggtgaccctggccgaggacttcatggtgatcagcatccccatcaagaagtag

SEQ ID NO: 199696 - DNA, 1092 bp, Artificial Sequence
  derived and/or modified sequence
atgagcatggacgtgaccttcctgggcaccggcgccgcctacccctcgcccaccaggggggcaagcgccgtcgtactccgctgtgaaggggaatgttggctattcgattgcggcgaagggacacagacacaactgatgaagagtcagctgaaggccggacgcatcacgaaaatcttcatcacacacttgcatggcgaccacttctttggcctgcctgggctgctctgtactatttcgctgcagtctgggtccatggtctccaagcagcctatagaaatatatgggcccgtaggtcttcgggattttatctggcggacaatggaactgagtcacaccgagttagtctttcactacgttgtccacgagctagtgcccacagctgatcagtgccctgcagaagaactgaaagagttcgctcacgtcaacagggccgacagccccccgaaggaagagcaaggacgcacaatcttactggattctgaggaaaattcgtacttgctgttcgacgacgaacagttcgttgtaaaggccttcagactgtttcatagaatcccgagtttcggctttagcgtagttgagaagaaaagaccagggaagttaaatgctcaaaaactgaaggaccttggagtcccccccggccccgcctacggcaaactaaagaatggcattagcgtggtgctggagaacggcgtcactattagcccacaagacgtgctcaagaagcctatcgtgggtaggaagatttgcatcctgggcgattgtagtggtgtggtaggcgacggaggggtcaagctttgttttgaggcagacctgctcattcacgaggctacactagatgacgcccagatggacaaagccaaagaacacgggcatagcactccacaaatggctgccaccttcgctaaactctgccgggcaaaaaggctggtcctaacacatttttcgcaacgttataaacccgtcgcactagcgcgggagggggagaccgacgggatcgccgagctcaagaagcaggctgagtccgtcctggatctgcaggaggtgacacttgctgaagattttatggtcattagcatccctattaagaaatag

SEQ ID NO: 199697 - DNA, 1092 bp, Artificial Sequence
  derived and/or modified sequence
atgtctatggacgtcacgtttctaggaacaggcgcagcctaccccagtccgacccgcggagccagtgccgttgtgctcagatgcgagggcgaatgctggctttttgactgcggtgaggggacacaaacacagctgatgaaaagccagctcaaggccggtcggattaccaagatatttatcacacacttacatggggaccatttctttggcttgcccggactcttgtgcactataagtttacagtccgggtctatggtgagcaaacagcccatcgagatttacggtccagttggcctgcgcgacttcatctggcggaccatggagctgagccacaccgagctggtgttccattacgttgtgcacgagctggtccccaccgcagaccaatgcccagcagaggagctgaaggagtttgcacacgtgaacagggccgactctcctcctaaggaggagcagggaaggaccatccttcttgacagcgaggaaaacagttacctgctcttcgatgatgagcagtttgtcgtcaaggcctttaggctcttccataggatcccctcgttcggtttcagtgtggtagagaagaagagaccgggaaagctcaatgcacagaagctaaaggacctgggtgtgcctcctggtccagcgtacgggaagttgaagaacggtatctctgttgtgcttgaaaatggcgtcactatcagtcctcaggatgttcttaaaaaacccatagtaggacgcaagatctgtatacttggggactgttctggggtagtgggcgacgggggagtcaagctgtgctttgaagccgacctgttgattcacgaagctacgctggacgacgcgcagatggataaggccaaagaacacggccatagcaccccccagatggcagccacttttgctaagctgtgtagggccaaaaggctcgtgcttacacatttctcacagagatataaacctgtggccctggcccgagagggtgaaacagacggcatcgcggagctgaaaaagcaggcagagtccgtcttggacctccaggaagtgacactcgcagaagatttcatggtgattagtatcccaattaaaaagtag

SEQ ID NO: 199698 - DNA, 1092 bp, Artificial Sequence
  derived and/or modified sequence
atgagcatggacgtgaccttcctgggcaccggcgccgcctaccccagccccaccagaggcgccagcgccgtggtgctgagatgcgagggcgagtgctggctgttcgactgcggcgagggcacccagacccagctgatgaagagccagctgaaggccggcagaatcaccaagatcttcatcacccacctgcacggcgaccacttcttcggcctgcccggcctgctgtgcaccatcagcctgcagagcggcagcatggtgagcaagcagcccatcgagatctacggccccgtgggcctgagagacttcatctggagaaccatggagctgagccacaccgagctggtgttccactacgtggtgcacgagctggtgcccaccgccgaccagtgccccgccgaggagctgaaggagttcgcccacgtgaacagagccgacagcccccccaaggaggagcagggcagaaccatcctgctggacagcgaggagaacagctacctgctgttcgacgacgagcagttcgtggtgaaggccttcagactgttccacagaatccccagcttcggcttcagcgtggtggagaagaagagacccggcaagctgaacgcccagaagctgaaggacctgggcgtgccccccggccccgcctacggcaagctgaagaacggcatcagcgtggtgctggagaacggcgtgaccatcagcccccaggacgtgctgaagaagcccatcgtgggcagaaagatctgcatcctgggcgactgcagcggcgtggtgggcgacggcggcgtgaagctgtgcttcgaggccgacctgctgatccacgaggccaccctggacgacgcccagatggacaaggccaaggagcacggccacagcaccccccagatggccgccaccttcgccaagctgtgcagagccaagagactggtgctgacccacttcagccagagatacaagcccgtggccctggccagagagggcgagaccgacggcatcgccgagctgaagaagcaggccgagagcgtgctggacctgcaggaggtgaccctggccgaggacttcatggtgatcagcatccccatcaagaagtag

SEQ ID NO: 199699 - DNA, 2235 bp, Artificial Sequence
  derived and/or modified sequence
ggcgcacttccgcccgggcgcattgtagccccgcggacagctgggccagggtgcgggcctgcgcctccctcggctcctggcgcgggcctcggggagaggggtggaagatgtctatggatgtgacattcctggggacgggtgcagcatacccatctccaacccggggtgcctctgctgtggtccttcggtgtgaaggcgagtgctggctctttgactgtggggagggaacacagacacagcttatgaaaagccaacttaaagcagggagaattaccaagatcttcatcacacaccttcatggagaccatttctttggccttcctgggctcctctgcacaatcagcctgcagagtggctccatggtgtccaaacagcctattgaaatctatggccctgtagggcttcgggactttatctggcgaaccatggaactctctcacacggagctggtcttccattatgtggttcatgaactggttcctacagcagatcaatgtcctgcagaagaactaaaagaatttgcgcatgtgaatagagcagacagtcctcccaaagaggaacaaggaagaactatcctgttagactcagaagaaaactcataccttctgtttgatgatgaacaatttgttgtaaaagcatttcgcctctttcacagaattccctcatttgggttttcagtcgtggaaaagaaacgcccaggtaaactcaatgcacagaaacttaaagaccttggtgttccaccaggtcctgcctatgggaagctgaaaaatggaatttctgttgttctggaaaatggggttacaatttctccccaagatgtcttaaaaaagcctattgttggaagaaaaatctgcatattgggtgactgctctggggttgtgggtgatggaggagtaaaactgtgctttgaagcagacctgttgatccacgaagcaaccctggatgatgcccagatggacaaagcaaaggagcatggccacagcacaccacagatggcagcaacatttgcaaagttgtgccgtgcaaagaggctggttctgactcacttcagtcagaggtacaaaccagttgccttggccagagaaggagaaacagatggcattgcagaactaaaaaagcaagctgaatcagtgttagatctccaagaagtgactctagcagaagattttatggtgataagcattccaatcaagaaatgaaaccagtgttcctgagtgcacactgacatgtctgtgaatatgttactgaacctatagtccagtttttttatttcttgttttagtctgaaattatttgggccctaataatcctaaaaagaatggagctgcattgatgaattggctcagtatttaaagggagcaaactttttgataataaatctttttaagagaaaaaaaacccagcatcctttttgaagtccagatttgtcaaaatgatagactattcagttatacatcttattttgtgctactaccacagatagccaatattccatgcagtcctgggcttagcttctgcccagctttattgctgctattggcaaagagcacaggactcagccctcgtggctaaaaatggtattttggcagtttgtattgaatctgtttgtgttattaacagaagagggagaaatgtcatgagacgttggacaggcaggattgatgatagcatgaccatagctttgctggaatactgaatgcagggtttggctaggtgtttattttaacattttattaaactttctatttgggtcttaacccatggttctcagctggggtgacactgctcctctagaagcaggtttgaaattatgggtatgttttcttgtcacagtgactgagtacggtggtggtagtggtggtactactactactggtatttagtcagcagggataagggatgttagctgtcctgcaaagttttggtcagtcatatacaataaagaatcatctcaccccgaaatgcaaattgcaggcccattgagatacacagcaagttagtttatactcttgatgtgaatatagtttaccaaaattagtgacataatgagtggaattactaggtaagtcaaatcctaaagagtgaatgtgttagaattgcagtgtcataccaaataacattcaaaagaaatgagccattaagtgaagcttatgaacctggaggtaaaaaatgcttatctgttaaactgaggtttcattgacgtgtccctattaataaacgttatttgccccacaa

SEQ ID NO: 199700 - protein, 450 aa, Artificial Sequence
  derived and/or modified sequence
MGETMSKRLKLHLGGEAEMEERAFVNPFPDYEAAAGALLASGAAEETGCVRPPATTDEPGLPFHQDGKIIHNFIRRIQTKIKDLLQQMEEGLKTADPHDCSAYTGWTGIALLYLQLYRVTCDQTYLLRSLDYVKRTLRNLNGRRVTFLCGDAGPLAVGAVIYHKLRSDCESQECVTKLLQLQRSVVCQESDLPDELLYGRAGYLYALLYLNTEIGPGTVCESAIKEVVNAIIESGKTLSREERKTERCPLLYQWHRKQYVGAAHGMAGIYYMLMQPAAKVDQETLTEMVKPSIDYVRHKKFRSGNYPSSLSNETDRLVHWCHGAPGVIHMLMQAYKVFKEEKYLKEAMECSDVIWQRGLLRKGYGICHGTAGNGYSFLSLYRLTQDKKYLYRACKFAEWCLDYGAHGCRIPDRPYSLFEGMAGAIHFLSDVLGPETSRFPAFELDSSKRD

SEQ ID NO: 199701 - DNA, 1353 bp, Artificial Sequence
  derived and/or modified sequence
atgggagagaccatgagtaagcgactgaaactccacctcggaggggaagccgagatggaggagagagccttcgtaaatcccttccccgactacgaggcagctgctggggctctgctggcctccggggcagccgaagaaacgggctgtgtgagaccccccgccaccacagacgagcctggactgccatttcatcaagatggcaaaattatccacaacttcatccggcgcattcagacgaagattaaagatctgctgcagcagatggaagagggactgaaaaccgccgacccccatgactgttcagcttacaccggttggactggcatcgctctgttgtacttgcagctctacagagttacctgcgatcagacttatctgctgaggagtctcgactatgttaaaaggactctcaggaatctgaacggccgaagagttacttttctttgtggagatgccggcccccttgccgtgggtgctgtaatatatcacaagctgcgatccgactgtgaatcccaggaatgtgttaccaagctactgcagctgcagcgctccgtcgtatgccaggagtctgaccttcccgatgaactcctgtatgggcgcgcaggttatctgtacgctcttttgtacctgaatactgagatcggaccaggcaccgtctgtgaatccgcaattaaggaggttgtcaacgctattattgaatctggaaagaccctgagcagagaagagcgtaagacagagaggtgccccttactttatcagtggcatcgcaagcagtacgtgggtgcagcgcacggaatggccggaatatattacatgcttatgcaacctgctgccaaagtcgaccaagaaacactgacagagatggtgaagccaagcatcgactatgtgcggcataaaaaatttcgcagcggcaactacccttcttccttatcaaatgaaactgaccgactggtgcactggtgccatggtgcgcctggcgtgatccacatgttgatgcaggcctataaggtcttcaaagaagaaaagtatctgaaggaggccatggagtgctcagacgtaatttggcagcgagggctgctgcgcaagggatacggcatatgtcatgggactgccggtaatggatactcattcctctcgctctaccggctgacccaggataagaagtacctgtaccgtgcttgcaaattcgctgagtggtgcttagactacggtgcccacggatgtcggattccagatagaccttatagtctgttcgagggtatggctggcgcaatccatttcctgtcagacgtactagggccagagacttccagattcccggcctttgaattggacagttctaaacgcgactag

SEQ ID NO: 199702 - DNA, 4353 bp, Artificial Sequence
  derived and/or modified sequence
gggctggcgcagcaggggccggtgaaatgcaggctgacgacggcgcgccaggggctgagctcgccccggtcggcgacgcgcacacaccttgagtgacagcgacctcttctctacaggttttccccgcgggagcgtggccctagcgggcgttcggttttctttggaaatcgcggagggggctggccgggcgcagcgatccccaccccgggactccagccccggccgtgcgcgtcgccgcggacgggctctgcgggccacggggaaggtgcgaggaggcgcgagcaggctgtgagccgctgggcgctcccgcgagcccgctcctctccgtcgggagcagggcaaaggcgccaggaacagggcagaggcacagcgcccaccgcctctgcggccgcctgatgtgcgagcagcccgcgacgaggcagtgcacgctcagacgccccgctcctcccgccagcgcgcggcctcgctcctcctagaggacgctctctgcgcgggccctcggaggaggcggcggcggggcgagctgcagcgccgggacaggaggtttgtccccgcccgcgcgccgtaccgcggcggagatgggcgagaccatgtcaaagaggctgaagctccacctgggaggggaggcagaaatggaggaacgggcgttcgtcaaccccttcccggactacgaggccgccgccggggcgctgctcgcctccggagcggccgaagagacaggctgtgttcgtcccccggcgaccacggatgagcccggcctcccttttcatcaggacgggaagatcattcataatttcataagacggatccagaccaaaattaaagatcttctgcagcaaatggaagaagggctgaagacagctgatccccatgactgctctgcttatactggctggacaggcatagcccttttgtacctgcagttgtaccgggtcacatgtgaccaaacctacctgctccgatccctggattacgtaaaaagaacacttcggaatctgaatggccgcagggtcaccttcctctgtggggatgctggccccctggctgttggagctgtgatttatcacaaactcagaagtgactgtgagtcccaggaatgtgtcacaaaacttttgcagctccagagatcggttgtctgccaagaatcagaccttcctgatgagctgctttatggacgggcaggttatctgtatgccttactgtacctgaacacagagataggtccaggcaccgtgtgtgagtcagctattaaagaggtagtcaatgctattattgaatcgggtaagactttgtcaagggaagaaagaaaaacggagcgctgcccgctgttgtaccagtggcaccggaagcagtacgttggagcagcccatggcatggctggaatttactatatgttaatgcagccggcagcaaaagtggaccaagaaaccttgacagaaatggtgaaacccagtattgattatgtgcgccacaaaaaattccgatctgggaattacccatcatcattaagcaatgaaacagaccggctggtgcactggtgccacggcgccccgggggtcatccacatgctcatgcaggcgtacaaggtctttaaggaggagaagtacttgaaagaggccatggagtgtagcgatgtgatttggcagcgaggtttgctgcggaagggctacgggatatgccatgggactgctggcaacggctattccttcctgtccctttaccgtctcacgcaggataagaagtacctctaccgagcttgcaagtttgcagagtggtgtctagattacggagcacacgggtgccgcattcctgacagaccctattcgctctttgaaggcatggctggcgctattcactttctctctgatgtcctgggaccagagacatcacggtttccagcatttgaacttgactcttcgaagagggattaaaaggtgcaaaaagacaactaaaatacccatttggaccaaaagccaccagattgcttagtgcctgacacagaaacaactgggaatcctgaaagagaagcagacaccgtcacaggcccctctggttagactagcatgagtgaccgaagccatccatcaacattttctaacagcaccctcatcaatataaaatatgacttcttcacatacagattctctgtagtgtttgcatgtttcttggtgtttgttgtctccaggtgtaagctgttttaaatggaaggcccttctattcctgagggctcagagctgaccatgcatgaatgtatggcagtgtccacttttctgtataaaatgtataaagtggggtttcttccatattgacaaatgagggaacaggtggtgtctatcttgtatatcagaaagattatctagggtctatcctagtgataatacattgtcagccttttctgtggcaccttccagatgagaatgagggagcgaccactccaaggacggacaggaccagcagttctgcaggggcgtgctggggtggtttgggagtgcacagctgaacgcttcccgtttggattttacactcaccttcgtgttttaaagaagcctcagagtgcattgcagctctgtcagggccccattcccagcagaggcttcaggtgctttgtgtagagtccagggcagctggagctttgttggggagacttctggacccaaagggagctttcccaagaagcctttgatggccacactgtaggcagcagtgactaagcactggcagttccagaacatttacccaggtatatgttactaaaacaggctccacctcagtttatcaacattataagttactgttctaagaaaagtaaatacagttccagatgggttattgcagattaacagaaagacactcaactggactcatgtccctgcaattaaacttacttcaaccttttggaaagttatcaaaatctaaatttggaatgaatgcatttcctattttttgtctacttttgggtgataaaaagtactagcccttatttatagatatgagaaacataatgttctaaccaacaacattatggtatttgtgtgacttttatttgaaaaaatgtgagcagtaatttgggttagcctaccttcattaattctatcacatagatttcagtttttagaagggtttctgtcatcatggaagaggtggtctgggactaggtacttctcgtcttgtgagctaaggcttgtgtcatgaaagacaagaggcctctcttaacagcccagtccttgtctgcagggggaggcctgagcatttcccagccccagtgtccacacctctcagaaaagagaaaaaagaatgtcagtttaggagaaaagcttcctttttacttgtgtggttatgtgtggggctggcacccgaaatgtgtgacattcagcttctaaacgatgcctggagagtctgtttgctgcagacacccttgctcctgagtcattattttctttcatgttagattgatgacttctgtgaatagaaatcatcctgatcctattttacctggcctccagggcctgttgatgggctttgcaggcagtccagcagcccacacctgcaggcaggatgctgtcgtcaatgagctgagggtagctgctttgctgaagacctcacacgatgtccaatctcatccaaataacattgttcccatcctccccacccaccacatcaaaacataacacatcacagcactcagtagaggtcctgcctccccatttctcaagggaagccagtaggcaacacagccagcacggtgctctccagggcagcccctctcagacgaggaggcagcgggtgcagccaggtgtctgcagagcagccacaaaggtggcctaggatgcgggtgtctccccaggtgagtccatccacacacgtttgaaaaacactattagtctttctaacacactgagggaaagattaaaatctgtggaataaaggaggagattttatttacagatttttttaaaagccacctgggttgacaccttcctacttatccactagatgtcatcagaggtgctgttccgtggttctgcattaacccctgcctcatgtctgtaacatgtgacagtaattccagctcggtccctccaggcaaaggagaaacgggacttacttcacaggacagaggattgacagaagtcagtttaagataagtgtttgaatcagatttcagtacatctcattcatttcttagatttgtattcacaattgtgttctctaaaatgtgtctaaattttaaaaatatgtacatgcataatgtcattttaaaatctgaaggaaagaatttgaagtccacaaaaagtgtttgaggttctttggttttgttagtaaaagccagttctgtggtgatgacctatggaa

SEQ ID NO: 199703 - DNA, 1353 bp, Artificial Sequence
  derived and/or modified sequence
atgggagagaccatgagcaagaggctgaagctgcacctgggcggggaggccgagatggaggagcgggcctttgtgaaccccttcccagactatgaagctgctgctggggccctgctggccagcggggctgctgaggagaccggctgtgtgcggcccccagccaccacagatgagcccggcctgcccttccaccaggacggcaagatcatccacaacttcatccgccgcatccagaccaagatcaaggacctgctgcagcagatggaggagggcctgaagacagctgacccccatgactgcagcgcctacacaggctggacaggaattgccctgctgtacctgcagctgtacagagtgacctgtgaccagacctacctgctgcggagcctggactatgtgaagaggaccctgaggaacctgaatggaagaagagtgaccttcctgtgtggagatgctggccccctggccgtgggcgctgtgatctaccacaagctgcggagtgactgtgagagccaggagtgtgtgaccaagctgctgcagctgcagaggtctgtggtgtgccaggagagtgacctgcctgatgagctgctgtatggccgggccggctacctgtatgccctgctgtacctgaacacagagatcggccctggcaccgtgtgtgagagcgccatcaaggaggtggtgaatgccatcatcgagagcggcaagaccctgagccgggaggagaggaagacagagcgctgccccctgctgtaccagtggcacaggaagcagtatgtgggcgccgcccacggcatggccggcatctactacatgctgatgcagcctgctgccaaggtggaccaggagaccctgacagagatggtgaagcccagcattgattatgtgcgccacaagaagttccgcagcggcaactaccccagcagcctgagcaatgaaacagaccggctggtgcactggtgccacggggcccctggggtcatccacatgctgatgcaggcctacaaggtgttcaaggaggagaagtacctgaaggaggccatggagtgcagtgatgtgatctggcagaggggcctgctgaggaagggctacggcatctgccacggcacagctggaaatggctacagcttcctgagcctgtaccgcctgacccaggacaagaagtacctgtaccgggcctgcaagtttgctgagtggtgcctggactatggagcccacggctgccgcatcccagaccggccctacagcctgtttgagggcatggccggggccatccacttcctgagtgatgtgctgggccctgagaccagccgcttccctgcctttgagctggacagcagcaagagggactag

SEQ ID NO: 199704 - DNA, 1353 bp, Artificial Sequence
  derived and/or modified sequence
atgggcgagaccatgagcaagcggctgaagctgcacctgggcggcgaagccgagatggaggagcgagcgtttgtgaatccatttccagactacgaggccgcagctggagctctactggcctccggcgcggctgaggaaaccggctgcgtgaggccccccgccaccaccgacgaacctggccttccgtttcatcaggatggaaaaataattcataactttattagacgaatccagactaagatcaaggatctgctgcagcagatggaggagggactgaagaccgcagatcctcatgactgctcagcctacacgggctggaccggaatcgccctgctttatctacagctgtaccgagtaacatgcgatcaaacatacctactgcgctctctcgactacgtgaaacgaacactgcgaaatctgaacggcaggcgtgtcacatttctgtgcggggatgcaggtcccctggccgtgggtgcggtaatttaccacaaactgagatcagattgcgagtcgcaggagtgcgtaacaaagctactgcagcttcagcgctctgttgtgtgccaggagtccgaccttccagatgagctgctgtacggaagagccggatacctctatgcattgctgtacctgaataccgaaattggtcccggtacagtgtgcgagtccgcaattaaggaagtggtcaacgcaattatagagtccggcaaaaccctgtcaagggaggaacgaaaaacagagaggtgcccactcttgtaccaatggcatagaaaacagtatgtgggggctgcccacggaatggcaggtatttattacatgctgatgcagccagctgcgaaagttgatcaggagacactgacagagatggttaaaccatctatcgactatgttcggcacaagaagttccggtcaggcaattatccctcgtcgttatccaatgagacagacagattagttcattggtgccacggagcccctggcgttatccacatgctcatgcaggcttacaaggtgtttaaagaggaaaagtatctgaaggaggctatggagtgttctgacgtgatctggcagagagggctcttgcgcaaaggttacggcatatgccacggcaccgccgggaacggatattcctttctgagcctgtaccggctgacccaggataagaaatacctgtatagagcatgcaagttcgctgagtggtgccttgattatggggcgcatggctgccggattccagacaggccatacagcctctttgaagggatggccggggcgatccatttcctcagcgatgtgctgggacctgaaacctcacgttttccggcttttgagttggattcctcaaaaagagactag

SEQ ID NO: 199705 - DNA, 1353 bp, Artificial Sequence
  derived and/or modified sequence
atgggcgaaacaatgagtaagcggctgaagctgcacttgggaggggaggctgaaatggaggaacgcgcatttgtgaacccttttccggattatgaggcagccgctggcgctctacttgcttcaggcgctgcagaggagacagggtgcgtgaggcctccagccacaacggacgagcctggcctgccttttcatcaagatggaaagatcatccacaactttatccggaggattcagactaaaataaaggacctgctacagcaaatggaggagggactgaaaaccgcggacccacacgattgctccgcttatactggatggactggtattgctctgctttatctgcagctgtaccgagtgacttgtgatcagacatacctgctgaggtccctagactacgtcaagcgaactttacgtaatctcaacggaagaagagtcaccttcctctgcggagatgctgggccactggccgtcggggcagtgatttatcataagctcagatccgattgcgaaagtcaagaatgtgtgacgaagctgctgcagcttcaacggtccgtcgtttgccaggaatccgacctgcctgatgagctgctgtatggccgagctggttacctttacgcactcttatatttgaatactgaaattgggccagggaccgtttgtgagtcagctatcaaagaggtggtgaatgcaatcattgaatctgggaagaccctttctcgagaagagaggaaaactgagagatgcccactgttgtatcaatggcataggaagcagtacgtcggcgctgcacatggcatggctgggatctactatatgctgatgcagccggctgccaaagttgaccaggaaacacttaccgaaatggtgaaaccgtccatcgactatgtgagacataagaaattccgaagcggcaactacccatcctccctgagcaacgaaaccgaccggctggttcactggtgtcacggcgctccaggagttatacatatgctcatgcaggcctacaaagtgtttaaagaagagaagtacttaaaagaggcgatggagtgctcggatgtgatatggcagcgcggtcttctgcgcaagggatatggtatctgtcacgggactgcaggcaacggatatagtttcctgtccctgtatcgcctgacacaggacaagaaatacttatatagagcctgtaaattcgccgagtggtgcctggactatggcgctcacggctgcagaatcccagacaggccgtacagcctgtttgaaggtatggctggcgcaatacatttcctgagtgatgtgctgggtccagagacctcaaggtttccggctttcgagctggactcttccaagagagattag

SEQ ID NO: 199706 - DNA, 1353 bp, Artificial Sequence
  derived and/or modified sequence
atgggcgagaccatgagcaagagactgaagctgcacctgggcggcgaggccgagatggaggagagagccttcgtgaaccccttccccgactacgaggccgccgccggcgccctgctggccagcggcgccgccgaggagaccggctgcgtgagaccccccgccaccaccgacgagcccggcctgcccttccaccaggacggcaagatcatccacaacttcatcagaagaatccagaccaagatcaaggacctgctgcagcagatggaggagggcctgaagaccgccgacccccacgactgcagcgcctacaccggctggaccggcatcgccctgctgtacctgcagctgtacagagtgacctgcgaccagacctacctgctgagaagcctggactacgtgaagagaaccctgagaaacctgaacggcagaagagtgaccttcctgtgcggcgacgccggccccctggccgtgggcgccgtgatctaccacaagctgagaagcgactgcgagagccaggagtgcgtgaccaagctgctgcagctgcagagaagcgtggtgtgccaggagagcgacctgcccgacgagctgctgtacggcagagccggctacctgtacgccctgctgtacctgaacaccgagatcggccccggcaccgtgtgcgagagcgccatcaaggaggtggtgaacgccatcatcgagagcggcaagaccctgagcagagaggagagaaagaccgagagatgccccctgctgtaccagtggcacagaaagcagtacgtgggcgccgcccacggcatggccggcatctactacatgctgatgcagcccgccgccaaggtggaccaggagaccctgaccgagatggtgaagcccagcatcgactacgtgagacacaagaagttcagaagcggcaactaccccagcagcctgagcaacgagaccgacagactggtgcactggtgccacggcgcccccggcgtgatccacatgctgatgcaggcctacaaggtgttcaaggaggagaagtacctgaaggaggccatggagtgcagcgacgtgatctggcagagaggcctgctgagaaagggctacggcatctgccacggcaccgccggcaacggctacagcttcctgagcctgtacagactgacccaggacaagaagtacctgtacagagcctgcaagttcgccgagtggtgcctggactacggcgcccacggctgcagaatccccgacagaccctacagcctgttcgagggcatggccggcgccatccacttcctgagcgacgtgctgggccccgagaccagcagattccccgccttcgagctggacagcagcaagagagactag

SEQ ID NO: 199707 - protein, 197 aa, Artificial Sequence
  derived and/or modified sequence
MRKYRSHWSQGDREGYQRRSNYYEGPHTSHSSPADRTREEVVTPTLPEHTATRSQMATSLDFKTYVDQACRAAEEFVNIYYETMDKRRRALTRLYLDKATLIWNGNAVSGLDALNNFFDTLPSSEFQVNMLDCQPVHEQATQSQTTVLVVTSGTVKFDGNKQHFFNQNFLLTAQSTPNNTVWKIASDCFRFQDWSSS

SEQ ID NO: 199708 - protein, 114 aa, Artificial Sequence
  derived and/or modified sequence
MDKRRRALTRLYLDKATLIWNGNAVSGLDALNNFFDTLPSSEFQVNMLDCQPVHEQATQSQTTVLVVTSGTVKFDGNKQHFFNQNFLLTAQSTPNNTVWKIASDCFRFQDWSSS

SEQ ID NO: 199709 - protein, 142 aa, Artificial Sequence
  derived and/or modified sequence
MATSLDFKTYVDQACRAAEEFVNIYYETMDKRRRALTRLYLDKATLIWNGNAVSGLDALNNFFDTLPSSEFQVNMLDCQPVHEQATQSQTTVLVVTSGTVKFDGNKQHFFNQNFLLTAQSTPNNTVWKIASDCFRFQDWSSS

SEQ ID NO: 199710 - DNA, 594 bp, Artificial Sequence
  derived and/or modified sequence
atgaggaagtatcgatcgcattggtcccaaggcgatagagaaggataccaacggcgttccaactactacgagggccctcacacatcacatagcagccctgccgaccgaacccgcgaagaagtggtcacacctacgttgcccgaacatactgccactcgctcccagatggccacaagccttgatttcaagacatacgtcgaccaagcatgcagagccgctgaagaatttgtcaacatttactatgagaccatggacaagcggagacgcgcactcaccaggctttacttggataaggccacacttatctggaatggcaatgccgtttctggtttggacgcactcaacaacttttttgacacactgcccagctcagagtttcaggtgaacatgctagattgtcaacctgtgcacgagcaagctacgcagtctcagacaactgtgttagttgtgacaagcggcaccgtgaagtttgatggcaacaagcagcattttttcaaccagaattttctgcttaccgctcagagtaccccgaataataccgtgtggaagattgcctccgattgttttcgctttcaggactggtccagctcctag

SEQ ID NO: 199711 - DNA, 594 bp, Artificial Sequence
  derived and/or modified sequence
atgaggaagtaccgcagccactggagccagggcgaccgggagggctaccagaggaggagcaactactatgagggcccccacaccagccacagcagccctgctgacaggacccgggaggaggtggtgacccccaccctgcctgagcacacagccaccaggagccagatggccaccagcctggacttcaagacctacgtggaccaggcctgcagagctgctgaggagtttgtgaacatctactatgagaccatggacaagagaagaagagccctgacccggctgtacctggacaaggccaccctcatctggaatggaaatgctgtgtctggcctggatgccctgaacaacttctttgacaccctgcccagcagcgagttccaggtgaacatgctggactgccagcctgtgcatgagcaggccacccagagccagaccaccgtgctggtggtgaccagcggcaccgtgaagtttgatggcaacaagcagcacttcttcaaccagaacttcctgctgacagcccagagcacccccaacaacacagtgtggaagatcgccagtgactgcttccgcttccaggactggagcagcagctag

SEQ ID NO: 199712 - DNA, 594 bp, Artificial Sequence
  derived and/or modified sequence
atgcggaagtaccggagccactggagccagggcgaccgggagggctatcagcggagatctaactactacgaaggtccgcacacatcacactcctcaccggcggatcggactcgggaagaggtggtgaccccgacgctacccgagcatactgccaccaggtctcaaatggcaacttctctggatttcaaaacatacgtcgaccaggcctgccgggcagccgaagaatttgtgaacatttattatgaaaccatggacaaacggagaagggctttgacaagactctacctagataaagccaccctgatctggaacggcaatgcagtttcaggtctggacgccctcaacaacttcttcgacacgctgccctcctcggagtttcaggtgaacatgttagattgtcagccagttcacgagcaagccactcagtcacaaacaaccgtcttagtcgtcaccagcggcaccgtaaaattcgacggcaataagcagcacttctttaatcagaattttctgctcactgcccagagtacgccgaacaatactgtgtggaagatcgcttcagattgctttagatttcaggactggagttcgtcttag

SEQ ID NO: 199713 - DNA, 2692 bp, Artificial Sequence
  derived and/or modified sequence
agtcagaggttaacggaaaacggaagctggctggctgagaagaagcttccgttagtcctaccttgaagagaaaagagccagataaagagaaagattaaaagtatgagaaaatacagaagccactggtctcagggagacagagaaggataccaaagaagaagtaactattatgaggggccacacaccagccactcaagccctgcggaccggacacgtgaggaggtagtgacgccgacactgccagaacacactgctacaaggtcccagatggccacgtctctggattttaaaacttatgtagatcaggcatgtagagctgctgaggagtttgtcaatatttactatgagacaatggataaaagaagacgggcactaaccaggctgtatctggacaaggccaccttaatatggaatggaaatgctgtttcagggctggatgccctaaataatttttttgacacattgccttctagtgagttccaggtcaatatgttagattgccaaccagttcatgagcaagcaactcagtcccaaactacagttcttgttgtgaccagtggaactgtgaagtttgatggaaacaaacaacatttcttcaaccagaacttcctgctgactgctcagtccactcccaacaatactgtgtggaagattgcaagtgattgcttccgttttcaagattggtctagtagttaaaggggcaaaagtccattctcatttggtccattagttccagcaattgaaatttatgtgaattattttgattgtagaagcactataatatgtgctgaaactaaatttctttaatattttctattcctgtcagcaccttttctagcagctgccagtttggagcattgccctctaagagctttaaaactatttttttacatgccttatatacattccactaatgacattcttataataatattaaacacatgatcttggtactaacatactcactgtgaacccagcctattgcaaaaataaaatctttttataatattatctatgggatgtcagcacaatataacactctgggaagaagtggagttttttggttattaggttaattttctagtaaaacacgttgcctgttttcagttaacactggtaatgccattttaatatatggctttttcaaatcagttcagtgaaaatagtacagatttaggtttacataactactctgacatactggaattgcatatagagatgttcagtggtcgtttttcattttaagtaatttttgttttggcatttttttgtgtgaagtaaattaatcaactagagaggtgcaaaacgttctcagttgatatctgagtattgggtgcatttggtggcttaaaagcaaagcttcctaaaaagatttttcttggcagctccaggtctatacatttaggtaatgaatggtagtagaactaatagctttaacaggagaatagggaatgagaaatagaaatccaaggctgaagccaaaagtaaggagggtggccaaatggtaaactattggtacttgttttctacctcctaaaaatgtagcttatttttaggatttaaatcactaagtaaataagtatccttgccaagtgatcatgagtgtcatttttgttctaagactaatatttttagatctttttacttcacctcatacttatcaccaatgtatatctccatttattcaataacttactggggtaaaataacagcaataaacctaaccttttaacagggtctaacatgagagttggagtcaaagccattgttatcttttggtgacacccttaaattttaagtcttccagtcttccatgtgaactttaggcccaaagtttcttatgtatcacacatcccccaaataagtgattttttcccagtgctttgtactgtcaactgcattatctttaattatttaaaggtagaattatttaattttgtgatttgttcttccatatgacattgagcaaatagatctgtttcaaaatatgttcccgctatgtggataactcttctttttaaaaagaaaatagagaatagcaaatcttcatgataatcctcaaaagaacaaaatgcttaactttatctcttaatttctaaaggtaaataacctaggttcagcttttgcttaaacattaaatatcttttccattttttaatgtttgtaagctagatatgccagctttgtttctacattgcaaccaaaaactgtttcttttcacttaattataaaaccagtaattcatttactcttgcccaaaactatacactgtatttctgttatagtaacaaaatagagttatgtagaattgtatggaactcaaatttaaaccatgctttcttgtagtactgattgaaacttacacgttttattctactcatagtgagcttattcttattttggattgattttccaaaaccacagcttcagcagcaacaatcagaatgtccaaatgctgtcctttcccttacagagaagaacaatggtaactaaaagctgcatataactagcaataactacattgaacggtgtgcattgttcatgattgttgtgttttaagacttgtatataaactgctttttccaaactctgtataacttttaaatggctggaactactcgtataaggactagactgtatttttgacatgctcctatttttgtaacttgaaaaaataaaattttgccttgtg

SEQ ID NO: 199714 - DNA, 2562 bp, Artificial Sequence
  derived and/or modified sequence
gtggaaaattttgtgcgtttggcgggtttcgctctcttcataagtattgatcattccgcagccctgcggaccggacacgtgaggaggtagtgacgccgacactgccagaacacactgctacaaggtcccagatggccacgtctctggattttaaaacttatgtagatcaggcatgtagagctgctgaggagtttgtcaatatttactatgagacaatggataaaagaagacgggcactaaccaggctgtatctggacaaggccaccttaatatggaatggaaatgctgtttcagggctggatgccctaaataatttttttgacacattgccttctagtgagttccaggtcaatatgttagattgccaaccagttcatgagcaagcaactcagtcccaaactacagttcttgttgtgaccagtggaactgtgaagtttgatggaaacaaacaacatttcttcaaccagaacttcctgctgactgctcagtccactcccaacaatactgtgtggaagattgcaagtgattgcttccgttttcaagattggtctagtagttaaaggggcaaaagtccattctcatttggtccattagttccagcaattgaaatttatgtgaattattttgattgtagaagcactataatatgtgctgaaactaaatttctttaatattttctattcctgtcagcaccttttctagcagctgccagtttggagcattgccctctaagagctttaaaactatttttttacatgccttatatacattccactaatgacattcttataataatattaaacacatgatcttggtactaacatactcactgtgaacccagcctattgcaaaaataaaatctttttataatattatctatgggatgtcagcacaatataacactctgggaagaagtggagttttttggttattaggttaattttctagtaaaacacgttgcctgttttcagttaacactggtaatgccattttaatatatggctttttcaaatcagttcagtgaaaatagtacagatttaggtttacataactactctgacatactggaattgcatatagagatgttcagtggtcgtttttcattttaagtaatttttgttttggcatttttttgtgtgaagtaaattaatcaactagagaggtgcaaaacgttctcagttgatatctgagtattgggtgcatttggtggcttaaaagcaaagcttcctaaaaagatttttcttggcagctccaggtctatacatttaggtaatgaatggtagtagaactaatagctttaacaggagaatagggaatgagaaatagaaatccaaggctgaagccaaaagtaaggagggtggccaaatggtaaactattggtacttgttttctacctcctaaaaatgtagcttatttttaggatttaaatcactaagtaaataagtatccttgccaagtgatcatgagtgtcatttttgttctaagactaatatttttagatctttttacttcacctcatacttatcaccaatgtatatctccatttattcaataacttactggggtaaaataacagcaataaacctaaccttttaacagggtctaacatgagagttggagtcaaagccattgttatcttttggtgacacccttaaattttaagtcttccagtcttccatgtgaactttaggcccaaagtttcttatgtatcacacatcccccaaataagtgattttttcccagtgctttgtactgtcaactgcattatctttaattatttaaaggtagaattatttaattttgtgatttgttcttccatatgacattgagcaaatagatctgtttcaaaatatgttcccgctatgtggataactcttctttttaaaaagaaaatagagaatagcaaatcttcatgataatcctcaaaagaacaaaatgcttaactttatctcttaatttctaaaggtaaataacctaggttcagcttttgcttaaacattaaatatcttttccattttttaatgtttgtaagctagatatgccagctttgtttctacattgcaaccaaaaactgtttcttttcacttaattataaaaccagtaattcatttactcttgcccaaaactatacactgtatttctgttatagtaacaaaatagagttatgtagaattgtatggaactcaaatttaaaccatgctttcttgtagtactgattgaaacttacacgttttattctactcatagtgagcttattcttattttggattgattttccaaaaccacagcttcagcagcaacaatcagaatgtccaaatgctgtcctttcccttacagagaagaacaatggtaactaaaagctgcatataactagcaataactacattgaacggtgtgcattgttcatgattgttgtgttttaagacttgtatataaactgctttttccaaactctgtataacttttaaatggctggaactactcgtataaggactagactgtatttttgacatgctcctatttttgtaacttgaaaaaataaaattttgccttgtgacagat

SEQ ID NO: 199715 - DNA, 937 bp, Artificial Sequence
  derived and/or modified sequence
cccaggcttgtcgttagaaaagtaggggactttcctgttgagtatcatgtttacaaaagcaaagtggcttttaaattttaaactaagtatcaaacaagtagataaggtggatgggagggatcttcaggaactgaagggaagtggaacttaagccctgcggaccggacacgtgaggaggtagtgacgccgacactgccagaacacactgctacaaggtcccagatggccacgtctctggattttaaaacttatgtagatcaggcatgtagagctgctgaggagtttgtcaatatttactatgagacaatggataaaagaagacgggcactaaccaggctgtatctggacaaggccaccttaatatggaatggaaatgctgtttcagggctggatgccctaaataatttttttgacacattgccttctagtgagttccaggtcaatatgttagattgccaaccagttcatgagcaagcaactcagtcccaaactacagttcttgttgtgaccagtggaactgtgaagtttgatggaaacaaacaacatttcttcaaccagaacttcctgctgactgctcagtccactcccaacaatactgtgtggaagattgcaagtgattgcttccgttttcaagattggtctagtagttaaaggggcaaaagtccattctcatttggtccattagttccagcaattgaaatttatgtgaattattttgattgtagaagcactataatatgtgctgaaactaaatttctttaatattttctattcctgtcagcaccttttctagcagctgccagtttggagcattgccctctaagagctttaaaactatttttttacatgccttatatacattccactaatgacattcttataataatattaaacacatgatcttggtactaacatactcactgtgaacccagcctat

SEQ ID NO: 199716 - DNA, 594 bp, Artificial Sequence
  derived and/or modified sequence
atgaggaaataccgcagccattggagtcaaggcgatcgggagggttaccagagacgctccaactattacgagggaccacatacttctcacagcagccccgctgaccggactagggaggaagtggtaacaccaactctgcctgagcatactgctacgcgttcacagatggctactagcctggacttcaagacttatgtggatcaagcatgtagagccgcagaagagttcgtcaatatctattacgagactatggacaagcggcgacgggcactgacccggttgtacttggacaaggccactttgatttggaatggaaacgcggtatccgggctggatgccctcaataacttcttcgataccttgcctagttctgaatttcaggtgaacatgcttgattgtcagcctgtgcacgaacaggccacacagtctcagacaaccgtcctcgtggtgacttctggcacagtaaagttcgatgggaataagcaacacttcttcaatcaaaatttcctgcttaccgctcaaagcacgccaaacaacacggtatggaaaatcgccagtgactgtttcagattccaagactggtcaagttcctag

SEQ ID NO: 199717 - DNA, 594 bp, Artificial Sequence
  derived and/or modified sequence
atgagaaagtacagaagccactggagccagggcgacagagagggctaccagagaagaagcaactactacgagggcccccacaccagccacagcagccccgccgacagaaccagagaggaggtggtgacccccaccctgcccgagcacaccgccaccagaagccagatggccaccagcctggacttcaagacctacgtggaccaggcctgcagagccgccgaggagttcgtgaacatctactacgagaccatggacaagagaagaagagccctgaccagactgtacctggacaaggccaccctgatctggaacggcaacgccgtgagcggcctggacgccctgaacaacttcttcgacaccctgcccagcagcgagttccaggtgaacatgctggactgccagcccgtgcacgagcaggccacccagagccagaccaccgtgctggtggtgaccagcggcaccgtgaagttcgacggcaacaagcagcacttcttcaaccagaacttcctgctgaccgcccagagcacccccaacaacaccgtgtggaagatcgccagcgactgcttcagattccaggactggagcagcagctag

SEQ ID NO: 199718 - protein, 630 aa, Artificial Sequence
  derived and/or modified sequence
MLGMYVPDRFSLKSSRVQDGMGLYTARRVRKGEKFGPFAGEKRMPEDLDENMDYRLMWEVRGSKGEVLYILDATNPRHSNWLRFVHEAPSQEQKNLAAIQEGENIFYLAVEDIETDTELLIGYLDSDMEAEEEEQQIMTVIKEGEVENSRRQSTAGRKDRLGCKEDYACPQCESSFTSEDILAEHLQTLHQKPTEEKEFKCKNCGKKFPVKQALQRHVLQCTAKSSLKESSRSFQCSVCNSSFSSASSFEQHQETCRGDARFVCKADSCGKRLKSKDALKRHQENVHTGDPKKKLICSVCNKKCSSASSLQEHRKIHEIFDCQECMKKFISANQLKRHMITHSEKRPYNCEICNKSFKRLDQVGAHKVIHSEDKPYKCKLCGKGFAHRNVYKNHKKTHSEERPFQCEECKALFRTPFSLQRHLLIHNSERTFKCHHCDATFKRKDTLNVHVQVVHERHKKYRCELCNKAFVTPSVLRSHKKTHTGEKEKICPYCGQKFASSGTLRVHIRSHTGERPYQCPYCEKGFSKNDGLKMHIRTHTREKPYKCSECSKAFSQKRGLDEHKRTHTGEKPFQCDVCDLAFSLKKMLIRHKMTHNPNRPLAECQFCHKKFTRNDYLKVHMDNIHGVADS

SEQ ID NO: 199719 - DNA, 2492 bp, Artificial Sequence
  derived and/or modified sequence
gcgccccccgcgcccccgcagcaggaatggcaggaacggatccgggccgagcccgacccgggacgaggaggggctgagccgcgggggatcctggaatcggcagggaggtggggattctgggaggaaaactccatttcctccttccctgccggtttctcccctctaccctggcaccccaaatttcgatgtgccgcctgccgggcgctaagcgccggtgttgagagaggcggcggccgccgcgcccgggaaaatgctgggcatgtacgtgccggacaggttctccctgaagtcctcccgggttcaggacggcatggggctctacacggcccgcagagtgcgaaagggtgaaaagttcggaccctttgctggagagaagagaatgcctgaagacttggatgaaaatatggattacaggttgatgtgggaggttcgtgggagtaagggagaagttttgtacattttggatgctaccaacccacggcactccaactggcttcgcttcgttcatgaggcaccatctcaggagcagaagaacttggctgccattcaagaaggagaaaacattttctatttggcagttgaagatatagaaacagacacggagcttctgattggctacctggatagtgacatggaggctgaggaggaagaacagcaaattatgacagtcatcaaagaaggggaagttgaaaattctagaagacaatcaacagcgggcagaaaagatcgccttggctgtaaagaggactatgcttgtcctcaatgtgaatcgagttttaccagtgaggatattcttgctgagcatctccagacattgcaccagaaacccacagaggagaaagaatttaagtgcaagaactgtgggaagaaattcccagttaagcaggctttgcaaagacatgttcttcagtgcacagcgaaaagcagtctaaaggagtcttcgcgaagttttcagtgctctgtttgcaattcttccttcagttcagcatcgagttttgagcagcaccaggagacttgccggggggatgccaggtttgtgtgcaaggctgacagctgtggaaagaggctgaagagcaaggatgccctgaaaagacaccaggaaaatgtccacactggagatcctaagaaaaagcttatatgttcagtgtgcaataaaaagtgttcttcagcatcaagcctacaggaacatagaaagattcatgagatatttgattgtcaagaatgtatgaagaaatttatttcagctaatcagctaaaacgtcatatgatcacccactcagaaaaacgaccctataattgcgagatttgtaataagtctttcaagaggcttgatcaagtgggtgctcacaaagtaatacacagcgaagacaaaccttacaaatgcaaactttgtggaaagggatttgcccacagaaatgtttacaagaatcataagaagacccactctgaggagagaccgttccaatgtgaagaatgtaaagctttgttccggaccccattttctttacagagacacctgctaatacataacagtgagaggactttcaagtgccatcactgcgatgctacctttaagaggaaggatacattaaatgttcatgtccaggtggttcatgaaagacacaagaagtataggtgtgagctatgtaataaggcctttgttacaccttcagtgcttagaagtcataagaaaacacatacaggagaaaaggagaaaatctgtccatattgtggccagaaatttgccagcagtggtacactcagagttcatatccggagccacacaggtgagcgtccctatcaatgtccttactgtgaaaaaggattcagtaaaaatgatggactgaagatgcacattcgtactcacaccagggagaagccgtacaagtgctcagagtgcagcaaggccttcagccagaagcgaggcctggatgagcacaagaggacgcacactggagaaaagccttttcagtgtgatgtttgtgatttggcttttagcctgaagaaaatgctgattcgacacaagatgactcataatcccaatcgtcccctggcagaatgccagttttgccataagaagtttacaaggaatgactacctcaaagtgcacatggacaatatccatggtgtagctgacagctaataggggctgtaaaggaattaaactattcagaagggctcctaatatgaatcccagatttttatcacctgatcagcataacagaagtagccaaaagtgacttactggtctcatagttcttatttgcctacatttagagtctgtagatgcatatgcaaccaaaaaaaagtcttacttttaacaagaaatggtataaatggaaaaaaaatacaactccatagccttgcaaaatgcaacttgtgctctgtcttataaaaatggagaaaggagtcatggctctctttcttggccatccctctgtaatgaagtttataatatacttccctaataggcctttttaaaaaaaaaaaaa

SEQ ID NO: 199720 - DNA, 1893 bp, Artificial Sequence
  derived and/or modified sequence
atgctggggatgtatgtgcctgaccggttctcactgaagtcctcacgcgtccaagatggaatgggcctttacacagcccgcagggtgaggaagggagaaaagtttggccctttcgccggcgaaaaacgaatgccagaggacttggacgagaacatggactatagactcatgtgggaagtccggggctccaaaggcgaggtactgtatatcctggacgctaccaatcctcggcactcaaactggctccgctttgtacatgaggccccatcgcaggagcagaagaacttggcagcaattcaggaaggagagaatatcttctacctcgctgtggaggacattgaaactgacacagagctgctcatcggctatcttgattccgatatggaggccgaagaggaagaacagcaaatcatgactgtcatcaaggagggcgaggtggaaaattcccgccggcagtctacagctggtagaaaagaccgcttggggtgtaaggaggattatgcatgccctcaatgtgagtcatcttttactagcgaagatatcttggcagaacatctccagactctgcatcaaaagccaactgaggagaaggaattcaaatgcaaaaactgtggcaaaaagttcccggtcaagcaggccttacagagacacgtgctccagtgtactgcaaagtcatcattgaaggagagttctcgcagtttccagtgtagtgtctgcaactcttcttttagcagcgcatcgagctttgaacaacaccaggagacatgcaggggggacgccagatttgtgtgtaaagccgatagttgtggaaaaagactcaaatccaaagacgcgctgaaacgccatcaagagaatgttcatactggtgaccccaaaaagaaacttatatgtagtgtttgtaataagaagtgctctagtgcgtcctctctgcaggagcaccggaagatacacgaaatcttcgactgccaagagtgcatgaagaaattcatttctgctaaccagctcaaacggcatatgatcactcattcagaaaagagaccctacaactgcgagatatgtaataagtcttttaaaaggctcgatcaggtgggagcccataaagtaatccattccgaggacaagccatataaatgcaaactgtgcggcaaaggttttgcccataggaacgtgtacaagaaccataaaaaaacccatagcgaagaacgaccttttcagtgcgaggaatgcaaagctctgttccggacgcccttctccctgcagcggcacctactgatccacaatagcgagcgcaccttcaagtgtcatcactgtgacgccacttttaaaaggaaagatactctgaatgttcacgtgcaggtagttcacgaacggcacaaaaagtaccgctgtgagttatgtaataaggcctttgtcaccccgagcgtgttgcgcagtcataagaagacacacacaggggaaaaggaaaagatctgtccttattgtggacagaagttcgccagcagcggaaccctccgggtgcacattaggtcccacactggcgaacggccctatcagtgcccatattgtgagaagggattctcaaaaaacgacggattgaaaatgcacatacggacccacacgcgagagaaaccctacaagtgcagcgaatgcagtaaagcattttctcagaagcgaggtctggacgaacataaacgaacgcatacaggtgagaaacccttccagtgtgacgtgtgtgatctagccttttccctcaagaagatgctgatccgacacaagatgacccacaaccccaaccgcccacttgctgagtgccagttctgccacaaaaagtttactcggaacgattatctcaaagttcacatggataacattcatggggtagccgattcttag

SEQ ID NO: 199721 - DNA, 1893 bp, Artificial Sequence
  derived and/or modified sequence
atgctgggcatgtatgtgcctgaccgcttcagcctgaagagcagccgggtgcaggacggcatgggcctgtacacagccaggagagtgaggaaaggagagaagtttggcccctttgctggggagaagaggatgcctgaggacctggatgagaacatggactaccgcctgatgtgggaggtgcggggcagcaagggggaggtgctgtacatcctggatgccaccaaccccaggcacagcaactggctgcgctttgtgcatgaggcccccagccaggagcagaagaacctggccgccatccaggagggggagaacatcttctacctggccgtggaggacattgaaacagacacagagctgctgattggctacctggacagcgacatggaggccgaggaggaggagcagcagatcatgaccgtcatcaaggagggggaggtggagaacagccggcggcagagcacagctggcaggaaggaccggctgggctgcaaggaggactatgcctgcccccagtgtgagagcagcttcaccagcgaggacatcctggccgagcacctgcagaccctgcaccagaagcccacagaggagaaggagttcaagtgcaagaactgtgggaagaagtttcctgtgaagcaggccctgcagagacatgtgctgcagtgcacagccaagagcagcctgaaggagagcagccgctccttccagtgcagcgtgtgcaacagcagcttcagcagcgccagcagctttgagcagcaccaggagacctgcagaggagatgccaggtttgtgtgcaaggctgacagctgtgggaagaggctgaagagcaaggatgccctgaagaggcaccaggagaatgtgcacactggagaccccaagaagaagctgatctgcagcgtgtgcaacaagaagtgcagcagcgccagcagcctgcaggagcacaggaagatccacgagatctttgactgccaggagtgcatgaagaagttcatcagcgccaaccagctgaagaggcacatgatcacccacagcgagaagaggccctacaactgtgagatctgcaacaagagcttcaagaggctggaccaggtgggcgcccacaaggtgatccacagcgaggacaagccctacaagtgcaagctgtgtgggaaaggatttgcccacagaaatgtgtacaagaaccacaagaagacccacagcgaggagcggcccttccagtgtgaggagtgcaaggccctcttccgcacccccttcagcctgcagaggcacctgctgatccacaacagcgagaggaccttcaagtgccaccactgtgatgccaccttcaagaggaaggacaccctgaatgtgcacgtgcaggtggtgcatgagcggcacaagaagtaccgctgtgagctgtgcaacaaggcctttgtgacccccagcgtgctgcggagccacaagaagacccacactggagagaaggagaagatctgcccctactgcggccagaagtttgccagcagcggcaccctgcgggtgcacatccgcagccacactggagagcggccctaccagtgcccctactgtgagaagggcttcagcaagaatgatggcctgaagatgcacatccgcacccacacccgggagaagccctacaagtgcagtgaatgttccaaggccttcagccagaagaggggcctggatgagcacaagaggacccacactggagagaagcccttccagtgtgatgtgtgtgacctggccttcagcctgaagaagatgctgatccgccacaagatgacccacaaccccaaccggcccctggccgagtgccagttctgccacaagaagttcaccagaaatgactacctgaaggtgcacatggacaacatccatggagtggccgacagctag

SEQ ID NO: 199722 - DNA, 1893 bp, Artificial Sequence
  derived and/or modified sequence
atgctgggcatgtacgtgcccgaccggttcagcctgaagagcagcagagtacaggacggtatgggcctgtatactgctagacgcgtccgtaaaggagaaaagttcggccccttcgccggtgaaaagagaatgcctgaagacttagatgaaaacatggattaccgacttatgtgggaggtgcggggatccaaaggagaagtcctgtacatcctggacgctactaacccaagacattcaaactggctgcggtttgtgcacgaagctccttctcaggaacagaaaaacttggccgcaatccaggagggggaaaacatcttttatctagccgtggaggacatagagactgataccgagctactcattggatatctggactcagacatggaagcagaggaggaggagcaacagatcatgacagtcattaaagagggcgaggttgagaacagccggcgacagtctacagcaggccgaaaagacaggcttggatgcaaagaggattacgcttgtccacagtgcgagtcttctttcaccagcgaagacatcctggccgaacacctgcaaaccctccaccagaaacccacggaagagaaggagttcaagtgcaaaaactgtggcaaaaaattccctgttaagcaggccttacagcgccacgtgctgcaatgcaccgcaaaaagttcactgaaggaaagctcaagaagctttcagtgttccgtctgcaactcttccttctcctcggctagttctttcgagcagcatcaagaaacatgtaggggggatgcccgcttcgtatgtaaagctgattcctgcgggaaacgacttaagagcaaggacgccctcaagcgtcaccaagaaaatgtgcacacaggagaccccaaaaagaaattaatctgcagcgtgtgtaacaaaaagtgtagtagtgcgtcttccctccaagagcaccgaaagattcacgagatattcgattgtcaggagtgtatgaagaaatttatctcggccaatcaactgaaaaggcacatgattactcacagtgaaaaaaggccttacaattgcgaaatctgtaataagtccttcaaacgactcgaccaggtgggagctcataaggtgatccactcggaagacaagccatataagtgcaaactctgcggaaagggttttgcacaccgtaatgtctataagaatcacaaaaaaacacatagcgaagagcgtcccttccagtgtgaggaatgtaaggccctcttccgaacaccgttctccctgcaacgtcatctgctcatccacaactccgaaagaacatttaaatgtcaccattgcgacgcgacctttaaacgtaaggacacacttaatgtccacgtgcaggtagtgcacgaacgccacaaaaagtacagatgcgaactgtgtaacaaagcttttgtaacaccaagcgtgctgcgcagccacaaaaaaacccataccggcgagaaggagaagatttgtccatattgcggtcagaaattcgcgtcctcaggcaccctgcgcgtccacattcgaagccatacaggtgagcgcccctaccagtgcccgtactgcgaaaagggcttttccaagaatgacgggctcaaaatgcatataagaactcacacccgcgaaaagccgtacaagtgcagtgagtgcagcaaagctttcagtcagaagcgaggtttggacgaacacaagcggacccacacaggagagaagcccttccaatgtgatgtatgcgaccttgcattctctctgaagaaaatgctcattcgccacaagatgactcacaaccctaacaggccccttgccgagtgccagttctgtcacaagaagtttaccaggaatgactatctcaaggtgcacatggacaatattcacggagtcgccgattcttag

SEQ ID NO: 199723 - DNA, 5330 bp, Artificial Sequence
  derived and/or modified sequence
gcgcccccgcagcaggaatggcaggaacggatccgggccgagcccgacccgggacgaggaggggctgagccgcgggggatcctggaatcggcagggaggtggggattctgggaggaaaactccatttcctccttccctgccggtttctcccctctaccctggcaccccaaatttcgatgtgccgcctgccgggcgctaagcgccggtgttgagagaggcggcggccgccgcgcccgggaaaatgctgggcatgtacgtgccggacaggttctccctgaagtcctcccgggttcaggacggcatggggctctacacggcccgcagagtgcgaaagggtgaaaagttcggaccctttgctggagagaagagaatgcctgaagacttggatgaaaatatggattacaggttgatgtgggaggttcgtgggagtaagggagaagttttgtacattttggatgctaccaacccacggcactccaactggcttcgcttcgttcatgaggcaccatctcaggagcagaagaacttggctgccattcaagaaggagaaaacattttctatttggcagttgaagatatagaaacagacacggagcttctgattggctacctggatagtgacatggaggctgaggaggaagaacagcaaattatgacagtcatcaaagaaggggaagttgaaaattctagaagacaatcaacagcgggcagaaaagatcgccttggctgtaaagaggactatgcttgtcctcaatgtgaatcgagttttaccagtgaggatattcttgctgagcatctccagacattgcaccagaaacccacagaggagaaagaatttaagtgcaagaactgtgggaagaaattcccagttaagcaggctttgcaaagacatgttcttcagtgcacagcgaaaagcagtctaaaggagtcttcgcgaagttttcagtgctctgtttgcaattcttccttcagttcagcatcgagttttgagcagcaccaggagacttgccggggggatgccaggtttgtgtgcaaggctgacagctgtggaaagaggctgaagagcaaggatgccctgaaaagacaccaggaaaatgtccacactggagatcctaagaaaaagcttatatgttcagtgtgcaataaaaagtgttcttcagcatcaagcctacaggaacatagaaagattcatgagatatttgattgtcaagaatgtatgaagaaatttatttcagctaatcagctaaaacgtcatatgatcacccactcagaaaaacgaccctataattgcgagatttgtaataagtctttcaagaggcttgatcaagtgggtgctcacaaagtaatacacagcgaagacaaaccttacaaatgcaaactttgtggaaagggatttgcccacagaaatgtttacaagaatcataagaagacccactctgaggagagaccgttccaatgtgaagaatgtaaagctttgttccggaccccattttctttacagagacacctgctaatacataacagtgagaggactttcaagtgccatcactgcgatgctacctttaagaggaaggatacattaaatgttcatgtccaggtggttcatgaaagacacaagaagtataggtgtgagctatgtaataaggcctttgttacaccttcagtgcttagaagtcataagaaaacacatacaggagaaaaggagaaaatctgtccatattgtggccagaaatttgccagcagtggtacactcagagttcatatccggagccacacaggtgagcgtccctatcaatgtccttactgtgaaaaaggattcagtaaaaatgatggactgaagatgcacattcgtactcacaccagggagaagccgtacaagtgctcagagtgcagcaaggccttcagccagaagcgaggcctggatgagcacaagaggacgcacactggagaaaagccttttcagtgtgatgtttgtgatttggcttttagcctgaagaaaatgctgattcgacacaagatgactcataatcccaatcgtcccctggcagaatgccagttttgccataagaagtttacaaggaatgactacctcaaagtgcacatggacaatatccatggtgtagctgacagctaataggggctgtaaaggaattaaactattcagaagggctcctaatatgaatcccagatttttatcacctgatcagcataacagaagtagccaaaagtgacttactggtctcatagttcttatttgcctacatttagagtctgtagatgcatatgcaaccaaaaaaaagtcttacttttaacaagaaatggtataaatggaaaaaaaatacaactccatagccttgcaaaatgcaacttgtgctctgtcttataaaaatggagaaaggagtcatggctctctttcttggccatccctctgtaatgaagtttataatatacttccctaataggcctttttattttattgttattctttgtgtgtctgtgtgtctgtgtgtctgtatgtgtctgtgtgtgtgcactcacttgcaaatgccagttgttgcagctggttttaccaatttaaatagaaataaatcaagatatccaactatttctttgcagatgaggataagaataagttatcaaagtctcaagtttgataggaaaataaatagttgctattttataagacaaaccaagagctgagcttatctaatagctctgtgcaacaaatgagtttaaaatagatatttgataactaaaacatctattaaaatattgctcattttagaggattcttaggaaacattatttattctcatcattcagatgcagacattcatggtctggaatacttttataagttctacacaaaaatgaccatcacatttaaatattcagcaggctacccctcttgaatttagaccatttagctttagaaattaacagtataccaatatatataattaaaaatagaaaccaaatagattctctgtatttggcaacagagtggcagaacaatagtggcatctccacatttgttaggatgaacatagccctttcccctctccttccataaaagtgcacagaacatgttagtgcagatacagtcctcagaacattaacattccattttgcaaaagacattttccagaatcttggcagtaggtaattctgaaacacttttgaattaccttcaatcatcccatataattaggaatccagaatacaaagtacaaacttggcaattgttatgattgaaactgtcactgatgcttaagggaaattgaagcaagaagcataatttcttcctttaggttatatttcagcaaaatacttgacagcaacatacaatgaacagcttgtttggagagatgatatgatacaatgtaatagtgatgtcaaaataacctggaggaatatccaaaaaccagaaaaacgttaaaatgaagcccaactcatgaacctctctaactgaagcccagtcaaaagaaaggaagtatagttttaaggaagttatttggttctaatgagttaaggagaaaggttatctgagacacagttctttgacttcaggaatctcattttagaattatattcatgcccagttccagttttaaaaagaaacataaagattcaatgtagacatttgaatgttgtaaaatactaaatttgaaactcagaagagataacttttaaaaacataaatcctaaaattatagtttagaagatatttaagtatagttatatgtagtattttgaatctgaaattatagactgtattttataaaaataaattttggtcttgtttctcactatatcatttgtttcaacaatatatttttagatctaaagtgttttcattttaatatgatagtgtgtttaatatcatttgaatataaaaagacagctgtaaaatttgatagtgtgtattatttaagcacatcctgtatatttctttgaatgctgctttctctatatgggatgctttatatcccgattatgtgatgaatgtaaaacttgaaaggagtccaaattccaattttgtgtaatctcagtgagtcacagttcacatggctgctggggaaattaccctgaaaactgtggtgtcgctatgctgtggagtaaacagacaggcaagaggtgctgggctttatcctgctgaaggtttatagacatggaaatctttagaaaatggtgtagaaggacctacaccagagagtggtacaccactctctcctttcagaggactgaaaccaaaacaagtccttagtagactatttgtatgctgtaaatttttatccaaaagacaagtattcatgggtagtttcagatatattagcatttgcttgctaaaacttttaaattacttagtaataaccaaaaaaagacactattttaggcatgattgatcaattgaaagcatagataatcataaggaaaagtcttacagacaagctgaagtacaggtacctactttgaaatgtcttctgtttcctgctgtgaaagattttggctggggtattttcttgagaaaagaccagacccttaggtgcctataaagtctaagtaattgagacttagaaattggctaagtaaatttaagagacgttcaataatgtaggtgggttcagatacccttttataataactgtcttcttagtatattaacactcaagatgtttgtgtatctttaatttgcctttgtttcacaataactggcttttgttttccttttcatggtgtgttgttggctatatagaggcatttattggtaaattataatcagcagttgcaccatggaagtattcttggtgataaattcttggggttacatagtatagttaacatgttattttcaagaaacatgagtgtgtgtgtctgtgtgtgtgtgtctgaagagtatcacttatatgcagtgcatatacatgtaagtgcattactttgctcaaatatcttctgacctattacagtcaactcatgcatgagtgtgaacatgtattacagaaggtcttacagccttagtttctgttttagattttatgtgctgcttcctttctcaaacaaaagcatgaaaggaaagaggataagtactagaaatattcatttttttccttcacaaatctaaatgttgcttatgaaaactcatcttagagtaatgaatatgtggaagtgggtaggtaggaggaaatgtgcctctttaaaatcctaaaattttaccattgatattgacatttgtttgcgtgtatataaatggagcatgtgtaaatatagaattccaatagcattttttattttattataaatctataataaatatatataaatcactacca

SEQ ID NO: 199724 - DNA, 1893 bp, Artificial Sequence
  derived and/or modified sequence
atgctggggatgtatgtccccgatcgtttcagcttgaagagcagtagggtgcaggatggtatgggactttataccgctaggcgggtgaggaaaggtgagaagttcggccctttcgctggcgagaagaggatgccagaggatctcgatgagaacatggattaccgcctcatgtgggaggtgcggggtagcaaaggggaggtcctgtacatcctcgacgcaactaaccccagacatagcaactggctaagatttgtccacgaagccccatcccaggagcagaaaaacttagctgctatccaggaaggcgaaaacattttttatctcgcagtggaggacatcgagaccgatacagagttacttatagggtaccttgactctgatatggaagccgaagaggaggagcagcagattatgacggtgattaaagaaggcgaagtcgagaacagtaggcggcaaagcaccgccggaagaaaggacagattaggatgtaaggaagactacgcttgccctcaatgtgagagcagtttcacgagcgaggacattttggctgagcacctgcaaacacttcatcagaaacctactgaggagaaagagtttaagtgtaaaaactgcggcaaaaaattccctgtcaaacaggctcttcagcgccacgttctccagtgtacagcaaagagctccttaaaggaatcaagtcgatcattccagtgcagcgtttgtaatagtagcttctcatcagcctcatcgttcgaacaacatcaggagacctgtagaggcgatgctcgctttgtctgcaaggccgattcgtgcgggaagagattaaaaagtaaggacgctcttaagcggcaccaggagaacgtccacactggggatcccaaaaaaaagctgatctgcagcgtttgtaacaagaagtgtagcagcgctagttcactgcaggagcatagaaagattcatgagatctttgactgtcaggagtgtatgaaaaagttcatctctgccaatcagttaaaacgacacatgattacccacagcgaaaaaagaccctacaactgcgaaatatgcaataaatctttcaagcgcctcgaccaggtaggagcccataaggtgatacactccgaggacaagccttataaatgtaagctgtgcggcaaaggtttcgcccaccgcaatgtttataaaaaccacaaaaagactcactctgaagagagacctttccagtgtgaggagtgcaaggccttgtttcgaacaccattttccctgcagcgccatctgctgatccacaattctgagcgaacctttaagtgtcaccactgtgatgccactttcaaacggaaggacacgctgaacgtacacgtccaggttgtgcatgagagacacaaaaaataccgttgtgagctgtgcaacaaggccttcgtgactccctccgtcctcaggtcccacaaaaagacacataccggggaaaaggaaaagatctgtccttactgcggtcagaagttcgctagctcgggtacactacgggtccacatacgttctcacactggggaacgcccttatcaatgtccctactgtgagaagggattcagcaaaaatgacggtctaaaaatgcatatccggacacatacccgcgagaagccgtacaagtgttctgagtgcagcaaggccttcagtcagaaaaggggactagatgagcataagcgaactcacactggcgagaagcctttccaatgtgacgtgtgcgatctagctttctcgctaaagaagatgctcatccggcataaaatgacccacaatccgaataggcccttggctgaatgtcagttttgtcacaagaagtttaccaggaatgactatcttaaggtgcatatggacaatatacacggcgtcgccgactcatag

SEQ ID NO: 199725 - DNA, 1893 bp, Artificial Sequence
  derived and/or modified sequence
atgctgggcatgtacgtgcccgacagattcagcctgaagagcagcagagtgcaggacggcatgggcctgtacaccgccagaagagtgagaaagggcgagaagttcggccccttcgccggcgagaagagaatgcccgaggacctggacgagaacatggactacagactgatgtgggaggtgagaggcagcaagggcgaggtgctgtacatcctggacgccaccaaccccagacacagcaactggctgagattcgtgcacgaggcccccagccaggagcagaagaacctggccgccatccaggagggcgagaacatcttctacctggccgtggaggacatcgagaccgacaccgagctgctgatcggctacctggacagcgacatggaggccgaggaggaggagcagcagatcatgaccgtgatcaaggagggcgaggtggagaacagcagaagacagagcaccgccggcagaaaggacagactgggctgcaaggaggactacgcctgcccccagtgcgagagcagcttcaccagcgaggacatcctggccgagcacctgcagaccctgcaccagaagcccaccgaggagaaggagttcaagtgcaagaactgcggcaagaagttccccgtgaagcaggccctgcagagacacgtgctgcagtgcaccgccaagagcagcctgaaggagagcagcagaagcttccagtgcagcgtgtgcaacagcagcttcagcagcgccagcagcttcgagcagcaccaggagacctgcagaggcgacgccagattcgtgtgcaaggccgacagctgcggcaagagactgaagagcaaggacgccctgaagagacaccaggagaacgtgcacaccggcgaccccaagaagaagctgatctgcagcgtgtgcaacaagaagtgcagcagcgccagcagcctgcaggagcacagaaagatccacgagatcttcgactgccaggagtgcatgaagaagttcatcagcgccaaccagctgaagagacacatgatcacccacagcgagaagagaccctacaactgcgagatctgcaacaagagcttcaagagactggaccaggtgggcgcccacaaggtgatccacagcgaggacaagccctacaagtgcaagctgtgcggcaagggcttcgcccacagaaacgtgtacaagaaccacaagaagacccacagcgaggagagacccttccagtgcgaggagtgcaaggccctgttcagaacccccttcagcctgcagagacacctgctgatccacaacagcgagagaaccttcaagtgccaccactgcgacgccaccttcaagagaaaggacaccctgaacgtgcacgtgcaggtggtgcacgagagacacaagaagtacagatgcgagctgtgcaacaaggccttcgtgacccccagcgtgctgagaagccacaagaagacccacaccggcgagaaggagaagatctgcccctactgcggccagaagttcgccagcagcggcaccctgagagtgcacatcagaagccacaccggcgagagaccctaccagtgcccctactgcgagaagggcttcagcaagaacgacggcctgaagatgcacatcagaacccacaccagagagaagccctacaagtgcagcgagtgcagcaaggccttcagccagaagagaggcctggacgagcacaagagaacccacaccggcgagaagcccttccagtgcgacgtgtgcgacctggccttcagcctgaagaagatgctgatcagacacaagatgacccacaaccccaacagacccctggccgagtgccagttctgccacaagaagttcaccagaaacgactacctgaaggtgcacatggacaacatccacggcgtggccgacagctag

SEQ ID NO: 199726 - protein, 728 aa, Artificial Sequence
  derived and/or modified sequence
MSESGEMSEFGYIMELIAKGKVTIKNIERELICPACKELFTHPLILPCQHSICHKCVKELLLTLDDSFNDVGSDNSNQSSPRLRLPSPSMDKIDRINRPGWKRNSLTPRTTVFPCPGCEHDVDLGERGINGLFRNFTLETIVERYRQAARAATAIMCDLCKPPPQESTKSCMDCSASYCNECFKIHHPWGTIKAQHEYVGPTTNFRPKILMCPEHETERINMYCELCRRPVCHLCKLGGNHANHRVTTMSSAYKTLKEKLSKDIDYLIGKESQVKSQISELNLLMKETECNGERAKEEAITHFEKLFEVLEERKSSVLKAIDSSKKLRLDKFQTQMEEYQGLLENNGLVGYAQEVLKETDQSCFVQTAKQLHLRIQKATESLKSFRPAAQTSFEDYVVNTSKQTELLGELSFFSSGIDVPEINEEQSKVYNNALINWHHPEKDKADSYVLEYRKINRDDEMSWNEIEVCGTSKIIQDLENSSTYAFRVRAYKGSICSPCSRELILHTPPAPVFSFLFDEKCGYNNEHLLLNLKRDRVESRAGFNLLLAAERIQVGYYTSLDYIIGDTGITKGKHFWAFRVEPYSYLVKVGVASSDKLQEWLRSPRDAVSPRYEQDSGHDSGSEDACFDSSQPFTLVTIGMQKFFIPKSPTSSNEPENRVLPMPTSIGIFLDCDKGKVDFYDMDQMKCLYERQVDCSHTLYPAFALMGSGGIQLEEPITAKYLEYQEDM

SEQ ID NO: 199727 - DNA, 2187 bp, Artificial Sequence
  derived and/or modified sequence
atgagcgagagcggcgagatgagcgagttcggctacatcatggagctgatcgccaagggcaaggtgaccatcaagaacatcgagagagagctgatctgccccgcctgcaaggagctgttcacccaccccctgatcctgccctgccagcacagcatctgccacaagtgcgtgaaggagctgctgctgaccctggacgacagcttcaacgacgtgggcagcgacaacagcaaccagagcagccccagactgagactgcccagccccagcatggacaagatcgacagaatcaacagacccggctggaagagaaacagcctgacccccagaaccaccgtgttcccctgccccggctgcgagcacgacgtggacctgggcgagagaggcatcaacggcctgttcagaaacttcaccctggagaccatcgtggagagatacagacaggccgccagagccgccaccgccatcatgtgcgacctgtgcaagccccccccccaggagagcaccaagagctgcatggactgcagcgccagctactgcaacgagtgcttcaagatccaccacccctggggcaccatcaaggcccagcacgagtacgtgggccccaccaccaacttcagacccaagatcctgatgtgccccgagcacgagaccgagagaatcaacatgtactgcgagctgtgcagaagacccgtgtgccacctgtgcaagctgggcggcaaccacgccaaccacagagtgaccaccatgagcagcgcctacaagaccctgaaggagaagctgagcaaggacatcgactacctgatcggcaaggagagccaggtgaagagccagatcagcgagctgaacctgctgatgaaggagaccgagtgcaacggcgagagagccaaggaggaggccatcacccacttcgagaagctgttcgaggtgctggaggagagaaagagcagcgtgctgaaggccatcgacagcagcaagaagctgagactggacaagttccagacccagatggaggagtaccagggcctgctggagaacaacggcctggtgggctacgcccaggaggtgctgaaggagaccgaccagagctgcttcgtgcagaccgccaagcagctgcacctgagaatccagaaggccaccgagagcctgaagagcttcagacccgccgcccagaccagcttcgaggactacgtggtgaacaccagcaagcagaccgagctgctgggcgagctgagcttcttcagcagcggcatcgacgtgcccgagatcaacgaggagcagagcaaggtgtacaacaacgccctgatcaactggcaccaccccgagaaggacaaggccgacagctacgtgctggagtacagaaagatcaacagagacgacgagatgagctggaacgagatcgaggtgtgcggcaccagcaagatcatccaggacctggagaacagcagcacctacgccttcagagtgagagcctacaagggcagcatctgcagcccctgcagcagagagctgatcctgcacaccccccccgcccccgtgttcagcttcctgttcgacgagaagtgcggctacaacaacgagcacctgctgctgaacctgaagagagacagagtggagagcagagccggcttcaacctgctgctggccgccgagagaatccaggtgggctactacaccagcctggactacatcatcggcgacaccggcatcaccaagggcaagcacttctgggccttcagagtggagccctacagctacctggtgaaggtgggcgtggccagcagcgacaagctgcaggagtggctgagaagccccagagacgccgtgagccccagatacgagcaggacagcggccacgacagcggcagcgaggacgcctgcttcgacagcagccagcccttcaccctggtgaccatcggcatgcagaagttcttcatccccaagagccccaccagcagcaacgagcccgagaacagagtgctgcccatgcccaccagcatcggcatcttcctggactgcgacaagggcaaggtggacttctacgacatggaccagatgaagtgcctgtacgagagacaggtggactgcagccacaccctgtaccccgccttcgccctgatgggcagcggcggcatccagctggaggagcccatcaccgccaagtacctggagtaccaggaggacatgtag

SEQ ID NO: 199728 - DNA, 2187 bp, Artificial Sequence
  derived and/or modified sequence
atgtctgaaagcggcgagatgtcggaatttggctatattatggagctcatcgccaaaggcaaggttaccatcaagaatatcgagagggaactgatctgccccgcctgtaaggaattgttcacgcatccactgattctcccttgtcagcactctatttgccataaatgtgtgaaagagctgcttctcaccctggacgattctttcaatgacgtaggatctgacaacagtaaccagtcctcgccccggctgcgcctgccctctccctctatggataaaatcgacagaatcaatagacctggatggaagcgcaattcgcttactccccgaaccacagtgttcccatgccccggttgtgagcatgacgtcgatttgggcgaacgaggcattaacgggctattccgaaatttcacactagagacaatcgtggaacgctatcgccaggccgcccgcgccgccactgccataatgtgtgacctctgtaagcctcccccgcaggagagcacaaagtcctgcatggattgctccgcctcctactgtaatgagtgcttcaagatccaccacccttgggggaccattaaggcccagcacgagtatgtgggtccaaccaccaacttccggcctaagatcttgatgtgcccagagcacgagacggaaagaattaatatgtattgcgaactttgcaggcggccggtgtgtcatctgtgcaagcttggcggaaatcacgctaaccaccgggtgaccaccatgtcctctgcctacaaaactctaaaagaaaagctgagtaaagacattgactatttgattgggaaggagtctcaggtgaagtctcagatatccgaattgaatctcctgatgaaggaaactgaatgtaatggggagcgagccaaagaggaagcaattacccacttcgaaaaattgtttgaagtgcttgaggaacgtaaatcttcagttctgaaggcaatcgactcgagcaagaagctcaggctggataagttccagacgcagatggaggagtatcagggcctgctggagaataatgggctcgtgggttatgctcaggaggtcttaaaggagacagatcagtcctgctttgtacaaacagcaaagcagcttcacctccgtatccagaaagccacggagtcactgaagtcgtttcggccagccgctcagacgagctttgaagattacgtggtaaatactagtaaacaaacagagctgctaggcgaactttcattcttttcttctggtattgacgtgcccgagatcaatgaagaacagtctaaggtgtataataacgctctgatcaactggcatcaccccgaaaaggacaaagccgacagttacgtcctggagtaccgcaagatcaaccgagatgacgaaatgtcttggaacgaaatagaagtgtgcggtacctccaagataattcaggatctggaaaattctagtacttatgcctttcgggtgcgagcttataagggatcaatctgtagcccttgctcaagagagctgattctacacactcctcctgccccagttttctcattcctttttgacgagaaatgcggctataataatgaacacctattgctaaatctgaaacgtgatcgcgtcgagagccgggctggattcaatttgcttctcgcagccgagcgcattcaggtaggctactatacctccttggactacattatcggtgatacaggaatcaccaagggtaagcacttctgggcttttcgtgtagaaccttattcctatctggtaaaggtgggagtcgccagttccgacaaacttcaagagtggttacgttctcctagggatgccgtgagccctaggtacgaacaagactctggccatgactcaggatctgaggacgcatgctttgattcatcccagccctttacccttgtcaccataggaatgcagaagttctttatcccaaagagccccacctccagcaacgagcctgaaaaccgagtgctgccgatgccaacaagtattggcatcttcctcgactgtgataagggaaaagtggacttttacgatatggaccagatgaagtgcctctatgagagacaggtcgattgctcccacaccttgtatcctgcattcgctttgatgggctcaggtggaatccagctggaggagccaatcaccgccaagtatctcgagtaccaagaggacatgtag

SEQ ID NO: 199729 - DNA, 2187 bp, Artificial Sequence
  derived and/or modified sequence
atgtctgagagcggggagatgtctgaatttggctacatcatggagctgattgccaagggcaaggtgaccatcaagaacatcgagcgggagctgatctgcccagcctgcaaggagctgttcacccaccccctcatcctgccctgccagcacagcatctgccacaagtgtgtgaaggagctgctgctgaccctggatgacagcttcaatgatgtgggcagtgacaacagcaaccagagcagcccccggctgcggctgcccagccccagcatggacaagattgaccgcatcaacagacctggctggaagaggaacagcctgacccccaggaccaccgtcttcccctgccccggctgtgaacatgatgtggacctgggggagcggggcatcaatggcctcttcaggaacttcaccctggagaccatcgtggagcgctaccggcaggccgcccgggccgccacagccatcatgtgtgacctgtgcaagcccccaccccaggagagcaccaagagctgcatggactgcagcgccagctactgcaatgaatgcttcaagatccaccacccctggggcaccatcaaggcccagcacgagtatgtgggccccaccaccaacttccggcccaagatcctgatgtgcccagagcatgaaacagagcgcatcaacatgtactgtgagctgtgccggcggcctgtgtgccacctgtgcaagctgggcggcaaccacgccaaccaccgggtgaccaccatgagcagcgcctacaagaccctgaaggagaagctgagcaaggacatcgactacctgattggcaaggagagccaggtgaagagccagatcagcgagctgaacctgctgatgaaggagacagaatgtaatggagagcgggccaaggaggaggccatcacccactttgagaagctgtttgaggtgctggaggagaggaagagctctgtgctgaaggccatcgacagcagcaagaagctgcggctggacaagttccagacccagatggaggagtaccagggcctgctggagaacaacggcctggtgggctacgcccaggaggtgctgaaggagacagaccagagctgctttgtgcagacagccaagcagctgcacctgcgcatccagaaggccacagagagcctgaagagcttccggcctgctgcccagaccagctttgaggactatgtggtgaacaccagcaagcagacagagctgctgggggagctgtccttcttcagcagcggcattgatgtgcctgagatcaatgaggagcagagcaaggtgtacaacaatgccctgatcaactggcaccaccctgagaaggacaaggctgacagctatgtgctggagtacaggaagatcaacagagatgatgagatgtcctggaatgaaattgaggtgtgtggcaccagcaagatcatccaggacctggagaacagcagcacctacgccttccgggtgcgggcctacaagggcagcatctgcagcccctgcagccgggagctgatcctgcacaccccaccagcccctgtgttctccttcctgtttgatgagaagtgtggctacaacaatgagcacctgctgctgaacctgaagagggacagagtggagagcagagctggcttcaacctgctgctggccgctgagcgcatccaggtgggctactacaccagcctggactacatcatcggggacaccggcatcaccaagggcaagcacttctgggccttccgggtggagccctacagctacctggtgaaggtgggcgtggccagcagtgacaagctgcaggagtggctgcggagccccagagatgctgtgagccccaggtatgagcaggacagcggccatgacagcggctctgaagatgcctgctttgacagcagccagcccttcaccctggtgaccatcggcatgcagaagttcttcatccccaagagccccaccagcagcaatgaacctgagaacagagtgctgcccatgcccaccagcatcggcatcttcctggactgtgacaagggcaaggtggacttctatgacatggaccagatgaagtgcctgtatgagcggcaggtggactgcagccacaccctgtacccagcctttgccctgatgggcagcggcggcatccagctggaggagcccatcacagccaagtacctggagtaccaggaggacatgtag

SEQ ID NO: 199730 - DNA, 2187 bp, Artificial Sequence
  derived and/or modified sequence
atgagcgagagcggcgagatgagcgagttcggctacatcatggagctgatagctaaaggtaaagttacgatcaagaatatcgaaagagagctcatatgtcccgcgtgtaaggaactttttactcaccccctgatacttccttgtcagcactctatatgtcacaagtgcgttaaggagctgctgttgacgctggatgatagtttcaatgacgtgggttccgacaactctaatcaaagttccccccgactgcggctgccttctcccagcatggataagatagacagaattaacaggccaggctggaagcgaaacagcctgactccccggaccaccgtgtttccttgccctgggtgcgagcacgacgtggacctaggcgagaggggtataaatggactcttccgtaatttcacattggaaacgattgtcgaacgctataggcaggccgcgagagcagctactgcaatcatgtgcgatttgtgcaaaccaccaccccaggaaagtaccaagtcctgcatggactgcagcgccagttactgcaacgaatgttttaagatacaccacccatggggcactataaaagctcagcatgagtacgtcggccccactacaaacttccgccccaagattctaatgtgccctgagcatgagactgagagaatcaatatgtattgtgagctgtgtcgaaggcccgtatgtcacctttgtaaactcggggggaatcacgctaaccatcgcgttaccacgatgagctcagcatacaagactctaaaggagaaactttccaaggatatagattacctcattggcaaggaatcccaagtcaaaagccagatatcggaactgaaccttctcatgaaggagacagagtgtaatggtgaacgcgcaaaggaggaggcgatcacccatttcgagaagctgtttgaagtactggaggagaggaaaagctcggtgctgaaggctatagattctagtaaaaagctcaggttggataagtttcaaacgcagatggaagagtatcaaggactgctcgagaataatggattggtgggctatgcccaggaagtgctgaaggaaaccgatcaatcgtgctttgtccagacagccaagcagttgcacttgagaattcagaaggccacggaatccctgaagtctttccgacccgctgctcagacaagcttcgaagactacgtcgttaatactagtaaacagacagagctgctgggcgaactgtcctttttttccagtggaattgatgtccccgagatcaatgaggaacaatcaaaggtgtacaacaacgcactgatcaactggcatcaccccgagaaggataaggcagatagctatgtactggagtatcgcaagattaaccgtgacgatgagatgagctggaacgaaattgaggtttgtggaacctctaaaataattcaagaccttgagaactcatcaacttacgcatttagggtgagggcttataaaggatccatttgcagtccatgttccagagagttaatcctgcacactcctcctgcacccgtcttttccttcctgttcgacgaaaaatgcggatataacaatgagcaccttcttctcaatcttaaacgcgaccgggtcgaaagccgggctggctttaatctcctgcttgccgcagagcggatccaggtggggtattatacatccttagattatatcattggtgataccggcattacaaaggggaaacacttctgggcattccgtgtggaaccatatagttatctggtgaaggtcggggtggcatcaagtgataagctccaggaatggctgagaagtcctcgcgacgcagtttcacctcggtacgagcaggattctggccacgactctggctctgaggacgcatgctttgatagctctcaacccttcaccctggtgactataggtatgcagaagtttttcattccaaaatctcctactagctctaacgagcctgagaacagagtgttgcctatgccaaccagtatcggcatcttcctggactgtgacaagggaaaggtggatttctacgacatggaccagatgaagtgtttatacgagagacaggttgattgctcccatacattgtaccccgcattcgctctgatgggctccggcgggatccagcttgaagagccaatcacagcgaagtacctggagtatcaggaagatatgtag

SEQ ID NO: 199731 - DNA, 2187 bp, Artificial Sequence
  derived and/or modified sequence
atgtcggagagcggcgaaatgagcgagtttggttacatcatggaattgattgccaaaggtaaagttactatcaagaatatcgagcgcgaattaatctgtcccgcatgtaaagaactgttcacacacccgctgatcttaccatgtcagcattcaatatgccacaaatgcgttaaggagcttctgttgaccctggatgactcttttaatgacgtcgggagcgacaacagtaaccaatcatcacctcgcctacgattaccgagtccatctatggacaagattgataggattaaccggccaggttggaaaaggaacagcctcacccctcggacgactgtgtttccgtgccccggatgcgaacatgacgttgatttgggggaacggggaatcaatggcctgttcaggaacttcaccctggaaacgattgtagaaagataccggcaggctgccagagccgcaacagccatcatgtgtgacctgtgtaaaccaccccctcaggagtccaccaagtcgtgcatggattgtagcgccagctattgcaatgagtgtttcaagatccaccacccgtgggggacaattaaagcacagcacgaatacgttggcccaaccacgaatttccggccaaagattcttatgtgtcctgaacacgaaaccgagcggatcaacatgtactgtgaactgtgccgccgtcctgtctgccatttgtgtaaattgggcggtaaccatgccaaccatagagtgacaacaatgtcctccgcatacaagacactgaaggagaagttgtcaaaggatatagattatctcatcggtaaggagtcgcaggtgaagagccaaatctctgaactgaacttgctgatgaaggaaaccgagtgcaatggtgagagagctaaggaagaggccataacccattttgaaaaactctttgaagtcctagaagagcggaaaagttcagtgttgaaagcaattgactcttctaaaaaacttaggttagataagttccagacccagatggaggaatatcaaggattactggagaataatgggttggtgggttatgctcaggaggtgcttaaggaaaccgatcaaagttgtttcgtgcagacagccaaacaactgcatcttagaatccaaaaagcaactgaaagtctgaaatcctttaggcctgcggcacagacctctttcgaagattacgtggtgaatacatcaaagcagacggaactgctcggagaactatcttttttctccagcggcatagacgttcccgagattaatgaggagcagtcaaaggtctacaacaatgcgctgatcaattggcatcatcccgagaaagataaagctgattcgtacgtacttgagtacaggaagattaatagagatgacgaaatgagctggaacgaaattgaagtgtgtggcacttctaagatcatccaggacctggaaaacagtagtacctatgcattccgggtgagagcctacaagggctctatctgttctccctgtagcagagagctcattctgcacacccctccggcaccagtcttttctttcctcttcgacgagaagtgtggatataacaacgaacacctgttactcaatctgaaacgggatcgcgtggagagtagggctggatttaatctcctgttggcggctgagcgcattcaggtggggtactacaccagccttgactatatcattggcgacacaggaataactaagggtaaacacttctgggccttccgggtggagccatattcctatctagtaaaagtgggggtagcgtccagtgacaagctccaggagtggctacgaagtccacgcgacgccgtgtcaccacgatacgagcaggactctggacatgactcgggcagtgaagatgcctgtttcgattcctcacagcccttcaccttggtcactatcggtatgcagaagtttttcatccctaagtctcctacctccagtaatgagcctgagaaccgcgttctacccatgcccacatcgattggaatctttttggattgtgataaggggaaagtcgacttttacgatatggaccaaatgaaatgcctttacgagagacaggtggactgcagccacacgctgtacccagcgtttgccctcatgggcagtggcggaatccaactagaagaacccataaccgcgaagtacctggagtaccaggaggatatgtag

SEQ ID NO: 199732 - DNA, 4050 bp, Artificial Sequence
  derived and/or modified sequence
tggttaacagcttatgggcggggagctcggcaaaactcagactaaaaacagaaaaagagaaaagaaaggacaaattcgatacacccgcgtcggtcctccagagtttgtgaaggggtgtaaacatgtcggagtctggggagatgagtgaatttggctacatcatggaattgatagctaaaggcaaggttaccattaagaatatcgaaagggagctcatttgcccagcatgcaaggagctgtttacccacccattgattctcccttgccaacatagtatctgtcataaatgtgtaaaagaactcctgctgactctcgatgattcattcaacgatgtgggatcagacaactccaatcaaagcagtcctcgacttcggctcccctcccctagtatggataaaattgaccgaattaacagaccaggctggaagcgcaattcattgaccccgaggacaactgttttcccttgccctggctgtgagcatgatgtggatcttggagaacgaggaatcaatggtctgtttcgaaacttcactttggaaactattgtggaaagatatcgtcaagcagctagggcagccacagccattatgtgtgacctttgtaaaccaccacctcaagaatccacaaaaagctgcatggactgtagtgcaagttactgcaatgaatgcttcaaaattcatcacccttggggtactataaaagctcaacatgagtatgttggtccaactactaacttcagacccaagattttaatgtgcccagaacatgaaacagagagaataaacatgtactgtgaattatgtaggaggccagtttgccatctgtgtaagttgggtggtaatcatgccaaccaccgtgtaaccactatgagcagtgcctacaaaaccttaaaggaaaagctttcaaaggatattgattaccttattggtaaggaaagccaggtgaagagtcaaatatctgaactaaacttgttaatgaaagaaacagagtgtaatggagagagggctaaagaagaagcaattacacattttgaaaagctctttgaagttctggaagagaggaaatcatctgttttgaaagcaattgactcctctaagaaactaagattagacaaatttcagactcaaatggaagagtaccagggacttctagagaacaatggacttgtgggatatgctcaagaagtgctaaaggagacagatcagtcttgctttgtgcagacagcaaagcagctccacctcagaatacagaaagccacagaatctttgaagagctttagacctgcagctcagacttcttttgaagactatgttgttaatacctctaaacaaacagaacttcttggagaattatcctttttctctagtggcatagacgtgccagagatcaatgaggaacagagcaaagtttataacaatgccttgataaattggcaccatccagaaaaggataaagctgatagctatgttcttgaatatcggaaaatcaatagagatgatgaaatgtcatggaatgagatagaagtgtgtggaacaagtaaaataattcaagacttggaaaacagtagtacctatgctttcagagtaagagcttacaagggttcaatctgtagtccttgcagcagagaattgattcttcatactcctccagctccagttttcagcttcctctttgatgaaaaatgtggctataataatgaacacctcctgctgaacttgaagagagaccgtgtagagagtagagctggatttaatcttctgcttgctgcagaacgcatccaagtgggttattacacaagcttagactacatcattggagatactggcattacaaaaggaaaacacttctgggccttccgtgtggaaccatattcatacctggtaaaagtgggagttgcttctagcgataaactacaagaatggctccgttctccccgggatgcagttagtccaagatatgagcaagacagtgggcatgacagtggaagtgaggatgcctgttttgattcttcacaaccatttaccttagttactataggcatgcagaaattttttatacccaagtcacctacttcttctaatgaacctgaaaatagagttctccctatgccaacaagtattgggattttccttgactgtgataaaggcaaagtagatttctatgatatggatcagatgaaatgcctttatgaacgccaagtggactgttcacatacactgtatccagcatttgcattaatgggcagtggaggaattcagcttgaagaacccatcacagcaaaatatctggaataccaagaggacatgtagttgaaacatctgatgtgactcaggataaaaactgtaaacaaagcaatgccttagcgttaaccttcgtaactaattacatatcgctgagtgttctgtcaccccacttgtgtttgagtatgattcttcttgaaatacagaaaatctaaacagccttgtgtcttcatgtcgttgttctgcctttcacaaatgatgaaagtgaagatgttctttccaagttaatactgaagtggttaactttgcaactggactgtcttttactttatgtacaggatatctaatttatttctgtcagctggtgttgctgacactttccttatggtgggggggatacaaaagtatttattatgattctcttctgtttgacttttcatttttatatcatgtttatgtcctaagagaagatattttttaaatgccttatggataggaattagtactaagcaatgtgtcttgcatttgttttcaataggaaaacaaagttctagataggttaaaagaaaaacaccataaaagtggtagtatatttaagtggaaaattatgtattttaaagtgtgtaactattaaaaatatattgcctggaaaaggaatactactgttttgttttgttaagaccacaaactgtattgctaaggacattttaagagtctgcttagccataacactcatttaacagcatgggtagtaagcatggtttcttgcagaaaacacaaagttctcagctaacacattaaacttctcactttatatactttttttcagagaaatttatctttagtttttcttattctgtgaaaatatttgttcttatgtcaaagaattatttttcagatatattggtaaagatggactgatattaaaagtcatatttattcttttacccccttactgtgttttgtgattttcatttttggcccaattattacatatcaggttttcctgatttatatttacatgtttgaaaagttcattatatattttagtagcgttacatatattataaatttttgtaacatttaaatgttcacttatgtggcattttctgtttctcattggtaataagcatttctaatataagcaagtaaaaatacaaatttaattacttagaaatgataactaagatcacaatgactgtgtaccctttaaaatatcttttaatttgaggaattacattctatctaaattgtgtgtctgtttttgaaaggtgttgctttcaagtaggtggtttttatttaaagtacttatttttttgaggttaaaatattcagaaactacttttatgcattgtagcagtaatcatttatggaatgcttttgacatgttttaacagggtaaccaaaacttttaggcctgttttttttggttgtccttgttgttatatttttaatggaaatctgttactcaggctggtagcattaaattagctttttaccctcaactcaagtagcaaatatcatggagaacttcagtgtttagcaggctgttaatttcccatctatgaatagcactttatgatgtaggctaaactaagcaaataatgcagcgttatgtggatcattatgcaataaagctgctaaagtcacatttgtggttgatactcaagccttgtacaagcacatatgatgtagacatttttaaatgtgaagctttaacaggaataggatagctgtttcaaaccttgtgcaattgtaaataaattgtttagctgtgtttctttcatttttaataaaaaattaaaaagaa

SEQ ID NO: 199733 - protein, 141 aa, Artificial Sequence
  derived and/or modified sequence
MSHRMEGVGQLPASYRHNRPLLSGVSDAEARQPGKSPPFSMNWVVGSADLEIINATTGRRSCGGPSRLCKHVLSARWARLYGRLSTRTPSPGDTPSMYCEAKLGAHTYQSVKQQLFKAFQKAGLGTWVRKPPEQQQFLLTL

SEQ ID NO: 199734 - protein, 248 aa, Artificial Sequence
  derived and/or modified sequence
MGLWSPVPGNSVPRAPVMAGLGLGHSQGAPQGPHDGKTDRSSGPGRRRTERTRLPGLLGGAPLTAGSPHRWNVLGLQGALLSHFVEPVYLQSIVVGSLHHTGHLARVMSHRMEGVGQLPASYRHNRPLLSGVSDAEARQPGKSPPFSMNWVVGSADLEIINATTGRRSCGGPSRLCKHVLSARWARLYGRLSTRTPSPGDTPSMYCEAKLGAHTYQSVKQQLFKAFQKAGLGTWVRKPPEQQQFLLTL

SEQ ID NO: 199735 - protein, 739 aa, Artificial Sequence
  derived and/or modified sequence
MASVLGSGRGSGGLSSQLKCKSKRRRRRRSKRKDKVSILSTFLAPFKHLSPGITNTEDDDTLSTSSAEVKENRNVGNLAARPPPSGDRARGGAPGAKRKRPLEEGNGGHLCKLQLVWKKLSWSVAPKNALVQLHELRPGLQYRTVSQTGPVHAPVFAVAVEVNGLTFEGTGPTKKKAKMRAAELALRSFVQFPNACQAHLAMGGGPGPGTDFTSDQADFPDTLFQEFEPPAPRPGLAGGRPGDAALLSAAYGRRRLLCRALDLVGPTPATPAAPGERNPVVLLNRLRAGLRYVCLAEPAERRARSFVMAVSVDGRTFEGSGRSKKLARGQAAQAALQELFDIQMPGHAPGRARRTPMPQEFADSISQLVTQKFREVTTDLTPMHARHKALAGIVMTKGLDARQAQVVALSSGTKCISGEHLSDQGLVVNDCHAEVVARRAFLHFLYTQLELHLSKRREDSERSIFVRLKEGGYRLRENILFHLYVSTSPCGDARLHSPYEITTDLHSSKHLVRKFRGHLRTKIESGEGTVPVRGPSAVQTWDGVLLGEQLITMSCTDKIARWNVLGLQGALLSHFVEPVYLQSIVVGSLHHTGHLARVMSHRMEGVGQLPASYRHNRPLLSGVSDAEARQPGKSPPFSMNWVVGSADLEIINATTGRRSCGGPSRLCKHVLSARWARLYGRLSTRTPSPGDTPSMYCEAKLGAHTYQSVKQQLFKAFQKAGLGTWVRKPPEQQQFLLTL

SEQ ID NO: 199736 - DNA, 426 bp, Artificial Sequence
  derived and/or modified sequence
atgtcgcataggatggaaggggtggggcaacttccggcctcgtacaggcataacagacctcttctctctggggtgagtgacgctgaggcccggcagcccgggaaatctccaccattttccatgaactgggtcgttggcagtgcagatctagagattatcaatgctacaacagggcggcgctcgtgtggaggacccagcagactttgtaaacacgtgttgagtgcccggtgggcacggctctacggtaggctcagtacaagaacaccctcccctggggacaccccttccatgtattgtgaagctaagcttggagctcatacatatcagagtgttaagcagcagctgttcaaggccttccaaaaggccggcctcggaacatgggtccggaaaccgcctgagcagcagcagttcctgctgactctctag

SEQ ID NO: 199737 - DNA, 747 bp, Artificial Sequence
  derived and/or modified sequence
atggggctgtggtcaccagtgcccggtaacagcgtacctcgggcacccgtgatggcgggacttggtcttggccatagtcaaggggcccctcagggccctcacgacggtaaaacagatcgctctagcggtcctggaaggagacgcaccgaacggacacgcttgcccggattgctgggtggtgctcctctgaccgcgggctctcctcacagatggaacgttctcgggctgcagggagctctcctctcccatttcgtagaacctgtgtacttgcagtctatcgtcgtggggagtttacaccacaccggacaccttgcgagagtgatgagccatcgcatggaaggcgtcgggcagctaccagcctcctatcgccacaacagaccccttctctcaggggtgtccgatgcagaagccaggcagcctgggaagtccccgcccttttctatgaactgggttgtgggcagcgcagatctggagataataaatgcaacaactggccggcgctcctgtggcggcccaagtcggctctgcaagcacgtcctgtctgcccgctgggctagactgtacgggcgactgtcaacccgcacaccttcgccgggtgacacccccagtatgtattgtgaagcaaaactaggagcacacacgtaccagtccgtgaagcagcagctgttcaaagccttccagaaagctggcctgggcacctgggtccgcaaacccccagagcagcagcagtttctcctgacactgtag

SEQ ID NO: 199738 - DNA, 2220 bp, Artificial Sequence
  derived and/or modified sequence
atggcgagcgtgcttgggtcgggacggggatcaggaggtctgtcctcccaactaaaatgtaaaagtaaacgaaggagaagaaggcgttccaaacgcaaagataaagtgtccatactgagcaccttcctggccccctttaagcacctaagccccggcattactaacactgaggacgacgacacattgtccacctcttccgcggaggtgaaggaaaaccgtaacgtggggaatctggctgcgaggcccccgccttcaggtgatagagcacgtgggggagctcctggcgccaagaggaagaggccattagaggaaggcaatggagggcacctctgcaagctgcagcttgtttggaagaagctctcctggtctgtagccccaaagaatgcgctggtccagctgcatgagctgcgccctggcttgcagtaccggacagtttctcaaacaggtccagttcacgcccccgtgtttgctgtggccgttgaggtaaatggtcttaccttcgagggaaccgggcctacgaaaaagaaggccaaaatgcgggcagcagaacttgcgctcaggagctttgtgcagtttcctaatgcctgccaggcgcatctagctatggggggcgggccagggcccggaacagacttcacaagcgaccaggccgatttccccgacactctgttccaggaattcgaaccgcctgcaccaagacctgggctggccggggggaggccaggcgatgccgcacttctgtctgcagcctatgggagaaggagattactctgtcgcgccttagacctagtggggcccacgccagccacccccgccgcccctggcgagcgcaatccagtggttctgctgaacagactgcgcgccggactccgctacgtgtgcctggccgagccagccgaacgacgggcacgcagtttcgttatggccgtgagcgtcgacggtcgcacattcgaagggtccggtcgttctaagaagttagcccgcggccaggcagctcaggctgctctacaggagttgtttgacatccaaatgcctggtcacgcgcctgggagggctagaagaacccctatgccccaagagttcgccgacagcatcagccagttagtcacacagaagtttagggaggtgaccacagatctaactcccatgcacgctcggcataaagccctggctgggattgtgatgacaaagggactcgacgcccggcaggcccaggttgtggctctctcgtccggaaccaaatgtatcagcggagaacacctgtctgatcagggtcttgtggtcaacgattgtcatgccgaagttgtggccaggcgggcgttcctgcacttcctgtacacacagttggaactgcacctctctaagcggcgcgaggacagtgaaagatctatctttgtgcgactgaaggagggcggttaccgcctcagggagaatattctgttccatttgtacgtttcgacctccccctgtggtgatgcacggcttcattcaccctatgagattacaaccgatttacatagcagcaagcacttggtgcgcaagttccgcggccatctgaggaccaagatcgaaagcggggagggtactgttcctgtaaggggacccagtgcagttcaaacttgggatggagtccttttaggcgagcagctgataacaatgtcatgcactgacaaaattgctcggtggaatgtgctcggccttcagggggccctcctctctcactttgtagagccggtgtatcttcaatctattgtggtggggtcattacatcacactggacacctggcacgtgtgatgagtcaccgcatggaaggcgttggtcagcttcccgctagttaccgccacaaccgtccactcctgtccggcgtgtctgacgccgaggcccgtcaaccagggaaaagccccccattttcaatgaattgggtggtcggctcagccgatttagaaataatcaatgcaacaacaggccggaggtcatgcggcggacccagcaggctgtgcaaacatgtccttagtgctaggtgggcccgcctctatggccggttatctactcgaacgccatccccaggcgatacccccagcatgtactgcgaggcgaagctgggcgcccacacttaccaatccgtcaagcagcaacttttcaaagcttttcaaaaggccggccttggcacctgggtgcggaagccccccgagcagcaacaatttctgttgaccctgtag

SEQ ID NO: 199739 - DNA, 703 bp, Artificial Sequence
  derived and/or modified sequence
agaaaagagagcagcatttgttagcacacatgggcctgtggagcccagtcccaggcaacagtgtccccagagccccagtgatggctgggttgggtctggggcactcccagggagctccccaaggtggaacgtcctggggctgcagggcgcgctcctgtcccacttcgtggagcccgtgtacctgcagagcatcgtggtgggcagcctgcaccacacgggccacctcgcacgcgtcatgagccaccgcatggagggtgtcggccagctgcccgcctcctaccggcacaaccggcctctcctcagcggcgtgagtgacgccgaggcgcgccagccggggaagtcgccccccttcagcatgaactgggtcgtgggcagcgcggacctggagattatcaacgccaccactgggcggaggagctgtgggggcccatcccggctctgcaagcacgtgctgtctgcacggtgggcgcggctgtatggcaggctgagcacacggacacccagccctggagacacgccctccatgtactgtgaggccaagctgggggcgcacacctaccagtctgtgaaacagcagctgttcaaggcctttcagaaggctggcctgggcacctgggtgaggaaaccaccggagcagcagcagtttctactgactctctaggctgcgggctcctggctgctggagctgagcgggacgctggag

SEQ ID NO: 199740 - DNA, 1810 bp, Artificial Sequence
  derived and/or modified sequence
acacatgggcctgtggagcccagtcccaggcaacagtgtccccagagccccagtgatggctgggttgggtctggggcactcccagggagctccccaaggtccgcacgatgggaagactgacaggtcctcaggaccaggccgcagacggacagagaggaccaggctccctgggctcctgggtggggctccgctgactgctggctctccccacaggtggaacgtcctggggctgcagggcgcgctcctgtcccacttcgtggagcccgtgtacctgcagagcatcgtggtgggcagcctgcaccacacgggccacctcgcacgcgtcatgagccaccgcatggagggtgtcggccagctgcccgcctcctaccggcacaaccggcctctcctcagcggcgtgagtgacgccgaggcgcgccagccggggaagtcgccccccttcagcatgaactgggtcgtgggcagcgcggacctggagattatcaacgccaccactgggcggaggagctgtgggggcccatcccggctctgcaagcacgtgctgtctgcacggtgggcgcggctgtatggcaggctgagcacacggacacccagccctggagacacgccctccatgtactgtgaggccaagctgggggcgcacacctaccagtctgtgaaacagcagctgttcaaggcctttcagaaggctggcctgggcacctgggtgaggaaaccaccggagcagcagcagtttctactgactctctaggctgcgggctcctggctgctggagctgagcgggacgctggagggatgggaccgtgtctggggggcgacgtggcgggtcggccggttccctgcattcgttttactttggtgtcccagaaacacgcgagtgtgcaatgtttggacgagcaacaacacaaattcagaacgtgcctctttccagatcgctggccccagaaccctgtcccccacacccaggggcacatgcactgttgagttagcgccgactcttcctgtggagtctgagggaggggctccattcaggcaaaggggttttagctgcagccttggaaggaggcaccgacacgacaccaggcaggagtgagcctcaggccccgtccctgcaccccacccctgcgtgcgcctcttggtgatgctggggtctcactagcttgagggggcacatgaagataagccacaaatgaagagaaaagccatgcccaccccagccccagagaaaccaataagaatcctctattattttcactattcatttaggtttttatactccacctcctttcaaaaaagatttaagatgtacgacattaccgaacacctaaaatagaaccagagaaacgaaagccattcccacaaagtgaaggaacagtttccaaaacccctgcgaggcagagttaagacctgtgacgtggggagcctggaaacacccggcccacgcgtgctgcagatgtggggagcctggaaacacccggcccacgcgtgctgcagatgtggggagcctggaaacacccggcccacgcgtgctgcagatgtggggagtctggaaacacccggcccacgcgtgctgcagatgtggggagcccggaaacacctggcccatgcctgttcagtccgtcatggcgtttggtttatggtggccgatactaagagccactgaggtctgggttgtgtaagggttagctaccaccctataacctccctaccaggtaataaggagaccaagtctttgatcaaattctgattttttaactaaattttcattagaaagcaagcacaaaataaaatcaaaacaacctttaccttc

SEQ ID NO: 199741 - DNA, 3606 bp, Artificial Sequence
  derived and/or modified sequence
tgcgctgggagcccagagcaggaggcagagcccgcgggaagctcggagcactcaggacgccgcgcgcccttccccgccctccctgaccagggagcagctcgctccaggcgcccagccgaggcccccagcccagtgggagcaagtcatagagaacaattcgagagacagagagacggagcgcgctttcctgctcagtcctgaaaagtgagccgctcccgggtttgcaacctcaagcttcgcagcagcggcggcggcggctgccgggaaggaggcaggtgcaggtgcaggagggaggcggctctgggctccgcgcctgggtctcggccatggcctcggtcctggggagcggcagagggtctggagggctgagcagtcaactcaaatgcaagtccaagaggaggaggaggcggaggtccaagcggaaagataaagtaagcatattgtcaaccttcctcgctcctttcaagcacctgagtcctggcatcacaaacacggaggatgacgacaccctcagtaccagcagcgcggaggtgaaggagaaccgcaacgtgggcaacctggccgcgcggccaccgccctccggggaccgggcccggggcggcgcgcccggcgcgaagaggaagcggccgctggaggaggggaatgggggccacttgtgcaaactgcagctggtctggaagaagctgtcgtggtcggtggcgcccaagaacgcgctggtgcagctgcacgagctgaggccgggcctgcagtaccggacagtgtcgcagacgggcccggtgcatgccccggtcttcgcggtagcggtggaggtgaacgggctcacgttcgagggcacaggccccaccaagaagaaggccaagatgcgcgcggcggagctggcactcaggtccttcgtgcagttccccaacgcctgccaggcgcacctggccatgggcgggggcccgggccccggcacggacttcacctccgaccaggccgatttccccgacacgctcttccaggagttcgagcccccggcgccgcgccccggactcgcgggaggccgccccggggacgccgcgcttctgtccgcggcctacgggcgacggcggctgctgtgccgcgcgctggacctggtgggcccgacccccgccacccccgcggccccgggcgagcgcaaccccgtggtgctgctgaaccgcctgcgcgccgggctgcgctacgtgtgtctggcagaaccggccgagcggcgcgcgcggagcttcgtgatggccgtgagcgtggacggcaggacgttcgagggctcggggcgcagcaagaagctggcccggggtcaggccgcgcaggccgcactgcaggagctgttcgacatccagatgcccggccacgcgcccggcagggccaggaggacgccaatgccgcaggaattcgcagactccatatcccagctggtcacacagaagttccgcgaggtgacgacggacctcacgcccatgcacgcccgccataaagcgctggcaggaatcgtcatgaccaaaggcctggatgctcggcaggcgcaggtcgtggccctgtcctcggggaccaagtgcatcagcggcgagcacctcagtgaccaggggctggtggtgaatgactgccacgcggaggtcgtggcccggcgggcgttcctgcacttcctctacacgcagctggagctgcacctgagcaagcggcgcgaggactcagagcgatcgatattcgtgcggttaaaagaaggtggctaccggctgcgagagaacatcctcttccatctctacgtgagcacctccccctgtggagacgcaagactccactctccctacgagatcaccacagacctgcacagcagcaaacacctcgtcaggaagttccgcgggcacctgcgcaccaagatcgagtccggggaagggacggtccccgtgcgtggccccagcgcagtgcagacctgggacggcgtcctgctgggggagcagctgatcaccatgtcctgcacggacaagatcgccaggtggaacgtcctggggctgcagggcgcgctcctgtcccacttcgtggagcccgtgtacctgcagagcatcgtggtgggcagcctgcaccacacgggccacctcgcacgcgtcatgagccaccgcatggagggtgtcggccagctgcccgcctcctaccggcacaaccggcctctcctcagcggcgtgagtgacgccgaggcgcgccagccggggaagtcgccccccttcagcatgaactgggtcgtgggcagcgcggacctggagattatcaacgccaccactgggcggaggagctgtgggggcccatcccggctctgcaagcacgtgctgtctgcacggtgggcgcggctgtatggcaggctgagcacacggacacccagccctggagacacgccctccatgtactgtgaggccaagctgggggcgcacacctaccagtctgtgaaacagcagctgttcaaggcctttcagaaggctggcctgggcacctgggtgaggaaaccaccggagcagcagcagtttctactgactctctaggctgcgggctcctggctgctggagctgagcgggacgctggagggatgggaccgtgtctggggggcgacgtggcgggtcggccggttccctgcattcgttttactttggtgtcccagaaacacgcgagtgtgcaatgtttggacgagcaacaacacaaattcagaacgtgcctctttccagatcgctggccccagaaccctgtcccccacacccaggggcacatgcactgttgagttagcgccgactcttcctgtggagtctgagggaggggctccattcaggcaaaggggttttagctgcagccttggaaggaggcaccgacacgacaccaggcaggagtgagcctcaggccccgtccctgcaccccacccctgcgtgcgcctcttggtgatgctggggtctcactagcttgagggggcacatgaagataagccacaaatgaagagaaaagccatgcccaccccagccccagagaaaccaataagaatcctctattattttcactattcatttaggtttttatactccacctcctttcaaaaaagatttaagatgtacgacattaccgaacacctaaaatagaaccagagaaacgaaagccattcccacaaagtgaaggaacagtttccaaaacccctgcgaggcagagttaagacctgtgacgtggggagcctggaaacacccggcccacgcgtgctgcagatgtggggagcctggaaacacccggcccacgcgtgctgcagatgtggggagcctggaaacacccggcccacgcgtgctgcagatgtggggagtctggaaacacccggcccacgcgtgctgcagatgtggggagcccggaaacacctggcccatgcctgttcagtccgtcatggcgtttggtttatggtggccgatactaagagccactgaggtctgggttgtgtaagggttagctaccaccctataacctccctaccaggtaataaggagaccaagtctttgatcaaattctgattttttaactaaattttcattagaaagcaagcacaaaataaaatcaaaacaacctttaccttca

SEQ ID NO: 199742 - DNA, 426 bp, Artificial Sequence
  derived and/or modified sequence
atgagccacaggatggagggcgtgggccagctgcctgccagctaccgccacaaccggcccctgctgtctggagtgtctgatgctgaggcccggcagcccgggaagagcccccccttctccatgaactgggtggtgggcagcgctgacctggagatcatcaatgccaccactggaagaagaagctgtggcggccccagccggctgtgcaagcacgtgctgagcgcccgctgggcccggctgtatggccgcctgagcaccaggacccccagccctggggacacccccagcatgtactgtgaggccaagctgggcgcccacacctaccagagcgtgaagcagcagctgttcaaggccttccagaaggccggcctgggcacctgggtgaggaagcccccagagcagcagcagttcctgctgaccctgtag

SEQ ID NO: 199743 - DNA, 747 bp, Artificial Sequence
  derived and/or modified sequence
atgggcctgtggagccctgtgcccggcaacagcgtgccccgggcccctgtgatggccggcctgggcctgggccacagccagggcgccccccagggcccccatgatggcaagacagacaggagcagcggccctggaagaagaagaacagagaggacccggctgcccggcctgctgggcggggcccccctgacagctggcagcccccaccgctggaatgtgctgggcctgcagggcgccctgctgagccactttgtggagcctgtgtacctgcagagcatcgtggtgggcagcctgcaccacacaggccacctggcccgggtgatgagccacaggatggagggcgtgggccagctgcctgccagctaccgccacaaccggcccctgctgagcggcgtgtctgatgctgaggcccggcagcccgggaagagcccccccttctccatgaactgggtggtgggcagcgctgacctggagatcatcaatgccaccaccggccgccgcagctgtggcggccccagccggctgtgcaagcacgtgctgagcgcccgctgggcccggctgtatggccgcctgagcaccaggacccccagccctggggacacccccagcatgtactgtgaggccaagctgggcgcccacacctaccagagcgtgaagcagcagctgttcaaggccttccagaaggccggcctgggcacctgggtgaggaagcccccagagcagcagcagttcctgctgaccctgtag

SEQ ID NO: 199744 - DNA, 2220 bp, Artificial Sequence
  derived and/or modified sequence
atggcctctgtgctgggcagcggccggggcagcggcggcctgagcagccagctgaagtgcaagagcaagagaagaagaagaagaagaagcaagaggaaggacaaggtgtccatcctgagcaccttcctggcccccttcaagcacctgagccctggcatcaccaacacagaagatgatgacaccctgagcaccagcagcgctgaggtgaaggaaaatagaaatgtgggcaacctggccgcccggcccccaccttctggggaccgggcccggggcggggcccctggggccaagaggaagaggcccctggaggagggcaatggaggccacctgtgcaagctgcagctggtgtggaagaagctgtcctggagcgtggcccccaagaatgccctggtgcagctgcacgagctgcggcccggcctgcagtacagaacagtgtcccagacaggccctgtgcacgcccctgtgtttgctgtggccgtggaggtgaatggcctgacctttgagggcaccggccccaccaagaagaaggccaagatgagagctgctgagctggccctgcggagctttgtgcagttccccaatgcctgccaggcccacctggccatgggcggcggccctggccctggaacagacttcaccagtgaccaggccgacttcccagacaccctcttccaggagtttgagcccccagccccccggcccggcctggccggcggccggcctggagatgctgccctgctgtctgctgcctatggaagaagaaggctgctgtgccgggccctggacctggtgggccccaccccagccaccccagctgcccctggagagagaaatcctgtggtgctgctgaaccggctgcgggccggcctgcgctacgtgtgcctggccgagcctgctgagcggcgggcccggagctttgtgatggctgtgtctgtggatggccgcacctttgagggcagcggccgcagcaagaagctggcccggggccaggccgcccaggccgccctgcaggagctgtttgacatccagatgcctggccacgcccctggccgggcccggaggacccccatgccccaggagtttgctgacagcatcagccagctggtgacccagaagttccgggaggtgaccacagacctgacccccatgcacgcccggcacaaggccctggccggcatcgtgatgaccaagggcctggatgcccggcaggcccaggtggtggccctgagcagcggcaccaagtgcatctctggagagcacctgagtgaccagggcctggtggtgaatgactgccacgccgaggtggtggcccggcgggccttcctgcacttcctgtacacccagctggagctgcacctgagcaagaggcgggaggacagcgagaggagcatctttgtgcggctgaaggagggcggctaccgcctgcgggagaacatcctcttccacctgtatgtgtccaccagcccctgtggagatgcccggctgcacagcccctatgagatcaccacagacctgcacagcagcaagcacctggtgaggaagttccggggccacctgcggaccaagattgaaagtggagagggcaccgtgcctgtgcggggccccagcgctgtgcagacctgggatggagtgctgctgggggagcagctgatcaccatgagctgcacagacaagatcgcccgctggaatgtgctgggcctgcagggcgccctgctgagccactttgtggagcctgtgtacctgcagagcatcgtggtgggcagcctgcaccacacaggccacctggcccgggtgatgagccacaggatggagggcgtgggccagctgcctgccagctaccgccacaaccggcccctgctgtctggagtgtctgatgctgaggcccggcagcccgggaagagcccccccttctccatgaactgggtggtgggcagcgctgacctggagatcatcaatgccaccactggaagaagaagctgtggcggccccagccggctgtgcaagcacgtgctgagcgcccgctgggcccggctgtatggccgcctgagcaccaggacccccagccctggggacacccccagcatgtactgtgaggccaagctgggcgcccacacctaccagagcgtgaagcagcagctgttcaaggccttccagaaggccggcctgggcacctgggtgaggaagcccccagagcagcagcagttcctgctgaccctgtag

SEQ ID NO: 199745 - DNA, 426 bp, Artificial Sequence
  derived and/or modified sequence
atgagccaccggatggagggcgtgggccagctgcccgccagctacaggcataaccgacccttactctccggcgtgtctgacgctgaggcccgacaacccggtaaatctccaccgttcagcatgaattgggtcgttggatccgctgacctcgagattattaacgctaccaccgggcggcggtcctgtggcggcccgagccggttgtgcaaacacgtcttatcagcccgttgggcgaggctttacgggcgcctgtcaaccagaaccccttccccaggcgacacacctagtatgtattgtgaagccaagctgggggcccacacctatcaatccgtgaagcagcagctatttaaggcctttcaaaaagctggattgggcacctgggttcgcaagccccctgaacagcaacagtttctgcttactctgtag

SEQ ID NO: 199746 - DNA, 747 bp, Artificial Sequence
  derived and/or modified sequence
atgggcctgtggagccccgtgcccggcaacagcgtgccccgggcccctgtgatggccggcctcggactgggacattcccagggcgcaccccaagggccacatgacggtaaaactgaccggtcatccggacccggaaggagacgcactgagaggactcgactcccagggctgctcgggggcgctccactgacagccggtagtccacacaggtggaacgtgctgggattacagggcgccctgctctctcacttcgtggagcctgtgtatttacagtcaattgtggtgggctcgcttcaccacacaggacaccttgcgagagtcatgtcccaccggatggaaggagtcggccagctcccagctagctatcgacacaataggccgttactgtctggagtgagcgatgccgaagcgaggcaacctggaaaatcccccccattttctatgaattgggtggtggggagcgcggaccttgaaattatcaacgccactacaggccgccggagctgtggcggcccaagcaggctctgtaagcacgtgttaagcgcccgctgggcaagattgtatgggagactatcaacacggacaccttctcccggagacacaccctcaatgtactgtgaggcaaaacttggagctcacacctatcagagtgtgaagcaacaattgttcaaggcgtttcagaaagccggcctgggaacttgggtaagaaaaccaccagagcaacagcagttcctacttacactttag

SEQ ID NO: 199747 - DNA, 2220 bp, Artificial Sequence
  derived and/or modified sequence
atggccagcgtgctgggcagcggccggggcagcggcggcctgagcagtcaactcaaatgtaaatccaaacgcaggaggcgcaggagaagcaagcgaaaggacaaggtaagcatcctttcgaccttcctggcaccttttaagcacctgagcccaggaatcaccaacacagaggacgacgacacactgagtacctcatctgctgaagtaaaagaaaacaggaatgtgggcaacctggccgctagaccaccaccctctggtgaccgggcccgtgggggcgcccctggagccaagcgaaaacggccgctggaggagggcaatggcgggcacctctgtaaactccagctggtttggaagaaactgtcgtggagcgtggctcctaaaaacgctctcgtccagctccatgaacttcggccagggttgcagtatagaacggtttctcagaccggacccgtgcacgctccagtgtttgccgtggcagtggaagtaaacggattgacctttgaggggacaggccccacgaaaaagaaggcaaagatgagggcagccgaactggcactgcggagcttcgttcagtttcctaacgcctgtcaggctcacttggctatgggcggcgggcccggcccgggtacagattttaccagcgaccaggccgactttcctgatacactatttcaggaattcgagcctcctgcaccccggcccggtctagccgggggccgcccaggcgacgctgccctgctgtccgcagcctatggaagaaggcggctgctgtgccgggctctggacctggtcggtcctacccccgctactcctgccgcgcccggagaaaggaatcctgtggtgctcttaaataggttgcgcgccgggcttcgctatgtctgccttgccgaaccggccgaacgaagggcccggtcattcgttatggccgtgagcgtggacggccggacatttgaaggttctggcagaagtaaaaagttggcacgtggtcaggccgctcaggccgcactgcaggaacttttcgatatccagatgcccggccacgcgcctgggagggcccggaggacccccatgccacaggagtttgctgactcaattagtcaattggtgacccagaaatttcgcgaagtgactactgacctcactcccatgcacgcccgtcataaagcacttgcagggattgttatgaccaaaggcctggacgcacgacaggctcaagtcgtggcattgagcagcggaactaagtgcatttctggcgaacacctgagcgatcagggtctcgtagttaacgactgtcacgcagaagttgtggccagaagggcctttctgcatttcttgtacacacagctcgagctacacttgtctaagcgacgagaagactctgagagaagcatcttcgtacgactgaaggaggggggttaccgcctgcgggagaacatactattccacttgtacgtgtcgacatctccatgcggtgatgcccgtctccattccccgtatgagatcacaaccgatttacactcttccaagcacctcgttcggaagtttcggggccatctgcggacgaagatcgaatctggcgagggtaccgtgcccgttcgggggccttctgccgtgcaaacgtgggacggagtgttgctgggtgagcagttgatcaccatgtcttgcactgataagattgccaggtggaacgtattggggttgcaaggagccctgctgtcccacttcgttgagccagtctatttgcagtccatagtcgtgggttcattgcaccacacagggcacctggcaagagtgatgtcccaccggatggagggggtgggccagctccccgcaagctaccgtcacaaccgtcccttgttatccggagtcagcgacgcagaggcacgccaacctggcaagagccccccatttagcatgaactgggtagttggcagcgcggatctcgagataattaatgcaactactggccgccgaagttgtggagggccaagtcggctgtgcaaacatgttcttagtgctcgctgggctagattgtacgggcgattgtcaacacgcacaccttccccgggcgatacccccagcatgtactgtgaggcaaagcttggcgctcacacctaccaatcagtgaaacaacagttgtttaaggctttccaaaaagccggcttggggacctgggtccggaagccccccgagcagcagcaattcctgctcaccctttag

SEQ ID NO: 199748 - DNA, 426 bp, Artificial Sequence
  derived and/or modified sequence
atgagccacagaatggaaggtgtcggccaattgcctgcctcttacaggcacaatagaccgttattaagtggtgtgagtgatgcggaggcgagacagccgggtaaaagcccccctttcagcatgaactgggtagtcggatccgcagatttggaaatcatcaacgctactaccggaagacgcagctgcggcggtccctcacgcctttgtaagcacgtactctctgcacgctgggccaggctttacggcagactttcaacccgcacaccatcaccaggggataccccatcaatgtactgtgaagctaaactgggcgcacatacctaccagagcgttaaacaacaattatttaaggcctttcaaaaagccggtttaggcacatgggtccggaaacctccggagcaacagcagttcctgctaactctctag

SEQ ID NO: 199749 - DNA, 747 bp, Artificial Sequence
  derived and/or modified sequence
atggggttgtggtcccccgtccccggtaattcggttccacgcgctccagtcatggctgggctgggactgggacattcacaaggtgcgccacagggcccacacgatggcaagactgaccggtcatccggacctggtcggaggagaaccgagagaacgcgcctgcctggtcttctcggtggagccccattaacagccggtagcccacaccgctggaacgtgttgggtctgcagggcgcactgctgtcacattttgtggaacctgtctacctgcagtcgatcgtcgtgggctccttacatcacaccggacacctggctagagttatgtctcatcggatggagggggtgggccagctgcccgcttcttatcgccataaccgcccactcctgtctggggtgtcagacgcagaggcaaggcagcccggtaaatcacctcccttttctatgaattgggtcgttggcagcgcggatctggaaataatcaatgcaaccacaggaagaagaagttgcggagggccatctcggctctgcaaacacgttctgagtgcccgatgggcgagactctacggtaggctgtcgacgagaacccctagccctggagacaccccaagtatgtactgcgaggccaagctaggagcccatacataccagtcagtaaaacagcagctttttaaagcattccagaaggctggactcggtacttgggttcgtaaaccacctgagcagcagcagttcttgcttacactttag

SEQ ID NO: 199750 - DNA, 2220 bp, Artificial Sequence
  derived and/or modified sequence
atggcatcagtgcttgggtctgggagaggctctggtgggctgagctcacaattaaaatgtaagtctaaaaggcggcgaagacggcgtagcaagcgcaaggataaggtcagtatcttgagcacgttcctggcaccctttaagcatctctccccgggaatcacgaacacggaggacgacgacacattgtctaccagctctgctgaggtgaaggaaaaccgaaatgttggcaatctggctgctagaccaccccctagcggagacagggcccgagggggagcacccggtgctaagcgtaaacgaccgctggaggaagggaacgggggtcatctttgcaagcttcagttagtctggaaaaaactcagctggtctgttgctccgaaaaatgccttggtgcagctacatgaactgcggcctgggctgcagtaccgcacagtatctcaaacagggcctgtgcacgcccctgtctttgccgttgccgtagaggtgaacggcctcacctttgaggggacaggacccaccaaaaagaaagccaagatgcgagcagcagagttggctctgcggtctttcgtccaattccccaacgcgtgccaagcccacctggccatggggggagggcctgggcctgggaccgatttcacatccgaccaagctgatttccccgacacactctttcaggaatttgaaccacctgctcccaggcccggattagctggcggtcggccaggagatgccgctctgctatccgcagcctatggacgcagacgactcctctgtcgggcactggacctggtagggccaactccagctacacccgctgctcccggtgagaggaaccctgtggttttactaaatagactaagagcaggcctgagatatgtttgcctggccgaacccgctgaaagaagagctagaagctttgtgatggcagtgtccgtcgatggcagaacgttcgaaggatcggggcgaagcaagaaattggcgagggggcaggccgcacaggccgctcttcaagagctgttcgacatccaaatgcctggccacgccccaggccgagcacgcaggactcctatgccgcaagaattcgccgattctatatctcagctcgtgacccagaagtttcgtgaggtcaccaccgatctgactccaatgcacgctcgccacaaggcccttgctgggatcgtcatgacaaaagggctggacgcacgccaggcccaggtagttgcccttagctctgggactaagtgcataagtggggaacaccttagtgatcaaggtctggtagtgaatgactgccacgcggaggtggtggcacggagggctttcctgcatttcctctatactcaactggaattgcacctcagtaaaagaagagaagacagtgaaagatcaatctttgtgaggctcaaggagggaggatatcggctccgcgaaaacattttattccatctttacgtgagtaccagcccctgcggcgacgcaaggctccactctccatatgagatcacgacagacctccactccagtaagcacctagtgagaaagttcaggggtcacttgcgaactaaaatagaaagtggggaaggcacggttcccgtgcggggacccagcgcggttcagacttgggacggagtgctcttaggggagcagcttataacaatgtcatgtaccgacaaaatcgcccgttggaacgtgttgggtctgcagggagcactgctgtcgcatttcgtcgaacctgtgtatcttcagagcattgtggtcggcagcctccaccacaccggccacctggcgagagtgatgagccacaggatggaaggcgtcggccagctgcctgccagttacagacacaacaggccgttgctctccggcgtgtctgatgccgaggccaggcagcctggcaagagtccccctttcagcatgaattgggtggtcggctccgcagatctggaaattatcaatgcaacgacaggaagacggagttgtgggggtccttcaaggttgtgtaagcacgttctgtctgcgagatgggcgaggctatatggaaggctgtctacccgcaccccaagtcctggtgacacaccaagcatgtattgcgaggctaagttaggcgctcacacgtaccaaagtgtgaaacagcagctcttcaaagcttttcagaaagccggattaggcacgtgggttcgcaagcccccagagcaacagcagtttctgctgaccttgtag

SEQ ID NO: 199751 - DNA, 426 bp, Artificial Sequence
  derived and/or modified sequence
atgagccacagaatggagggcgtgggccagctgcccgccagctacagacacaacagacccctgctgagcggcgtgagcgacgccgaggccagacagcccggcaagagcccccccttcagcatgaactgggtggtgggcagcgccgacctggagatcatcaacgccaccaccggcagaagaagctgcggcggccccagcagactgtgcaagcacgtgctgagcgccagatgggccagactgtacggcagactgagcaccagaacccccagccccggcgacacccccagcatgtactgcgaggccaagctgggcgcccacacctaccagagcgtgaagcagcagctgttcaaggccttccagaaggccggcctgggcacctgggtgagaaagccccccgagcagcagcagttcctgctgaccctgtag

SEQ ID NO: 199752 - DNA, 747 bp, Artificial Sequence
  derived and/or modified sequence
atgggcctgtggagccccgtgcccggcaacagcgtgcccagagcccccgtgatggccggcctgggcctgggccacagccagggcgccccccagggcccccacgacggcaagaccgacagaagcagcggccccggcagaagaagaaccgagagaaccagactgcccggcctgctgggcggcgcccccctgaccgccggcagcccccacagatggaacgtgctgggcctgcagggcgccctgctgagccacttcgtggagcccgtgtacctgcagagcatcgtggtgggcagcctgcaccacaccggccacctggccagagtgatgagccacagaatggagggcgtgggccagctgcccgccagctacagacacaacagacccctgctgagcggcgtgagcgacgccgaggccagacagcccggcaagagcccccccttcagcatgaactgggtggtgggcagcgccgacctggagatcatcaacgccaccaccggcagaagaagctgcggcggccccagcagactgtgcaagcacgtgctgagcgccagatgggccagactgtacggcagactgagcaccagaacccccagccccggcgacacccccagcatgtactgcgaggccaagctgggcgcccacacctaccagagcgtgaagcagcagctgttcaaggccttccagaaggccggcctgggcacctgggtgagaaagccccccgagcagcagcagttcctgctgaccctgtag

SEQ ID NO: 199753 - DNA, 2220 bp, Artificial Sequence
  derived and/or modified sequence
atggccagcgtgctgggcagcggcagaggcagcggcggcctgagcagccagctgaagtgcaagagcaagagaagaagaagaagaagaagcaagagaaaggacaaggtgagcatcctgagcaccttcctggcccccttcaagcacctgagccccggcatcaccaacaccgaggacgacgacaccctgagcaccagcagcgccgaggtgaaggagaacagaaacgtgggcaacctggccgccagacccccccccagcggcgacagagccagaggcggcgcccccggcgccaagagaaagagacccctggaggagggcaacggcggccacctgtgcaagctgcagctggtgtggaagaagctgagctggagcgtggcccccaagaacgccctggtgcagctgcacgagctgagacccggcctgcagtacagaaccgtgagccagaccggccccgtgcacgcccccgtgttcgccgtggccgtggaggtgaacggcctgaccttcgagggcaccggccccaccaagaagaaggccaagatgagagccgccgagctggccctgagaagcttcgtgcagttccccaacgcctgccaggcccacctggccatgggcggcggccccggccccggcaccgacttcaccagcgaccaggccgacttccccgacaccctgttccaggagttcgagccccccgcccccagacccggcctggccggcggcagacccggcgacgccgccctgctgagcgccgcctacggcagaagaagactgctgtgcagagccctggacctggtgggccccacccccgccacccccgccgcccccggcgagagaaaccccgtggtgctgctgaacagactgagagccggcctgagatacgtgtgcctggccgagcccgccgagagaagagccagaagcttcgtgatggccgtgagcgtggacggcagaaccttcgagggcagcggcagaagcaagaagctggccagaggccaggccgcccaggccgccctgcaggagctgttcgacatccagatgcccggccacgcccccggcagagccagaagaacccccatgccccaggagttcgccgacagcatcagccagctggtgacccagaagttcagagaggtgaccaccgacctgacccccatgcacgccagacacaaggccctggccggcatcgtgatgaccaagggcctggacgccagacaggcccaggtggtggccctgagcagcggcaccaagtgcatcagcggcgagcacctgagcgaccagggcctggtggtgaacgactgccacgccgaggtggtggccagaagagccttcctgcacttcctgtacacccagctggagctgcacctgagcaagagaagagaggacagcgagagaagcatcttcgtgagactgaaggagggcggctacagactgagagagaacatcctgttccacctgtacgtgagcaccagcccctgcggcgacgccagactgcacagcccctacgagatcaccaccgacctgcacagcagcaagcacctggtgagaaagttcagaggccacctgagaaccaagatcgagagcggcgagggcaccgtgcccgtgagaggccccagcgccgtgcagacctgggacggcgtgctgctgggcgagcagctgatcaccatgagctgcaccgacaagatcgccagatggaacgtgctgggcctgcagggcgccctgctgagccacttcgtggagcccgtgtacctgcagagcatcgtggtgggcagcctgcaccacaccggccacctggccagagtgatgagccacagaatggagggcgtgggccagctgcccgccagctacagacacaacagacccctgctgagcggcgtgagcgacgccgaggccagacagcccggcaagagcccccccttcagcatgaactgggtggtgggcagcgccgacctggagatcatcaacgccaccaccggcagaagaagctgcggcggccccagcagactgtgcaagcacgtgctgagcgccagatgggccagactgtacggcagactgagcaccagaacccccagccccggcgacacccccagcatgtactgcgaggccaagctgggcgcccacacctaccagagcgtgaagcagcagctgttcaaggccttccagaaggccggcctgggcacctgggtgagaaagccccccgagcagcagcagttcctgctgaccctgtag

SEQ ID NO: 199754 - protein, 1758 aa, Artificial Sequence
  derived and/or modified sequence
MSCVHYKFSSKLNYDTVTFDGLHISLCDLKKQIMGREKLKAADCDLQITNAQTKEEYTDDNALIPKNSSVIVRRIPIGGVKSTSKTYVISRTEPAMATTKAIDDSSASISLAQLTKTANLAEANASEEDKIKAMMSQSGHEYDPINYMKKPLGPPPPSYTCFRCGKPGHYIKNCPTNGDKNFESGPRIKKSTGIPRSFMMEVKDPNMKGAMLTNTGKYAIPTIDAEAYAIGKKEKPPFLPEEPSSSSEEDDPIPDELLCLICKDIMTDAVVIPCCGNSYCDECIRTALLESDEHTCPTCHQNDVSPDALIANKFLRQAVNNFKNETGYTKRLRKQLPPPPPPIPPPRPLIQRNLQPLMRSPISRQQDPLMIPVTSSSTHPAPSISSLTSNQSSLAPPVSGNPSSAPAPVPDITATVSISVHSEKSDGPFRDSDNKILPAAALASEHSKGTSSIAITALMEEKGYQVPVLGTPSLLGQSLLHGQLIPTTGPVRINTARPGGGRPGWEHSNKLGYLVSPPQQIRRGERSCYRSINRGRHHSERSQRTQGPSLPATPVFVPVPPPPLYPPPPHTLPLPPGVPPPQFSPQFPPGQPPPAGYSVPPPGFPPAPANLSTPWVSSGVQTAHSNTIPTTQAPPLSREEFYREQRRLKEESKSPYSGSSYSRSSYTYSKSRSGSTRSRSYSRSFSRSHSRSYSRSPPYPRRGRGKSRNYRSRSRSHGYHRSRSRSPPYRRYHSRSRSPQAFRGQSPNKRNVPQGETEREYFNRYREVPPPYDMKAYYGRSVDFRDPFEKERYREWERKYREWYEKYYKGYAAGAQPRPSANRENFSPERFLPLNIRNSPFTRGRREDYVGGQSHRSRNIGSNYPEKLSARDGHNQKDNTKSKEKESENAPGDGKGNKHKKHRKRRKGEESEGFLNPELLETSRKSREPTGVEENKTDSLFVLPSRDDATPVRDEPMDAESITFKSVSEKDKRERDKPKAKGDKTKRKNDGSAVSKKENIVKPAKGPQEKVDGERERSPRSEPPIKKAKEETPKTDNTKSSSSSQKDEKITGTPRKAHSKSAKEHQETKPVKEEKVKKDYSKDVKSEKLTTKEEKAKKPNEKNKPLDNKGEKRKRKTEEKGVDKDFESSSMKISKLEVTEIVKPSPKRKMEPDTEKMDRTPEKDKISLSAPAKKIKLNRETGKKIGSTENISNTKEPSEKLESTSSKVKQEKVKGKVRRKVTGTEGSSSTLVDYTSTSSTGGSPVRKSEEKTDTKRTVIKTMEEYNNDNTAPAEDVIIMIQVPQSKWDKDDFESEEEDVKSTQPISSVGKPASVIKNVSTKPSNIVKYPEKESEPSEKIQKFTKDVSHEIIQHEVKSSKNSASSEKGKTKDRDYSVLEKENPEKRKNSTQPEKESNLDRLNEQGNFKSLSQSSKEARTSDKHDSTRASSNKDFTPNRDKKTDYDTREYSSSKRRDEKNELTRRKDSPSRNKDSASGQKNKPREERDLPKKGTGDSKKSNSSPSRDRKPHDHKATYDTKRPNEETKSVDKNPCKDREKHVLEARNNKESSGNKLLYILNPPETQVEKEQITGQIDKSTVKPKPQLSHSSRLSSDLTRETDEAAFEPDYNESDSESNVSVKEEESSGNISKDLKDKIVEKAKESLDTAAVVQVGISRNQSHSSPSVSPSRSHSPSGSQTRSHSSSASSAESQDSKKKKKKKEKKKHKKHKKHKKHKKHAGTEVELEKSQKHKHKKKKSKKNKDKEKEKEKDDQKVKSVTV

SEQ ID NO: 199755 - DNA, 2859 bp, Artificial Sequence
  derived and/or modified sequence
atgtcctgtgttcattataagtttagttcaaagctgaattatgatactgttacattcgatggactacacataagcctatgcgatttaaagaagcaaatcatgggccgtgagaagttgaaggcggccgactgcgacctgcagattactaatgcacagaccaaggaagaatacacagatgataacgctctgatcccaaaaaattcgagtgtcatcgtcagaagaattcccattggaggagtgaaaagcacctcaaaaacttatgtgataagtcgtacagagccagcaatggccacgaccaaagctattgacgacagctcagccagcatttccctggcccagctgacaaaaaccgctaatcttgcagaggcaaacgccagtgaggaagacaaaatcaaagccatgatgagccaaagcggacacgaatacgatcctataaattacatgaagaagccacttggacctcctccaccttcctatacttgcttccggtgcgggaagccgggccattatattaaaaactgccccactaacggagataagaacttcgaatcaggtccccggatcaagaagtcaaccggaattccccgttctttcatgatggaggttaaggaccccaacatgaagggggccatgctgacaaacacgggaaaatacgcgattcccacaatcgatgcagaggcctatgcaatcggcaagaaagaaaaacctccctttctacccgaagaaccctctagtagtagcgaagaagatgatccaattcctgatgagctgctatgcttaatctgcaaggatatcatgacagatgccgtcgtgattccgtgctgtggtaacagttattgtgatgagtgcattcgcacggccctgcttgagtcagacgagcacacttgccctacgtgtcaccagaatgacgtctcccccgacgctttaatagcaaataagttcctgcgtcaagcagtgaacaattttaagaacgagaccggttacaccaagaggctacgaaagcagttgcctccaccacccccaccaattccccccccccgtccccttattcagcgaaatctgcaaccgctgatgagaagtcccatctccaggcagcaagaccccctcatgatcccagtaacttcctcttcaacacatccagccccctctatttcgagcctgacaagcaaccaatcttcactggccccaccagtgtctggaaaccctagctcggctcctgcccctgtacctgacatcactgccacagtctctattagtgtgcacagtgagaagagtgacggtccttttcgcaccagctctaccggcggcagccccgttcggaagagcgaagaaaagactgacaccaagcgaaccgttatcaagacaatggaagagtataacaacgataatacggcccctgcagaggatgtcatcatcatgattcaggtaccacagtccaaatgggataaggatgatttcgaatccgaggaagaggacgtgaagtccacccagcccatttcttccgtcggaaagccagccagtgtgatcaagaatgtgagcactaagcctagtaatatcgttaaataccccgaaaaagaaagcgaaccctcagaaaagattcaaaaattcacgaaagacgtgagtcatgagattatacagcatgaagttaagtccagcaaaaactctgcttcttccgaaaagggcaagacaaaagacagggactacagcgttctcgaaaaggaaaaccccgagaaacgcaaaaactccacccagcccgaaaaggagtccaatctggaccgcctgaacgagcaaggtaatttcaaatccttgtcacagtcctcgaaagaagcccggacgtctgacaagcacgattctacacgtgcatccagcaacaaagactttacaccaaaccgcgacaaaaaaaccgactacgatacaagggagtactcatcctcgaagcgccgggacgaaaagaatgaactgacccgtaggaaggattctccaagcagaaacaaggactccgcctcaggccagaagaacaagcctagagaggagcgggacctgccaaagaaggggactggcgacagtaaaaagtctaactcaagcccctcaagagatcggaaaccccacgaccacaaagccacctacgataccaaaagacccaacgaagagactaagtccgtggacaaaaatccctgtaaggatcgtgaaaagcatgtgctggaagctcggaataacaaggagagttcaggtaataagctgctctacatacttaatcccccagagacccaagtggaaaaggagcagatcacaggacagatcgataaatccaccgttaaacccaaacctcagctgagtcatagctctagactctcaagcgacctcacgagagagaccgatgaggctgccttcgagccggactacaatgagtccgactcagagtctaatgtttccgtgaaagaagaagagtctagtggtaatatctctaaggacctcaaggacaagattgtcgagaaagccaaggagtcactcgacacagcagcggtggttcaagtggggatttccaggaaccagtcccactcaagcccgtcggtttctccctcccgtagccattctcccagtggctctcagacacgctcccactcctcctcagccagcagcgccgaaagtcaggattcgaagaagaaaaaaaagaagaaggagaagaaaaagcacaaaaagcacaagaaacacaagaagcacaagaagcacgcggggactgaggtggagctcgaaaaatcccagaaacacaaacacaagaagaaaaagagcaagaagaataaggacaaggaaaaagaaaaagaaaaggatgaccaaaaagtcaagtcagtgaccgtctag

SEQ ID NO: 199756 - DNA, 2859 bp, Artificial Sequence
  derived and/or modified sequence
atgagctgtgtgcactacaagttcagcagcaagctgaactatgacacagtgacctttgatggcctgcacatcagcctgtgtgacctgaagaagcagatcatgggccgggagaagctgaaggctgctgactgtgacctgcagatcaccaatgcccagaccaaggaggagtacacagatgacaatgccctgatccccaagaacagctctgtgattgtgcggcgcatccccatcggcggcgtgaagagcaccagcaagacctacgtgatcagcaggacagagcccgccatggccaccaccaaggccattgatgacagcagcgccagcatcagcctggcccagctgaccaagacagccaacctggccgaggccaatgccagcgaggaggacaagatcaaggccatgatgagccagagcggccacgagtatgaccccatcaactacatgaagaagcccctgggccccccaccacccagctacacctgcttccgctgtgggaagccaggccactacatcaagaactgccccaccaatggagacaagaactttgagagcggcccccgcatcaagaagagcacaggcatccccaggagcttcatgatggaggtgaaggaccccaacatgaagggggccatgctgaccaacacaggcaagtatgccatccccaccattgatgctgaggcctatgccatcggcaagaaggagaagccacccttcctgcctgaggagcccagcagcagcagtgaagaagatgaccccatcccagatgagctgctgtgcctgatctgcaaggacatcatgacagatgctgtggtgatcccctgctgcggcaacagctactgtgatgagtgcatcagaacagccctgctggagagtgatgagcacacctgccccacctgccaccagaatgatgtgtccccagatgccctgattgccaacaagttcctgcggcaggccgtgaacaacttcaagaatgagaccggctacaccaagaggctgaggaagcagctgcccccacctcctccacccatccccccaccccggcccctcatccagaggaacctgcagcccctgatgaggagccccatcagccggcagcaggaccccctgatgatccctgtgaccagcagcagcacccacccagcccccagcatcagcagcctgaccagcaaccagagcagcctggcccctcctgtgtctggcaaccccagcagcgccccagcccctgtgcctgacatcacagccaccgtgtccatctctgtgcacagcgagaagagtgatggccccttccgcaccagcagcactggaggcagccctgtgaggaagtctgaggagaagacagacaccaagaggacagtcatcaagaccatggaggagtacaacaatgacaacacagccccagcagaagatgtgatcatcatgatccaggtgccccagagcaagtgggacaaggatgactttgagagcgaggaggaggatgtgaagagcacccagcccatcagctctgtgggcaagccagccagcgtcatcaagaatgtgtccaccaagcccagcaacatcgtgaagtacccagagaaggagagcgagcccagcgagaagatccagaagttcaccaaggatgtgtcccatgagatcatccagcacgaggtgaagagcagcaagaacagcgccagcagcgagaagggcaagaccaaggaccgggactacagcgtgctggagaaggagaaccctgagaagaggaagaacagcacccagcctgagaaggagagcaacctggaccggctgaatgagcagggcaacttcaagagcctgagccagagcagcaaggaggcccggaccagtgacaagcatgacagcacccgggccagcagcaacaaggacttcacccccaacagagacaagaagacagattatgacacccgggagtacagcagcagcaagagaagagatgagaagaatgagctgaccaggaggaaggacagccccagcaggaacaaggacagcgccagcggccagaagaacaagccccgggaggagcgggacctgcccaagaagggcaccggggacagcaagaagagcaacagcagccccagccgggacaggaagccccatgaccacaaggccacctatgacaccaagaggcccaatgaggagaccaagtctgtggacaagaacccctgcaaggaccgggagaagcacgtgctggaggccaggaacaacaaggagagcagcggcaacaagctgctgtacatcctgaaccccccagagacccaggtggagaaggagcagatcaccggccagattgacaagagcacagtgaagcccaagccccagctgagccacagcagccggctgagcagtgacctgacccgggagacagatgaagctgcctttgagccagactacaatgaaagtgacagcgagagcaatgtgtctgtgaaggaggaggagagcagcggcaacatcagcaaggacctgaaggacaagatcgtggagaaggccaaggagagcctggacacagctgctgtggtgcaggtgggcatcagcaggaaccagagccacagcagccccagcgtgagccccagccgcagccacagccccagcggcagccagaccaggagccacagcagcagcgccagcagcgctgagagccaggacagcaagaagaagaagaagaagaaggagaagaagaagcacaagaagcacaagaagcacaagaagcacaagaagcatgctggaacagaggtggagctggagaagagccagaagcacaagcacaagaagaagaagagcaagaagaacaaggacaaggagaaggagaaggagaaggatgaccagaaggtgaagtctgtgacagtgtag

SEQ ID NO: 199757 - DNA, 2859 bp, Artificial Sequence
  derived and/or modified sequence
atgagctgcgtgcactacaagttcagcagcaagctgaactacgacacggtgacattcgatggactgcatatcagcctctgtgatctgaagaagcagataatgggccgcgaaaagcttaaagccgctgactgcgacctacaaattacaaacgcccaaacaaaggaggagtacacagacgataacgcattaattcctaagaattcctccgtcattgtcagacgcattcccataggaggcgtgaaatcaacctctaagacttacgtgatcagtagaacagagccagcgatggccacaacgaaggccattgacgattcctctgccagcatctcactagcccagctgactaaaactgccaacctcgcggaggcaaatgcaagtgaggaggacaaaattaaggcaatgatgtcacagagtggacacgagtacgatccaattaattatatgaagaagcccttaggccccccacccccctcatacacttgcttccggtgcgggaaacctgggcattacattaaaaattgccccactaacggagataagaattttgaaagcgggcctagaatcaagaagtcgaccggcattcctagaagttttatgatggaggtcaaagatccgaatatgaaaggggctatgctgaccaacaccggaaaatatgccattcccacaatcgacgccgaggcctacgcaataggcaaaaaagagaaaccgccatttctgccagaagagccttccagcagttcggaggaagatgaccctatccccgacgaactgctctgtctgatctgcaaggatatcatgacggatgcagtagttataccctgctgcgggaatagctattgtgatgagtgtatcagaaccgccttactggaatccgatgagcacacctgtccaacatgccaccaaaatgatgtgtcccctgatgccttaatagcgaacaaatttcttcgacaggctgtcaataattttaagaatgagacagggtacaccaaacgcctgcgtaaacagctcccaccccctccgcctccgatacccccaccccgccccctgattcagagaaacctgcagccattaatgcggagtccaatctcccgccagcaggaccctctcatgattccggtgacttcaagcagcacccacccagcaccatctatatcctctcttacgtccaatcagtcctccctcgcacctccagtgagtgggaatccatccagcgcacccgccccagtgcctgacatcactgccacagtctcaatctccgtgcacagtgagaagagcgacggccccttccgcaccagcagcaccgggggatcgcccgtgcgtaaatcagaagaaaagaccgatacaaaacggacagtcattaagacaatggaagagtataacaacgacaacaccgctccggctgaggacgtcatcattatgattcaggtgccccaatcaaaatgggataaagatgacttcgagtcagaggaagaggatgttaagagtactcaaccaatcagcagtgtcgggaaacccgcctccgttattaagaacgtgagcactaagccatccaacattgtgaagtatcctgagaaggagtccgagccctctgagaaaatccagaagttcaccaaagacgtgagccacgagatcattcagcatgaggtgaagtcgtcaaagaattccgctagttcagaaaaaggtaagacgaaggatagggactattccgtgcttgaaaaggagaatcccgagaagagaaagaactctacacagcctgaaaaagagtctaacctagacaggctcaacgagcaaggcaacttcaagtctctctcacagagctctaaggaggctcggactagtgataagcatgattctacccgtgccagctctaataaggactttacgccgaaccgcgataaaaagacagactatgacacacgagaatactctagcagcaagagacgggacgagaaaaacgaactgacccgaagaaaggattcccctagccgtaataaagacagtgcgagtggacagaaaaacaagcccagggaagaacgtgacctgcccaagaagggcactggggatagtaaaaagtctaactcgtctccatcgcgagatcgaaaacctcacgaccataaggccacttatgacactaagcgccccaatgaggaaaccaaatctgtcgataaaaatccgtgtaaggaccgggagaagcatgtcctggaggccaggaataacaaggagagctctgggaataagttattgtatattctcaaccctccagaaactcaagtggaaaaggagcagatcacaggccagatcgacaaatcaacagtgaagcccaagcctcagcttagccatagttctcgcctgtcctctgacctcactcgggaaactgacgaagccgcctttgaacccgactacaatgaatctgattccgaatccaatgtttcagtaaaagaagaggagtcgagtggaaacatttcaaaggatctgaaggacaagattgttgagaaggctaaagaatctctcgatacagcggcagtcgtgcaggtgggaatttcgagaaaccagagccattcctcaccaagcgtctcaccaagtcgctcacattccccgagcgggtcgcagaccagatcccactcctcctccgccagctcagccgagtcccaggactctaaaaaaaaaaaaaaaaaaaaagaaaagaagaagcacaaaaagcacaaaaagcataaaaaacacaagaaacacgcagggactgaggtggagctggaaaagtcccaaaagcacaagcataaaaaaaagaagtctaagaaaaataaggacaaagagaaagagaaagagaaggacgatcagaaagtgaaatcggttacagtctag

SEQ ID NO: 199758 - DNA, 2859 bp, Artificial Sequence
  derived and/or modified sequence
atgtcctgtgtacattacaagttttcatcaaaactcaattatgacacagtgacatttgatgggcttcacatcagtttgtgtgacttaaagaaacaaatcatggggcgagaaaaacttaaggccgctgactgcgatttacaaatcaccaacgctcagactaaggaggaatatactgatgataatgctctaatccccaagaactccagcgtaattgtgaggaggatcccaataggaggagtgaagtccacaagcaaaacgtacgtcatttcaagaaccgaaccagctatggcaaccactaaagcgatagatgacagctcggcttcaattagcctggctcagctgaccaaaactgccaacctggctgaagcaaatgccagcgaggaagacaagataaaggcaatgatgtcccagagcggccacgaatatgatccaattaactacatgaaaaaaccactggggcctccacccccaagctacacctgctttcggtgtggtaagcctgggcattacattaagaactgcccgactaacggagacaaaaacttcgagagcggtcctaggatcaaaaagagcactggtatcccgagatcttttatgatggaggtgaaggaccccaacatgaaaggcgctatgctgactaacacaggtaagtatgccataccaactatcgatgccgaagcttacgccatcggcaagaaagaaaagcccccattcctgcctgaggagccgagcagctcgtctgaggaagatgatcctataccagacgagctgctctgcctcatatgcaaagacatcatgacagatgcagtcgtgattccgtgctgcggtaactcttactgcgatgagtgtattagaacagccctgctcgaatctgacgaacatacctgtcctacttgtcaccaaaacgacgtatctcctgacgctctgatagctaataagttcctcagacaagcggtgaacaactttaagaacgaaaccggatacacaaagcgcctgaggaagcaactgcctcctcctcctccccctattccccctccaagacccctaattcagcggaatctccaaccactgatgaggtctcccatcagccggcagcaagatccacttatgataccagtcacatctagcagcactcacccagcgccaagcattagcagtctcacttcaaaccagtcaagcctggctcccccagtttcgggcaatcccagcagcgccccagccccagtgcctgacatcactgcaactgtgagcatatcagttcattctgagaagtctgacggaccgttcaggacctcatccactggtggatccccagtccgtaaaagcgaggaaaagacagatactaagaggaccgtgatcaagacaatggaggaatacaacaacgacaacaccgcacctgccgaggacgtgatcattatgattcaggttccgcagagcaaatgggacaaggacgattttgaaagtgaggaagaagatgtaaaatccacccaacccatctcctccgtgggcaagccagctagtgtgattaagaacgtttccactaagcccagcaatatcgtgaagtatcccgagaaggagtctgaaccatctgagaagatccagaaattcactaaggacgtgagtcatgaaattatccagcacgaggtgaaatcctcgaagaactctgcctcctctgagaaggggaagactaaagatagggactatagtgtgctggaaaaggagaacccggagaaacggaagaatagcacacagcctgaaaaagaatccaatctggacagattaaacgaacaaggcaatttcaaatccttgtcccagagcagcaaagaggcgagaacctcggataagcacgattccactcgggctagcagtaacaaagactttacacccaatcgtgacaagaagacagactatgacacgcgggaatactccagttccaagaggcgcgatgagaaaaacgaactgaccaggcgcaaagacagccccagccggaataaagacagcgcttccgggcagaaaaataaacctcgtgaagaacgggacctgcccaaaaaaggaacaggagacagcaaaaaatctaattctagcccatcaagggaccgcaagccccatgaccacaaggctacctatgataccaaacggcctaatgaggagactaagtctgtcgacaagaatccatgcaaagatcgagagaagcacgttttagaagcacgcaacaacaaagaaagcagcggaaataaattattgtacatcctgaatcctccagaaacacaggtcgaaaaagaacagataaccggacaaatcgataagtcaacagtgaagccaaaaccccagctgtcccatagctctagactgtcaagcgatttgacaagagagaccgacgaagccgctttcgaacctgactacaacgagtcggattccgagtcgaacgtgagcgtcaaagaagaggagtcatctggcaatatctcaaaggaccttaaagacaaaattgtggaaaaggctaaagagagcctcgataccgcagccgtggtgcaggtggggatatctcggaaccagagccatagctcaccgtcagtgtcccccagcaggagccattctccttcaggtagccagaccagatctcattcttcttcagctagctccgccgaatcccaggatagcaagaagaaaaagaagaaaaaagagaaaaagaagcacaagaaacataagaaacacaaaaagcataagaaacatgccggaactgaagttgagcttgagaagagtcagaagcacaagcataagaaaaagaagtccaaaaagaataaggacaaggagaaggagaaagagaaagatgatcagaaagttaaaagcgttaccgtttag

SEQ ID NO: 199759 - DNA, 4314 bp, Artificial Sequence
  derived and/or modified sequence
gccaggccgcgtccgccatagtacctggcttggaggtgtcgccgccgctcggtgagagcccccgagcggcagggggccaacacaaaaagggagccggagaagccctagccgctgcccagcagcttgcgggcgtgttctcgcggttccgggcctcaaggcgacggaaacgaaaggcgagcgaagcgcggaggatccggcgagaagaagcgtcagggagcctcggcggtgtccccggggtccgccgaagccacccggccgccggctggggcccggggtggtgaggaagtgctccgaggcctcgccgaggcctagcgccggctttgtgtccgaggcggcggcggcggcggggggaggcggagccgggggcggcctgcgggaaggcctctcctccgccgaccgcgcgttttcggcctaggccgtggggccgctcgtggcctccggggagcaggcgccaggggtttgtgtgcggtgggggcctgggcctgggcctggggaagctgacgccggtcgtccggaagccaggaggaggcgtgaggccgctcgtggactccgggcctaggccctctcccctcaaccttctcccggggcctgggtcaccccaatccacggagagagagacccgccgggaggtgcggccgcgctatggacccctgaccccgtggggtcgctcggactcttaacgtgtggactgaccgctactgactgcaccgccaatccccccgtctctgccggccccttagcatgagcgagggggacccagccgggtgacattgtgcccgttggcggattctcgatttcccctcttccccgtcctcgtcctcctcctcccccatgaagtgattctgagtatcggggggtctctggattattgttctgacgaacccctgcttgtggttggggggtatttaatctgaggccttagggtccttcggtgtctttgagtgttttgtgtgtacatattttgctcttaaagtttataaatatacgtatattgagagtgtccacgtctcctcgctgaaccttaggaatcccttggcaccatgtcctgtgtgcattataaattttcctctaaactcaactatgataccgtcacctttgatgggctccacatctccctctgcgacttaaagaagcagattatggggagagagaagctgaaagctgccgactgcgacctgcagatcaccaatgcgcagacgaaagaagaatatactgatgataatgctctgattcctaagaattcttctgtaattgttagaagaattcctattggaggtgttaaatctacaagcaagacatatgttataagtcgaactgaaccagcgatggcaactacaaaagcaattgatgactcttccgcgtctatttctctggcccagcttacaaagactgccaatctggctgaagccaatgcttctgaagaagataaaattaaagcaatgatgtcgcaatctggccatgaatacgacccaatcaattacatgaagaaacctctaggtccaccacctccatcttacacgtgtttccgttgtggtaaacctggacattatattaagaattgcccaacaaatggggataaaaactttgaatctggtcctaggattaaaaagagcactggaattcccagaagtttcatgatggaagtgaaagatcctaatatgaaaggtgcaatgcttaccaacactggaaaatatgcaataccaactatagatgcagaagcatatgcaattgggaagaaagagaaacctcccttcttaccagaggagccatcttcttcctcagaagaagatgatcctatcccagatgaattgttgtgtctcatctgcaaggatattatgactgatgctgttgtgattccctgctgtggaaacagttactgtgatgaatgtataagaacagcactcctggaatcagatgagcacacatgtccgacgtgtcatcaaaatgatgtttctcctgatgctttaattgccaataaatttttacgacaggctgtaaataacttcaaaaatgaaactggctatacaaaaagactacgaaaacagttacctcctccaccacccccaataccacctccgagaccactgattcagaggaacctacaacctctgatgagatctccgatatcaagacaacaagatcctcttatgattccagtgacatcttcatcaactcacccagctccgtctatatcttcattaacttctaatcagtcttccttggcccctcctgtgtctggaaatccgtcttctgctccagctcctgtacctgatataactgcaacagtatccatatcagttcattcagaaaaatcagatggaccttttcgtacgagctcaactggaggcagtcctgtgcggaaatctgaagaaaaaacagatacaaagcgaactgtgattaaaacgatggaagaatataataatgacaataccgcgccagctgaagatgttatcattatgattcaggttcctcaatccaaatgggataaagatgactttgaatctgaagaagaagatgttaaatccacacagcctatatcaagtgtaggaaaacctgctagtgttataaaaaatgttagtacaaagccatcaaatatagtcaagtatcctgagaaagaaagtgagccatccgagaaaattcagaaattcaccaaggacgtgagccatgaaatcatacaacatgaggttaaaagttcaaaaaactctgcatctagtgaaaaagggaaaaccaaagatcgagattattcagtgttggaaaaggagaaccctgaaaagaggaagaacagcactcagccagagaaagagagtaatttggaccgtctgaatgaacaaggaaattttaaaagtctgtctcaatcttccaaagaggctagaacgtcagataaacatgattccactcgtgcttcctcaaataaagacttcactcccaatagagacaaaaaaactgactatgacaccagagagtattcaagttccaaacgtagagatgaaaagaatgaattaacaagacgaaaagactctccttctcggaataaagattctgcatctggacagaaaaataaaccaagggaagagagagatttgcctaaaaaaggaacaggagattccaaaaaaagtaattctagtccctcaagagacagaaaacctcatgatcacaaagccacttatgatactaaacggccaaatgaagagacaaaatctgtagataaaaatccttgtaaggatcgtgagaagcatgtattagaagcaaggaacaataaagagtcaagtggcaataaactactttatatacttaacccaccagagacacaggttgaaaaagagcaaattactgggcaaattgacaagagtactgtcaagcctaaaccccagttaagtcattcctctagactttcctctgacttaactagagaaactgatgaagctgcttttgaaccagactataatgaaagtgacagtgaaagtaatgtttctgtaaaagaagaggaatcttcaggaaacatttctaaggacctgaaagataaaatagtggagaaagcaaaagagagcctggacacagcagcagttgtccaggtgggcataagcaggaatcagagccacagcagccccagcgtcagccccagcagaagccacagtccttctggaagccagacccgaagccacagtagcagtgccagctcagcagaaagtcaggacagcaagaagaagaagaaaaagaaggaaaagaaaaaacacaagaaacataaaaagcataagaagcataagaaacatgcaggcactgaagtggaattggaaaaaagccaaaaacacaaacacaagaaaaagaagtcaaagaagaacaaagataaagagaaggagaaggagaaagatgaccaaaaagtgaaatctgtcactgtgtaaaaagacagattttttaaattgacttaattactaagtcatctgtattaaattttgttataatgtaaagagattcaagccttgtaaataatgacatggaagaccctgtgctgcacttaaaatattgctgcttgattatttgatttttacatcagagctttataacacgaacttttgtacagaattgtgagttgtgaccatgtaacatgagaggttttgctagggcctattatttttaaccaccattaattagttggggtggagtttactgtaatgtgaaattttcacatttgaattttttaattgcctggcaaaagctgatataagttctaaaatatcagcagaatgatttgctgaattcattacaaccctgttatgtcactttttgattacaataaaagttttcagtaaacttttc

SEQ ID NO: 199760 - DNA, 2859 bp, Artificial Sequence
  derived and/or modified sequence
atgagctgcgtgcactacaagttcagcagcaagctgaactacgacaccgtgaccttcgacggcctgcacatcagcctgtgcgacctgaagaagcagatcatgggcagagagaagctgaaggccgccgactgcgacctgcagatcaccaacgcccagaccaaggaggagtacaccgacgacaacgccctgatccccaagaacagcagcgtgatcgtgagaagaatccccatcggcggcgtgaagagcaccagcaagacctacgtgatcagcagaaccgagcccgccatggccaccaccaaggccatcgacgacagcagcgccagcatcagcctggcccagctgaccaagaccgccaacctggccgaggccaacgccagcgaggaggacaagatcaaggccatgatgagccagagcggccacgagtacgaccccatcaactacatgaagaagcccctgggcccccccccccccagctacacctgcttcagatgcggcaagcccggccactacatcaagaactgccccaccaacggcgacaagaacttcgagagcggccccagaatcaagaagagcaccggcatccccagaagcttcatgatggaggtgaaggaccccaacatgaagggcgccatgctgaccaacaccggcaagtacgccatccccaccatcgacgccgaggcctacgccatcggcaagaaggagaagccccccttcctgcccgaggagcccagcagcagcagcgaggaggacgaccccatccccgacgagctgctgtgcctgatctgcaaggacatcatgaccgacgccgtggtgatcccctgctgcggcaacagctactgcgacgagtgcatcagaaccgccctgctggagagcgacgagcacacctgccccacctgccaccagaacgacgtgagccccgacgccctgatcgccaacaagttcctgagacaggccgtgaacaacttcaagaacgagaccggctacaccaagagactgagaaagcagctgccccccccccccccccccatccccccccccagacccctgatccagagaaacctgcagcccctgatgagaagccccatcagcagacagcaggaccccctgatgatccccgtgaccagcagcagcacccaccccgcccccagcatcagcagcctgaccagcaaccagagcagcctggccccccccgtgagcggcaaccccagcagcgcccccgcccccgtgcccgacatcaccgccaccgtgagcatcagcgtgcacagcgagaagagcgacggccccttcagaaccagcagcaccggcggcagccccgtgagaaagagcgaggagaagaccgacaccaagagaaccgtgatcaagaccatggaggagtacaacaacgacaacaccgcccccgccgaggacgtgatcatcatgatccaggtgccccagagcaagtgggacaaggacgacttcgagagcgaggaggaggacgtgaagagcacccagcccatcagcagcgtgggcaagcccgccagcgtgatcaagaacgtgagcaccaagcccagcaacatcgtgaagtaccccgagaaggagagcgagcccagcgagaagatccagaagttcaccaaggacgtgagccacgagatcatccagcacgaggtgaagagcagcaagaacagcgccagcagcgagaagggcaagaccaaggacagagactacagcgtgctggagaaggagaaccccgagaagagaaagaacagcacccagcccgagaaggagagcaacctggacagactgaacgagcagggcaacttcaagagcctgagccagagcagcaaggaggccagaaccagcgacaagcacgacagcaccagagccagcagcaacaaggacttcacccccaacagagacaagaagaccgactacgacaccagagagtacagcagcagcaagagaagagacgagaagaacgagctgaccagaagaaaggacagccccagcagaaacaaggacagcgccagcggccagaagaacaagcccagagaggagagagacctgcccaagaagggcaccggcgacagcaagaagagcaacagcagccccagcagagacagaaagccccacgaccacaaggccacctacgacaccaagagacccaacgaggagaccaagagcgtggacaagaacccctgcaaggacagagagaagcacgtgctggaggccagaaacaacaaggagagcagcggcaacaagctgctgtacatcctgaacccccccgagacccaggtggagaaggagcagatcaccggccagatcgacaagagcaccgtgaagcccaagccccagctgagccacagcagcagactgagcagcgacctgaccagagagaccgacgaggccgccttcgagcccgactacaacgagagcgacagcgagagcaacgtgagcgtgaaggaggaggagagcagcggcaacatcagcaaggacctgaaggacaagatcgtggagaaggccaaggagagcctggacaccgccgccgtggtgcaggtgggcatcagcagaaaccagagccacagcagccccagcgtgagccccagcagaagccacagccccagcggcagccagaccagaagccacagcagcagcgccagcagcgccgagagccaggacagcaagaagaagaagaagaagaaggagaagaagaagcacaagaagcacaagaagcacaagaagcacaagaagcacgccggcaccgaggtggagctggagaagagccagaagcacaagcacaagaagaagaagagcaagaagaacaaggacaaggagaaggagaaggagaaggacgaccagaaggtgaagagcgtgaccgtgtag

SEQ ID NO: 199761 - protein, 919 aa, Artificial Sequence
  derived and/or modified sequence
MASATAAAARRGLGRALPLFWRGYQTERGVYGYRPRKPESREPQGALERPPVDHGLARLVTVYCEHGHKAAKINPLFTGQALLENVPEIQALVQTLQGPFHTAGLLNMGKEEASLEEVLVYLNQIYCGQISIETSQLQSQDEKDWFAKRFEELQKETFTTEERKHLSKLMLESQEFDHFLATKFSTVKRYGGEGAESMMGFFHELLKMSAYSGITDVIIGMPHRGRLNLLTGLLQFPPELMFRKMRGLSEFPENFSATGDVLSHLTSSVDLYFGAHHPLHVTMLPNPSHLEAVNPVAVGKTRGRQQSRQDGDYSPDNSAQPGDRVICLQVHGDASFCGQGIVPETFTLSNLPHFRIGGSVHLIVNNQLGYTTPAERGRSSLYCSDIGKLVGCAIIHVNGDSPEEVVRATRLAFEYQRQFRKDVIIDLLCYRQWGHNELDEPFYTNPIMYKIIRARKSIPDTYAEHLIAGGLMTQEEVSEIKSSYYAKLNDHLNNMAHYRPPALNLQAHWQGLAQPEAQITTWSTGVPLDLLRFVGMKSVEVPRELQMHSHLLKTHVQSRMEKMMDGIKLDWATAEALALGSLLAQGFNVRLSGQDVGRGTFSQRHAIVVCQETDDTYIPLNHMDPNQKGFLEVSNSPLSEEAVLGFEYGMSIESPKLLPLWEAQFGDFFNGAQIIFDTFISGGEAKWLLQSGIVILLPHGYDGAGPDHSSCRIERFLQMCDSAEEGVDGDTVNMFVVHPTTPAQYFHLLRRQMVRNFRKPLIVASPKMLLRLPAAVSTLQEMAPGTTFNPVIGDSSVDPKKVKTLVFCSGKHFYSLVKQRESLGAKKHDFAIIRVEELCPFPLDSLQQEMSKYKHVKDHIWSQEEPQNMGPWSFVSPRFEKQLACKLRLVGRPPLPVPAVGIGTVHLHQHEDILAKTFA

SEQ ID NO: 199762 - protein, 161 aa, Artificial Sequence [sequence omitted]

SEQ ID NO: 199763 - protein, 308 aa, Artificial Sequence
  derived and/or modified sequence
MASATAAAARRGLGRALPLFWRGYQTERGVYGYRPRKPESREPQGALERPPVDHGLARLVTVYCEHGHKAAKINPLFTGQALLENVPEIQALVQTLQGPFHTAGLLNMGKEEASLEEVLVYLNQIYCGQISIETSQLQSQDEKDWFAKRFEELQKETFTTEERKHLSKLMLESQLMFRKMRGLSEFPENFSATGDVLSHLTSSVDLYFGAHHPLHVTMLPNPSHLEAVNPVAVGKTRGRQQSRQDGDYSPDNSAQPGDRVICLQVHGDASFCGQGIVPETFTLSNLPHFRIGGSVHLIVNNQLGYTTP

SEQ ID NO: 199764 - protein, 214 aa, Artificial Sequence
  derived and/or modified sequence
  misc_feature (1)..(1): Xaa can be any naturally occurring amino acid
XKIIRARKSIPDTYAEHLIAGGLMTQEEVSEIKSSYYAKLNDHLNNMAHYRPPALNLQAHWQGLAQPEAQITTWSTGVPLDLLRFVGMKSVEVPRELQMHSHLLKTHVQSRMEKMMDGIKLDWATAEALALGSLLAQGFNVRLSGQDVGRGTFSQRHAIVVCQETDDTYIPLNHMDPNQKGFLEERPSGSYKAASSSSFHMATMGLGQTTHPVE

SEQ ID NO: 199765 - DNA, 2760 bp, Artificial Sequence
  derived and/or modified sequence
atggccagcgccaccgccgccgccgccagaagaggcctgggcagagccctgcccctgttctggagaggctaccagaccgagagaggcgtgtacggctacagacccagaaagcccgagagcagagagccccagggcgccctggagagaccccccgtggaccacggcctggccagactggtgaccgtgtactgcgagcacggccacaaggccgccaagatcaaccccctgttcaccggccaggccctgctggagaacgtgcccgagatccaggccctggtgcagaccctgcagggccccttccacaccgccggcctgctgaacatgggcaaggaggaggccagcctggaggaggtgctggtgtacctgaaccagatctactgcggccagatcagcatcgagaccagccagctgcagagccaggacgagaaggactggttcgccaagagattcgaggagctgcagaaggagaccttcaccaccgaggagagaaagcacctgagcaagctgatgctggagagccaggagttcgaccacttcctggccaccaagttcagcaccgtgaagagatacggcggcgagggcgccgagagcatgatgggcttcttccacgagctgctgaagatgagcgcctacagcggcatcaccgacgtgatcatcggcatgccccacagaggcagactgaacctgctgaccggcctgctgcagttcccccccgagctgatgttcagaaagatgagaggcctgagcgagttccccgagaacttcagcgccaccggcgacgtgctgagccacctgaccagcagcgtggacctgtacttcggcgcccaccaccccctgcacgtgaccatgctgcccaaccccagccacctggaggccgtgaaccccgtggccgtgggcaagaccagaggcagacagcagagcagacaggacggcgactacagccccgacaacagcgcccagcccggcgacagagtgatctgcctgcaggtgcacggcgacgccagcttctgcggccagggcatcgtgcccgagaccttcaccctgagcaacctgccccacttcagaatcggcggcagcgtgcacctgatcgtgaacaaccagctgggctacaccacccccgccgagagaggcagaagcagcctgtactgcagcgacatcggcaagctggtgggctgcgccatcatccacgtgaacggcgacagccccgaggaggtggtgagagccaccagactggccttcgagtaccagagacagttcagaaaggacgtgatcatcgacctgctgtgctacagacagtggggccacaacgagctggacgagcccttctacaccaaccccatcatgtacaagatcatcagagccagaaagagcatccccgacacctacgccgagcacctgatcgccggcggcctgatgacccaggaggaggtgagcgagatcaagagcagctactacgccaagctgaacgaccacctgaacaacatggcccactacagaccccccgccctgaacctgcaggcccactggcagggcctggcccagcccgaggcccagatcaccacctggagcaccggcgtgcccctggacctgctgagattcgtgggcatgaagagcgtggaggtgcccagagagctgcagatgcacagccacctgctgaagacccacgtgcagagcagaatggagaagatgatggacggcatcaagctggactgggccaccgccgaggccctggccctgggcagcctgctggcccagggcttcaacgtgagactgagcggccaggacgtgggcagaggcaccttcagccagagacacgccatcgtggtgtgccaggagaccgacgacacctacatccccctgaaccacatggaccccaaccagaagggcttcctggaggtgagcaacagccccctgagcgaggaggccgtgctgggcttcgagtacggcatgagcatcgagagccccaagctgctgcccctgtgggaggcccagttcggcgacttcttcaacggcgcccagatcatcttcgacaccttcatcagcggcggcgaggccaagtggctgctgcagagcggcatcgtgatcctgctgccccacggctacgacggcgccggccccgaccacagcagctgcagaatcgagagattcctgcagatgtgcgacagcgccgaggagggcgtggacggcgacaccgtgaacatgttcgtggtgcaccccaccacccccgcccagtacttccacctgctgagaagacagatggtgagaaacttcagaaagcccctgatcgtggccagccccaagatgctgctgagactgcccgccgccgtgagcaccctgcaggagatggcccccggcaccaccttcaaccccgtgatcggcgacagcagcgtggaccccaagaaggtgaagaccctggtgttctgcagcggcaagcacttctacagcctggtgaagcagagagagagcctgggcgccaagaagcacgacttcgccatcatcagagtggaggagctgtgccccttccccctggacagcctgcagcaggagatgagcaagtacaagcacgtgaaggaccacatctggagccaggaggagccccagaacatgggcccctggagcttcgtgagccccagattcgagaagcagctggcctgcaagctgagactggtgggcagaccccccctgcccgtgcccgccgtgggcatcggcaccgtgcacctgcaccagcacgaggacatcctggccaagaccttcgcctag

SEQ ID NO: 199766 - DNA, 486 bp, Artificial Sequence
  derived and/or modified sequence
ggcagacagcagagcagacaggacggcgactacagccccgacaacagcgcccagcccggcgacagagtgatctgcctgcaggtgcacggcgacgccagcttctgcggccagggcatcgtgcccgagaccttcaccctgagcaacctgccccacttcagaatcggcggcagcgtgcacctgatcgtgaacaaccagctgggctacaccacccccgccgagagaggcagaagcagcctgtactgcagcgacatcggcaagctggtgggctgcgccatcatccacgtgaacggcgacagccccgaggaggtggtgagagccaccagactggccttcgagtaccagagacagttcagaaaggacgtgatcatcgacctgctgtgctacagacagtggggccacaacgagctggacgagcccttctacaccaaccccatcatgtacaagatcatcagatacaactacaagcccctgtgcgacatgccctag

SEQ ID NO: 199767 - DNA, 927 bp, Artificial Sequence
  derived and/or modified sequence
atggccagcgccaccgccgccgccgccagaagaggcctgggcagagccctgcccctgttctggagaggctaccagaccgagagaggcgtgtacggctacagacccagaaagcccgagagcagagagccccagggcgccctggagagaccccccgtggaccacggcctggccagactggtgaccgtgtactgcgagcacggccacaaggccgccaagatcaaccccctgttcaccggccaggccctgctggagaacgtgcccgagatccaggccctggtgcagaccctgcagggccccttccacaccgccggcctgctgaacatgggcaaggaggaggccagcctggaggaggtgctggtgtacctgaaccagatctactgcggccagatcagcatcgagaccagccagctgcagagccaggacgagaaggactggttcgccaagagattcgaggagctgcagaaggagaccttcaccaccgaggagagaaagcacctgagcaagctgatgctggagagccagctgatgttcagaaagatgagaggcctgagcgagttccccgagaacttcagcgccaccggcgacgtgctgagccacctgaccagcagcgtggacctgtacttcggcgcccaccaccccctgcacgtgaccatgctgcccaaccccagccacctggaggccgtgaaccccgtggccgtgggcaagaccagaggcagacagcagagcagacaggacggcgactacagccccgacaacagcgcccagcccggcgacagagtgatctgcctgcaggtgcacggcgacgccagcttctgcggccagggcatcgtgcccgagaccttcaccctgagcaacctgccccacttcagaatcggcggcagcgtgcacctgatcgtgaacaaccagctgggctacaccaccccctag

SEQ ID NO: 199768 - DNA, 645 bp, Artificial Sequence
  derived and/or modified sequence
tgaaagatcatcagagccagaaagagcatccccgacacctacgccgagcacctgatcgccggcggcctgatgacccaggaggaggtgagcgagatcaagagcagctactacgccaagctgaacgaccacctgaacaacatggcccactacagaccccccgccctgaacctgcaggcccactggcagggcctggcccagcccgaggcccagatcaccacctggagcaccggcgtgcccctggacctgctgagattcgtgggcatgaagagcgtggaggtgcccagagagctgcagatgcacagccacctgctgaagacccacgtgcagagcagaatggagaagatgatggacggcatcaagctggactgggccaccgccgaggccctggccctgggcagcctgctggcccagggcttcaacgtgagactgagcggccaggacgtgggcagaggcaccttcagccagagacacgccatcgtggtgtgccaggagaccgacgacacctacatccccctgaaccacatggaccccaaccagaagggcttcctggaggagagacccagcggcagctacaaggccgccagcagcagcagcttccacatggccaccatgggcctgggccagaccacccaccccgtggagtag

SEQ ID NO: 199769 - DNA, 5159 bp, Artificial Sequence
  derived and/or modified sequence
cagggccggtgggatcccctcgggctcccgccttagcatgctggccgggacatctggtgaacatggcctctgctactgcggcagcagcacgacggggcctcggccgggctctccctctcttctggcgtggctaccagaccgagcggggcgtttacggctaccggccgaggaagcccgagagccgcgagccccagggcgccctggagcgccccccagttgatcatggccttgccaggttggtgacagtatattgtgagcatggtcataaagctgccaaaatcaaccccctcttcaccggacaagccctgctggagaatgtgcctgaaatccaagccctggtgcagacactgcagggacccttccacacggcaggattattgaacatggggaaggaagaggcctcacttgaggaagtgttagtctatctcaatcaaatctactgtgggcagatttctattgaaacctcccaacttcagagccaggatgagaaagactggtttgccaagcggtttgaggaactgcaaaaggagacgtttaccacagaagagcgaaaacatctgtcgaaactaatgctggaatctcaggagtttgaccactttctggccaccaagttctcgacagtgaagcgatatggaggcgaaggggctgaaagcatgatgggctttttccacgagctgctgaaaatgtcggcctacagcgggatcactgatgtcattattgggatgccccatagagggaggctgaatttattgacaggccttctgcagttccctccagagctgatgttccgtaaaatgcgaggcttaagtgaatttccagagaatttctcagccactggagacgtcctgtctcacctgacctcctctgtggacctgtactttggggcgcaccatcccctccatgtgacaatgttgcccaatccctcgcacctggaggccgtcaaccccgtggccgtgggcaaaactcgcggcaggcagcagtctcgccaagacggcgattactctccagacaactcagcccagccgggggacagggtcatttgcttacaggtccatggtgatgcttctttctgtggtcaagggattgttcctgaaacattcacgctgtccaatctcccacatttcagaattggtgggagtgtgcatttgattgttaataaccagctgggttacaccactccagctgaaagaggaaggtcttctttatactgcagtgatattgggaagcttgtgggctgtgccatcatccatgtcaatggagacagcccagaggaagtggtccgtgccacacgactggcttttgaataccaacgccagttccgcaaggatgtgattattgatctgttgtgctacaggcagtggggccacaatgagctggatgagccattctacaccaaccccatcatgtacaaaatcatcagagctcgaaagagcattccagacacatatgcagagcacctcattgctggcggactcatgacgcaggaggaggtgtctgaaataaaatcctcctactatgccaagttgaatgatcacttaaataacatggcccactacaggccccctgccctgaacctgcaggcccactggcagggcctggctcagccagaagcgcaaatcaccacctggagtacaggtgtgcccctcgacctcctgcggtttgttggcatgaagtctgtagaggtgccaagagagctgcagatgcacagtcacctgctgaagacacatgttcagtccagaatggagaagatgatggacggaatcaagctagactgggccaccgcggaagctcttgccttgggttctttacttgctcaaggttttaatgttcgtctaagtggccaagatgttggtcgtggaactttcagtcagaggcatgcaatcgtggtttgccaggagacggatgacacctacatccccctgaaccatatggacccaaatcagaaggggtttctagaggtcagcaacagcccactgtcagaagaggccgtcctgggatttgaatatgggatgagcattgagagcccaaagttactgcccctgtgggaggcacagtttggcgatttcttcaatggtgcccagatcatctttgacacattcatctctggaggagaggccaagtggctcctacaaagcggcatcgtcatcctccttccacatggctacgatggggctgggccagaccactcatcctgtcgaatagagcgtttcctgcagatgtgtgacagtgcggaagagggggtggacggagacactgtgaacatgtttgtggttcacccaacaactcctgcacagtatttccacttgcttaggagacagatggtccggaacttcagaaaaccactcattgttgcttcccctaagatgttactcaggctcccggcagccgtgtcaactcttcaagaaatggcaccaggaacaacatttaacccggtcattggtgattcatctgtggatccaaaaaaggttaagaccctcgtgttctgctccggcaaacatttctactccctggtgaaacaaagagaatctctgggggccaagaagcatgactttgccatcatccgagtagaggaactctgccccttcccgttggattctttacagcaagagatgagcaaatacaaacatgttaaagatcatatttggagtcaggaggaacctcagaacatgggtccgtggtcgtttgtttctccaaggtttgaaaagcagctggcctgcaagctccgtctggtgggccggccccctttgccagtacccgctgtaggaattggcacagttcacttgcaccagcatgaagatatcctcgccaagaccttcgcttgatgatgacttttgaagaaacactatttctctttaagaaaatggccattaaggccgggtggggtggcacatgcctgtaatcccagcactttgggaggccaaggctggtggatcacctgaggtcaggagttcgagaccagcctggccaacacggtgaaaccccgcctctactaaaaatacaaaaaatagccgggtgtggtggtgggcacctgtgatcccagcttcctgggaggctgaggcaagagaatcgcttgaatctgggaggcggaggttgcagtgagccaggatcacaccattgctgtccagcctgggtgacagagcaagactgcgtttcaaaaaaaaaaaaaaaaaaacccattaaaagaggcctccttcctccactctctcaacccctctgttgggtaacatgaaaagactgtattcctctaagatgttgggattgatatacgtgatttaatctgcaataggtggaataaccaggggaactggttatgaatatgtgaatgcaaccagcaaatttatccttgaaggtgtgatggtagaaataggaaaacaacaaaagaaaaacaataacaaaaaaagaaagtgtgatggctgggtgcagtggctcacgcctgtaatcccagcactttgggaggcttaggcggctggatcacctgaggtcaggagttcaagaccagcctggtcaacgtggtgaaacgccgtttctactaaaaatatgaaaattagttgggtgtggtggcatgcgcttgtagtctcagctactccggaggctgaggcaggagaattgcttgaacctggaaggcagaggttgcagtgagccgaaatggcgccactgtactccaacctgggcgacagagcaagactccatctcataaattaaaaggaaagtatgatagtgttatggattttagctctgagtgagctggaaaactaggtcattatctagatgatttcagacttgaccctaattgaccatatatgaccaggaaacacttctgagtttacagctccgtggagatgacctcaacactgcctcttgatttgtttgatgcatgtcactttcattaattttccccctcctttttgaaagtcctgtggcagtactaatattttcattttatgtaatctctggtgctgctttccagtcactgtatgaagtgtctccccaacactagcaaatctaggtcctactaaatacaaatctctgggtggatgatcttctagtactgtatttttaaattaaggagttttagttataatgaaattgatttgtagtctgttttgccgtaaacttgtttttctttaaattgttcttacagtgatatcttactatttttaactgtctggggtttctgatatggggatttcagcccctggttaatcagtcttgtccctacaagtccctgatgcagtatgtttatttgtgatgtttaaagaacatttcttggctgggcgctgcggcttgcgcctgtaatctcagcactttgggaggctgagatgggtggatcacctgaggttgggagttcgagaccagcctgacaaaacatagtgaaaccccgtctctactaaaaatacaaaaattagctgggcgtggtggtgggtgtctgtaatcccagctattcgggaggctgaggcaggagaatcgcttgaacccaggaggtggaggttgcagtgagctgagatcctgccactgcactccagtctgggtgacagagcaagactccatctcaaaaaataaataaatagaaagagagagagaggaaaaaaaaagaaaagaacacttctttatttgagggactttcccaacaccaggtgcttggggatttcttagagatcaccaaccgactccctcactgtgaaattaaaccaagtactggaaacgtaactaaacagcgaaccatgtagcttcacctgactcagtgctgggggcctctaccatctactgtgcttgtgtcatgatgctttttctctgaagtggtgtgggaagtaccaggggactggcagaagcccaggccctctctacttttaccagcaactgatcatgtctttcagaatccatgtacatataggctgttctagccacagtggtagatttatgattcacatccgaaagtgtgccttagttatcaatttaacatttctctagtattcatatcccttttcttaccatatacctcagtgtatccttcctgtgtcaagccttataaatcatgtaatttagtgccactcatgtaaatcagtaaaatcacaaaggtctatttaatgaaaacgatttaccaatgttgtttttttttaacaagaaaaaaaataaaagcacattgtcattttttttcctca

SEQ ID NO: 199770 - DNA, 482 bp, Artificial Sequence
  derived and/or modified sequence
ggcaggcagcagtctcgccaagacggcgattactctccagacaactcagcccagccgggggacagggtcatttgcttacaggtccatggtgatgcttctttctgtggtcaagggattgttcctgaaacattcacgctgtccaatctcccacatttcagaattggtgggagtgtgcatttgattgttaataaccagctgggttacaccactccagctgaaagaggaaggtcttctttatactgcagtgatattgggaagcttgtgggctgtgccatcatccatgtcaatggagacagcccagaggaagtggtccgtgccacacgactggcttttgaataccaacgccagttccgcaaggatgtgattattgatctgttgtgctacaggcagtggggccacaatgagctggatgagccattctacaccaaccccatcatgtacaaaatcatcaggtacaattataaacccttgtgtgatatgcc

SEQ ID NO: 199771 - DNA, 933 bp, Artificial Sequence
  derived and/or modified sequence
tctggtgaacatggcctctgctactgcggcagcagcacgacggggcctcggccgggctctccctctcttctggcgtggctaccagaccgagcggggcgtttacggctaccggccgaggaagcccgagagccgcgagccccagggcgccctggagcgccccccagttgatcatggccttgccaggttggtgacagtatattgtgagcatggtcataaagctgccaaaatcaaccccctcttcaccggacaagccctgctggagaatgtgcctgaaatccaagccctggtgcagacactgcagggacccttccacacggcaggattattgaacatggggaaggaagaggcctcacttgaggaagtgttagtctatctcaatcaaatctactgtgggcagatttctattgaaacctcccaacttcagagccaggatgagaaagactggtttgccaagcggtttgaggaactgcaaaaggagacgtttaccacagaagagcgaaaacatctgtcgaaactaatgctggaatctcagctgatgttccgtaaaatgcgaggcttaagtgaatttccagagaatttctcagccactggagacgtcctgtctcacctgacctcctctgtggacctgtactttggggcgcaccatcccctccatgtgacaatgttgcccaatccctcgcacctggaggccgtcaaccccgtggccgtgggcaaaactcgcggcaggcagcagtctcgccaagacggcgattactctccagacaactcagcccagccgggggacagggtcatttgcttacaggtccatggtgatgcttctttctgtggtcaagggattgttcctgaaacattcacgctgtccaatctcccacatttcagaattggtgggagtgtgcatttgattgttaataaccagctgggttacaccactcc

SEQ ID NO: 199772 - DNA, 787 bp, Artificial Sequence
  derived and/or modified sequence
caaaatcatcagagctcgaaagagcattccagacacatatgcagagcacctcattgctggcggactcatgacgcaggaggaggtgtctgaaataaaatcctcctactatgccaagttgaatgatcacttaaataacatggcccactacaggccccctgccctgaacctgcaggcccactggcagggcctggctcagccagaagcgcaaatcaccacctggagtacaggtgtgcccctcgacctcctgcggtttgttggcatgaagtctgtagaggtgccaagagagctgcagatgcacagtcacctgctgaagacacatgttcagtccagaatggagaagatgatggacggaatcaagctagactgggccaccgcggaagctcttgccttgggttctttacttgctcaaggttttaatgttcgtctaagtggccaagatgttggtcgtggaactttcagtcagaggcatgcaatcgtggtttgccaggagacggatgacacctacatccccctgaaccatatggacccaaatcagaaggggtttctagaggagaggccaagtggctcctacaaagcggcatcgtcatcctccttccacatggctacgatggggctgggccagaccactcatcctgtcgaatagagcgtttcctgcagatgtgtgacagtgcggaagagggggtggacggagacactgtgaacatgtttgtggttcacccaacaactcctgcacagtatttccacttgcttaggagacagatggtccggaacttcagaaaaccactca

SEQ ID NO: 199773 - DNA, 2760 bp, Artificial Sequence
  derived and/or modified sequence
atggctagcgcaacggccgcagctgcaaggcgcggcctgggccgggctcttccactgttctggcgcggttaccagaccgagaggggcgtttacggatatcgacccagaaagccggagtctcgggagccccaaggagccctcgaaaggccccccgttgaccacggattagcccggctggttaccgtatactgtgaacacgggcataaagccgcaaagattaatcccctttttactgggcaagccctactagagaacgtacctgaaatccaggcattggttcagacgttgcagggacccttccacaccgcggggttgctgaacatgggcaaagaagaggctagcctggaggaagttctggtatatcttaaccaaatctattgcggtcagatctcaattgaaacgtctcagctccagtctcaggacgagaaagactggttcgctaaaagatttgaagagttgcagaaggagaccttcacaaccgaggaaaggaaacacctttccaagctgatgttggagtcccaggaattcgatcacttcctcgcgactaaattttcaacggttaagcggtacgggggcgaaggggccgagagcatgatgggatttttccacgaattgctaaagatgtcggcatattctggcatcactgatgtcattatcggcatgccacaccgaggccggcttaatctgttaaccgggttgttgcagtttcctcctgagctcatgtttcgtaagatgcgggggctgagtgagtttccagaaaacttttctgcaaccggtgatgtcctttcgcatttaacctcttccgtggacttgtattttggtgcccaccatcctctgcacgtcaccatgttacctaacccttcccacctggaagcagttaaccctgtggcagttggtaagacgcggggaagacaacaaagtagacaagacggcgattactctcccgacaactctgcccagcctggagacagagtgatctgtctccaggttcacggagatgcatctttttgcgggcaaggaatagttcccgaaacattcaccctgtccaatctgcctcactttagaataggcggtagcgtgcatttgatcgttaataatcagctcggatacacgacacccgctgaacgggggaggagcagcctatactgcagtgatatcggcaagttggtgggttgtgccatcatacacgtgaatggcgatagtcccgaagaggtagtgagggctacacgactggcttttgagtatcagaggcaattccggaaagatgtgataatcgacctgctgtgctatagacagtggggacataatgagctcgatgagcctttttatactaacccaattatgtataagattatccgggcaagaaagtctatcccagacacatacgcagaacatctgattgcaggcggcctgatgactcaggaggaagtgtcagagattaagagctcttactacgctaaactgaatgatcatctgaataacatggcgcattatagacctcctgccttaaacctgcaggcccactggcaagggttggcgcaacccgaggcccagataaccacctggtctacaggcgtgccactggacctcttacgttttgtgggtatgaaatccgtggaagtgcctagggagctccagatgcactcccacttacttaagactcacgtccagtcccgcatggagaagatgatggatgggattaagttagactgggcaacagccgaagcactggctctgggatctcttctggcccagggatttaacgttcgtctatctggacaggacgtcggacgcggaacgttttcacagaggcacgccattgtcgtgtgtcaggagactgacgatacatatattccacttaatcacatggaccccaaccagaagggattcctcgaggtgtccaactctcccctgtcagaggaagctgttctgggatttgagtacggtatgtccatagagagtcccaaactgttgcccctctgggaggcgcagttcggggatttcttcaacggcgcacagatcatctttgacacgtttatatctggaggcgaggcaaaatggctcttgcagagcgggatcgtaattttgctgcctcatggatacgacggggctggacctgatcactcctcttgccgtattgagaggttcctccaaatgtgcgattcagccgaggagggcgtggacggtgacactgtaaacatgttcgtcgtgcacccaaccaccccagcccagtacttccacctgctacgaaggcaaatggtgcgaaatttccggaaaccactcattgttgctagccctaagatgctgctgcgcctcccggccgccgtgagcaccctccaggagatggccccaggtactacttttaatcccgtgataggagactcttcggtggacccaaaaaaggtgaagaccctagttttctgttccggaaaacacttttatagtctggtgaagcagcgagagtcactgggcgctaaaaagcatgactttgccatcattagggtggaggagctgtgtccctttcccctcgactcactacagcaagagatgtctaagtataagcacgtgaaggaccacatctggagccaggaggagccacagaatatgggcccatggagtttcgtctcaccgcgatttgagaagcaactcgcgtgtaagctccgattggttggacgtccacctctccctgtgcccgctgtcggcatcggaaccgtgcacctccaccagcacgaagacatcctagctaagacatttgcctag

SEQ ID NO: 199774 - DNA, 486 bp, Artificial Sequence
  derived and/or modified sequence
ggcaggcagcaatccaggcaggacggtgattactctccagacaactccgctcaacctggtgacagggtgatttgcttacaagtgcacggcgacgccagtttctgtggccaaggtattgttccggaaactttcacattgagcaatcttcctcacttcagaatagggggctctgtgcacctgattgtgaacaaccagctgggatacacaactccagctgagagaggtagatcatcgctttattgctcagacatcgggaaattggtcgggtgtgctataatacatgttaatggggacagtcccgaggaagttgtgagagccacgaggttggccttcgagtatcaacggcagtttcgtaaggatgtgataattgacttgctctgttataggcaatggggtcacaatgaactcgacgagcccttttataccaatcccattatgtacaagatcattcggtacaactacaaacctctttgcgatatgccttag

SEQ ID NO: 199775 - DNA, 927 bp, Artificial Sequence
  derived and/or modified sequence
atggccagcgccactgccgcagccgcaagacgggggcttggccgagccctgccactgttctggaggggctatcaaaccgagaggggggtttatgggtatcggccacgaaagccagagagtcgggaaccacagggagccctcgaacgacctccagtggaccacggcttagcaaggttagtgacagtgtactgtgaacatgggcacaaagctgccaaaatcaaccctctgttcactgggcaggccctgctagagaacgtccccgaaattcaagctctagtgcagaccctgcagggcccttttcataccgctggccttctcaacatgggtaaagaagaggctagcctggaggaggttctggtgtacctgaatcaaatctactgcgggcagatttcgatcgagacttcccaactccagtcacaggatgagaaagattggttcgccaagcgcttcgaggaactgcaaaaggagacgttcaccaccgaagagagaaaacatctgtctaagcttatgctggagtcccagctgatgttccgcaagatgagaggtctctcagagttccccgaaaatttttcagctactggtgatgttctgagccacctcacctctagcgtcgatctttactttggtgcacaccatccccttcacgtaacaatgttgcctaatccgtctcacctggaggcagtgaaccctgtcgctgtcgggaaaacgaggggaagacaacagagcagacaggacggagattactcgccagacaacagcgctcagcccggagacagagtcatatgcctccaggtgcacggggacgcctctttttgtggtcaggggatcgtgcctgagacctttactctgtccaacctgccccactttaggattgggggtagcgtccacctgatcgtaaacaatcagctcgggtatactacgccttag

SEQ ID NO: 199776 - DNA, 645 bp, Artificial Sequence
  derived and/or modified sequence
tagaagatcatccgcgcccgaaagtcaatacccgatacgtacgccgaacacctgattgccggcggtttaatgacacaggaagaagtgtccgaaattaagagctcgtattacgcaaagctgaacgatcacctgaacaacatggcacattatcgccccccagctctcaacctccaggctcactggcagggtcttgcccaacccgaggcccagatcacaacatggagtacaggagtgcccttggacttactccgatttgtcggcatgaaaagcgttgaggtcccacgggagctccagatgcatagccacttactgaagactcacgtccaatccaggatggagaagatgatggacggaatcaaactagactgggccactgctgaggccctagcgcttgggtccctgttagcacaaggttttaacgtgcgtctcagcggacaagatgtgggaagaggtactttttcccagaggcacgccatcgtagtctgccaagagaccgacgatacgtatattccactgaatcatatggatccaaaccagaagggattcctggaggaacggccatcaggcagttataaagccgcttcatcctcatcatttcacatggcgaccatggggctgggacagacaacccatcctgtagaatag

SEQ ID NO: 199777 - DNA, 2760 bp, Artificial Sequence
  derived and/or modified sequence
atggccagcgccacagctgctgctgcccggcggggcctgggccgggccctgcccctcttctggaggggctaccagacagagcggggcgtgtatggctaccggcccaggaagccagagagccgggagccccagggcgccctggagcggccccctgtggaccacggcctggcccggctggtgacagtgtactgtgagcacggccacaaggccgccaagatcaaccccctcttcaccggccaggccctgctggagaatgtgcctgagatccaggccctggtgcagaccctgcagggccccttccacacagctggcctgctgaacatgggcaaggaggaggccagcctggaggaggtgctggtgtacctgaaccagatctactgcggccagatcagcattgagaccagccagctgcagagccaggatgagaaggactggtttgccaagagatttgaggagctgcagaaggagaccttcaccacagaggagaggaagcacctgagcaagctgatgctggagagccaggagtttgaccacttcctggccaccaagttcagcacagtgaagagatatggaggagagggcgctgagagcatgatgggcttcttccacgagctgctgaagatgtctgcctacagcggcatcacagatgtgatcatcggcatgccccaccggggccgcctgaacctgctgaccggcctgctgcagtttcctcctgagctgatgttcaggaagatgaggggcctgtctgagttccctgagaacttcagcgccactggagatgtgctgagccacctgaccagctctgtggacctgtactttggagcccaccaccccctgcacgtgaccatgctgcccaaccccagccacctggaggccgtgaaccctgtggccgtgggcaagacccggggccggcagcagagccggcaggatggagactacagcccagacaacagcgcccagcccggggacagagtcatctgcctgcaggtgcatggagatgccagcttctgtggccagggcatcgtgcctgagaccttcaccctgagcaacctgccccacttccgcatcggcggctctgtgcacctgattgtgaacaaccagctgggctacaccaccccagctgagcggggccgcagcagcctgtactgcagcgacatcggcaagctggtgggctgtgccatcatccacgtgaatggagacagccctgaggaggtggtgcgggccacccggctggcctttgagtaccagaggcagttcaggaaggatgtgatcatcgacctgctgtgctaccggcagtggggccacaatgagctggatgagcccttctacaccaaccccatcatgtacaagatcatccgggccaggaagagcatcccagacacctatgcagagcacctgattgctgggggcctgatgacccaggaggaggtgtctgagatcaagagcagctactatgccaagctgaatgaccacctgaacaacatggcccactaccggcccccagccctgaacctgcaggcccactggcagggcctggcccagcctgaggcccagatcaccacctggagcactggagtgcccctggacctgctgcgctttgtgggcatgaagtctgtggaggtgccccgggagctgcagatgcacagccacctgctgaagacccacgtgcagagcaggatggagaagatgatggatggcatcaagctggactgggccacagctgaggccctggccctgggcagcctgctggcccagggcttcaacgtgcggctgagcggccaggatgtgggccggggcaccttcagccagagacatgccatcgtggtgtgccaggagacagatgacacctacatccccctgaaccacatggaccccaaccagaagggcttcctggaggtgagcaacagccccctgtctgaggaggccgtgctgggctttgaatatggcatgagcattgagagccccaagctgctgcccctgtgggaggcccagtttggagacttcttcaacggggcccagatcatctttgacaccttcatctctggaggagaggccaagtggctgctgcagagcggcatcgtcatcctgctgccccacggctatgatggagctggccctgaccacagcagctgcagaattgagcgcttcctgcagatgtgtgacagcgctgaggagggcgtggatggagacacagtgaacatgtttgtggtgcaccccaccaccccagcccagtacttccacctgctgcggcggcagatggtgaggaacttcaggaagcccctcatcgtggccagccccaagatgctgctgcggctgcctgctgctgtgtccaccctgcaggagatggcccctggcaccaccttcaaccctgtgattggagacagctctgtggaccccaagaaggtgaagaccctggtgttctgcagcggcaagcacttctacagcctggtgaagcagcgggagagcctgggcgccaagaagcatgactttgccatcatccgggtggaggagctgtgccccttccccctggacagcctgcagcaggagatgagcaagtacaagcacgtgaaggaccacatctggagccaggaggagccccagaacatgggcccctggagctttgtgagccccaggtttgagaagcagctggcctgcaagctgcggctggtgggccggccccccctgcctgtgcctgctgtgggcatcggcaccgtgcacctgcaccagcacgaggacatcctggccaagacctttgcctag

SEQ ID NO: 199778 - DNA, 486 bp, Artificial Sequence
  derived and/or modified sequence
ggccggcagcagagccggcaggatggagactacagcccagacaacagcgcccagcccggggacagagtcatctgcctgcaggtgcatggagatgccagcttctgtggccagggcatcgtgcctgagaccttcaccctgagcaacctgccccacttccgcatcggcggctctgtgcacctgattgtgaacaaccagctgggctacaccaccccagctgagcggggccgcagcagcctgtactgcagcgacatcggcaagctggtgggctgtgccatcatccacgtgaatggagacagccctgaggaggtggtgcgggccacccggctggcctttgagtaccagaggcagttcaggaaggatgtgatcatcgacctgctgtgctaccggcagtggggccacaatgagctggatgagcccttctacaccaaccccatcatgtacaagatcatccgctacaactacaagcccctgtgtgacatgccctag

SEQ ID NO: 199779 - DNA, 927 bp, Artificial Sequence
  derived and/or modified sequence
atggccagcgccacagctgctgctgcccggcggggcctgggccgggccctgcccctcttctggaggggctaccagacagagcggggcgtgtatggctaccggcccaggaagccagagagccgggagccccagggcgccctggagcggccccctgtggaccacggcctggcccggctggtgacagtgtactgtgagcacggccacaaggccgccaagatcaaccccctcttcaccggccaggccctgctggagaatgtgcctgagatccaggccctggtgcagaccctgcagggccccttccacacagctggcctgctgaacatgggcaaggaggaggccagcctggaggaggtgctggtgtacctgaaccagatctactgcggccagatcagcattgagaccagccagctgcagagccaggatgagaaggactggtttgccaagagatttgaggagctgcagaaggagaccttcaccacagaggagaggaagcacctgagcaagctgatgctggagagccagctgatgttcaggaagatgaggggcctgtctgagttccctgagaacttcagcgccactggagatgtgctgagccacctgaccagctctgtggacctgtactttggagcccaccaccccctgcacgtgaccatgctgcccaaccccagccacctggaggccgtgaaccctgtggccgtgggcaagacccggggccggcagcagagccggcaggatggagactacagcccagacaacagcgcccagcccggggacagagtcatctgcctgcaggtgcatggagatgccagcttctgtggccagggcatcgtgcctgagaccttcaccctgagcaacctgccccacttcagaattggaggctctgtgcacctgattgtgaacaaccagctgggctacaccaccccctag

SEQ ID NO: 199780 - DNA, 645 bp, Artificial Sequence
  derived and/or modified sequence
tgaaaaatcatccgggccaggaagagcatcccagacacctatgcagagcacctgattgctgggggcctgatgacccaggaggaggtgtctgagatcaagagcagctactatgccaagctgaatgaccacctgaacaacatggcccactaccggcccccagccctgaacctgcaggcccactggcagggcctggcccagcctgaggcccagatcaccacctggagcactggagtgcccctggacctgctgcgctttgtgggcatgaagtctgtggaggtgccccgggagctgcagatgcacagccacctgctgaagacccacgtgcagagcaggatggagaagatgatggatggcatcaagctggactgggccacagctgaggccctggccctgggcagcctgctggcccagggcttcaacgtgcggctgagcggccaggatgtgggccggggcaccttcagccagagacatgccatcgtggtgtgccaggagacagatgacacctacatccccctgaaccacatggaccccaaccagaagggcttcctggaggagcggcccagcggcagctacaaggccgccagcagcagcagcttccacatggccaccatgggcctgggccagaccacccaccctgtggagtag

SEQ ID NO: 199781 - DNA, 2760 bp, Artificial Sequence
  derived and/or modified sequence
atggccagcgccaccgccgccgccgcccggcggggcctgggccgggctttaccgcttttttggcgcgggtaccagacggaaagaggcgtttatggctacagaccacggaaaccagagtcgcgcgagccacaaggcgcactggagaggcccccggtcgaccacggacttgcaaggcttgtgactgtctactgcgaacacggacataaagctgccaagataaatccgctgttcacaggccaggcgttactggaaaatgtgcctgagatccaggcccttgttcaaacactgcaggggcccttccacaccgccggattgctcaatatggggaaggaagaggcttctctggaggaggtcctggtgtatctgaatcagatctattgcggccaaataagcatcgaaaccagtcagttgcaaagccaggacgagaaagattggttcgccaagcgattcgaggagcttcagaaagaaaccttcaccaccgaggaacgaaaacatctctcaaaattgatgctggaatcacaagagttcgatcacttcctcgccaccaagttctctaccgtgaaacggtatggcggcgaaggcgccgaatcaatgatgggctttttccatgaactgctgaaaatgagcgcttattccggcattactgacgtcatcatcggcatgccccaccgcggtaggctcaaccttctgaccggcctgcttcagtttccccctgaacttatgtttcgtaagatgcgcggattgagtgagtttcctgaaaatttcagtgccacaggcgacgtgctgtcccacttaaccagctccgttgatctgtatttcggtgctcaccatcccctacatgtgaccatgctgcccaacccttcccacctggaggccgtcaacccggtcgctgtgggaaaaacgcgcgggcgccaacagagtcggcaggatggcgattacagtccagacaattcggcccagcccggagatcgagtgatctgtctgcaggtgcatggcgacgcctcgttttgtggacagggcatcgtccctgagacttttactctgagcaacctgccacactttcggatcgggggcagcgtccatctcatcgttaacaaccagttgggatacaccaccccagccgagcgggggcgatccagtttgtattgcagcgacattgggaaactggtcgggtgtgccataattcacgtgaacggagactctccagaagaggtagtacgagccacccgactggcatttgaataccagcgacagtttaggaaggacgttatcatagacttgctgtgctacagacagtgggggcataatgagttggacgagcctttctacaccaacccaattatgtacaaaatcattcgcgctcggaaaagcattcccgatacgtatgctgagcacctcatcgccgggggattgatgactcaggaggaggtgtcagagatcaaatcaagttactacgctaaactgaatgatcatctgaacaatatggcccattaccgtcctccagccctgaatctacaggcccattggcagggtctggcacagcccgaagctcagatcacaacctggtccacgggtgtgcctctggacctgctgcgctttgtaggcatgaagtcagtcgaggtaccaagggagctccagatgcactcacatctgctgaagacccatgtccagtctcgtatggaaaaaatgatggatgggattaagctggattgggctaccgctgaggccctggctctgggaagcctgcttgcgcagggttttaacgtcaggctcagcggccaggacgtgggaaggggcacgttcagccagagacacgccatcgtagtttgtcaggaaaccgatgacacatacatccctctgaaccacatggacccgaatcagaaagggtttttggaggtctcaaacagtcctctttcagaggaagccgtgctcgggttcgaatacggtatgtctatcgaatctccaaagttgctacctttgtgggaagcccagttcggagacttctttaacggggcgcagatcatcttcgacactttcatcagcggcggggaagcgaagtggttactgcaatcaggaattgtcatcctgctgccacatggctacgatggcgctggacctgatcacagttcttgtaggatcgagagattcttgcagatgtgcgatagtgccgaggaaggagtggatggagatacagttaacatgtttgtggtacatcctactacaccagcccaatactttcacttactgcgcagacaaatggtgagaaacttccgaaaaccgctcatcgtagcctctcccaagatgctattaaggctcccggcagcagtgtccactttacaggagatggctcccggaacgacctttaatccagtcatcggtgactcttcagtcgaccctaagaaggtgaagactttagtgttttgcagcggcaagcacttctacagcctggtgaaacaaagggagtcgcttggagcaaagaagcacgacttcgctattatcagggtggaagagctttgtcctttcccccttgactccctccaacaggagatgtccaagtataaacatgtgaaggaccacatctggtcgcaagaagagccccagaacatggggccctggtccttcgtttccccaaggttcgaaaagcagctcgcatgtaaactgagactggtgggcagaccaccactcccagttcctgccgttggcatcggaactgtgcacctccatcagcatgaagacatcctagcaaagaccttcgcatag

SEQ ID NO: 199782 - DNA, 486 bp, Artificial Sequence
  derived and/or modified sequence
ggccggcagcagagccggcaggacggcgactacagccccgacaacagcgcacagcctggcgatagagtgatatgcctgcaagtccacggtgatgccagtttttgtggtcaggggatcgtgcctgaaacgttcaccctctctaacctgcctcacttcagaatcggaggctcagtccatctgattgtcaacaatcaactgggttacaccacacccgcagagaggggtcgcagcagtctgtattgttctgacatcggcaagctcgtgggctgtgctatcatccatgtcaatggtgattctcccgaggaagtcgtgcgtgcaactaggctcgcatttgagtaccagcgtcagttccggaaggacgttattattgaccttctctgttacaggcagtggggtcacaatgagcttgacgagccattctacaccaacccaataatgtacaaaatcatccgatataattacaagcctctttgcgacatgccctag

SEQ ID NO: 199783 - DNA, 927 bp, Artificial Sequence
  derived and/or modified sequence
atggccagcgccaccgccgccgccgcccggcggggcctgggccgggctctgccactcttctggcgaggttaccagacagaacgcggcgtttatggataccgacctcgtaaacccgagtcacgggagcctcagggggcactggagcgccctcccgtggatcatggtttagctaggttggtcaccgtgtattgtgagcacggtcataaagccgccaagattaaccctctctttactggccaggcgctcctcgagaacgtgccagagatccaggcactggtacagactttgcagggacctttccataccgcggggctgctcaatatggggaaggaggaggcctctctggaggaggtattggtttacttgaatcagatctattgtggacagatcagcatcgagacttctcagcttcagtcccaggatgagaaggattggttcgcaaaaagattcgaggaactgcagaaagaaacctttactacagaggaacgaaaacatctctctaaactgatgctggagtcgcagcttatgtttaggaagatgcgtggcctaagcgagttccccgaaaatttttctgccaccggggacgtgctttcccatctcacttcttcagtggacctgtatttcggcgcacaccacccacttcatgttactatgctgccaaacccctctcacctagaggcagtgaatcccgttgccgtggggaaaacccgcggccggcagcagagtcgacaggacggtgattattctcccgataactccgcccagccaggggacagggtgatatgtctgcaggtgcacggggacgcgtcattttgcgggcaaggcatcgtgcctgaaactttcacactctctaacttgcctcattttcgcatcggcggctctgtgcatctgattgttaacaaccaacttggttacacaaccccctag

SEQ ID NO: 199784 - DNA, 645 bp, Artificial Sequence
  derived and/or modified sequence
tgaaagatcatccgggcccggaagagcatccccgacacctacgccgaacacctgatagccggcggcctcatgacacaggaggaagtcagtgaaattaaatctagctattacgctaaactaaatgatcacttgaataatatggcgcactaccgcccacctgcacttaatctccaggcccactggcagggactagcccagcccgaggctcagataaccacgtggtccacaggcgtgccactcgatctgctgcgctttgttggcatgaaatccgtggaggtacctcgcgagctgcaaatgcactctcacctgttgaaaacacatgtgcaatcccggatggaaaagatgatggatgggataaagctcgactgggccacagccgaggcgctggctctgggcagccttttagcacagggatttaacgttcgtctcagcggccaagacgtaggacgagggacctttagccaaaggcacgcgattgtggtttgtcaagaaacggatgacacctacatcccgctgaaccatatggatcctaaccagaaggggttccttgaagagaggccctccggaagttacaaagcggcttcttcatcatcttttcatatggcgaccatgggcctcggccagacaacgcatcccgttgaatag

SEQ ID NO: 199785 - DNA, 2760 bp, Artificial Sequence
  derived and/or modified sequence
atggcttcagctacagctgcagccgctcgacggggtcttggtcgcgctctgccattattctggagaggataccaaaccgagagaggcgtgtatgggtatcgtcccagaaagcccgagagcagagagccgcaaggcgcactggagaggccccctgttgaccatggcctggctcggctggtcacagtgtattgcgaacacggccacaaggctgccaaaattaatcctctgttcactggacaggccctgttagaaaacgtcccggagattcaggcgctggttcaaacccttcaaggcccattccacacagctggactgctcaatatggggaaagaggaggcctccctggaggaagtactcgtgtatctgaaccagatttactgtggacagattagtattgaaacttcccagctgcagtctcaagacgaaaaggactggttcgcaaaaagatttgaggagctgcagaaagaaacctttacgaccgaggagcgtaaacacttatccaagcttatgcttgagagtcaagagtttgaccatttcctggctacgaaatttagtacggtgaaaaggtacggcggagagggtgccgaatctatgatgggattcttccatgagctcctcaagatgagcgcatattctggcatcaccgatgtgattattggcatgcctcatcggggtagacttaatctgttaaccggcctcttgcagttccctcccgagcttatgttcaggaaaatgcggggactcagcgagtttcccgagaattttagcgccaccggagacgttcttagtcatctgaccagttcagtagacctctattttggagcccaccatcctttgcatgtcaccatgttaccaaacccaagccatctggaagctgtcaaccccgttgcggtcggaaagacacgcggacgtcagcaaagccggcaggacggcgactactccccagataattcagctcaacccggagaccgtgtaatctgtctgcaagtgcatggcgatgcaagcttttgtggacaagggatcgtaccagagaccttcaccctgagcaacttgccccactttagaatcggcggaagtgttcatctcatagttaacaatcagttaggttacactaccccggctgaacggggacgctcatctctatattgcagtgacatagggaagcttgtcggctgcgcaatcattcatgttaacggcgattcgcctgaggaagtagttcgcgcaacacgattggctttcgagtaccagaggcagtttcgaaaggatgtgattatcgatctactgtgctatagacagtggggccacaacgagctggacgagccattttataccaaccccatcatgtataagattattagggctcggaagagcattcctgatacttacgcagaacacctaatagccggaggactaatgactcaggaagaagtgtcggaaataaagtcaagttattacgctaagcttaacgatcatctgaacaacatggctcattatcgcccaccggctctgaatctgcaggcacactggcaggggctggctcaaccagaggctcagatcacgacttggagcaccggagtccccctggatcttcttagatttgtcggtatgaagtccgttgaagttccgcgagaacttcagatgcatagccacttactcaaaactcacgtacaatctaggatggaaaagatgatggatggaataaaactcgactgggcaactgcagaagcactggccctgggaagtctgcttgctcagggctttaacgttaggctgtcgggccaggatgtggggagaggaaccttttcacaacggcatgccatcgtggtatgccaggagacagatgacacctatataccactcaatcatatggatcccaaccagaagggttttctcgaggtatccaacagccctcttagtgaggaagccgtgctgggcttcgaatatggtatgagcatcgagagcccgaagctcctgccattatgggaggcacagtttggtgatttcttcaacggcgcacagatcattttcgatacttttatcagcggtggtgaagcaaagtggttactgcagtccggcattgtgattctgcttccacacggatacgacggagccggacccgatcactcttcctgcagaattgaacgctttctgcaaatgtgcgactctgctgaggagggcgtggacggcgatacagtgaatatgttcgtagtccaccctaccacccccgcacagtatttccaccttctgcggcgacaaatggtcaggaatttccggaaacctctgatcgtcgcatccccgaagatgctgctccggctgcctgccgcagtcagcacacttcaggaaatggcaccaggcacaaccttcaacccagtgatcggggatagctcagtcgatcctaaaaaggtaaagactcttgtgttctgttctggaaaacacttctacagcctggtgaaacaacgagagtcgctcggcgctaagaagcacgatttcgctattattcgggtggaggagctctgtcccttccccttggactccttgcaacaagaaatgtctaaatataagcatgtgaaggatcacatttggagccaggaagaaccacagaacatgggaccgtggagcttcgtaagccctagatttgagaagcaactcgcctgtaagttgcggctggttggtcggccaccccttcctgttcctgccgtgggcattgggaccgtccaccttcaccagcacgaagacatactggcaaagacattcgcttag

SEQ ID NO: 199786 - DNA, 486 bp, Artificial Sequence
  derived and/or modified sequence
ggccgacagcaatcaaggcaagacggtgactactcacccgataactccgcccagcctggcgatcgcgttatctgtctgcaggtccacggcgacgccagtttttgcggtcaggggattgtgccggaaacttttacattgtcaaacctccctcattttcgaatcggcggatctgtgcacctcattgtgaacaaccagctgggatacaccacacctgcggagcgcggaaggtccagcctatattgctcagacattggaaaattagtgggatgtgccataattcacgttaatggggattctcctgaggaagtggtgagagccacgaggctggccttcgagtaccaacggcagtttcgtaaagacgtgattatcgatctactgtgctaccgtcagtgggggcacaacgagctcgatgagccattctacacgaacccaatcatgtataaaattatcaggtacaattacaaaccattgtgcgacatgccatag

SEQ ID NO: 199787 - DNA, 927 bp, Artificial Sequence
  derived and/or modified sequence
atggcttcggccaccgctgctgctgctagacggggactaggcagggcattgcctctgttctggaggggatatcagacagagcggggagtgtacgggtaccgacccaggaagcctgagtcaagagagccccagggcgctctggaacggccaccagtggaccacggcctggccagactggtgactgtttattgtgagcatggccataaagccgctaagattaatcctctgttcaccgggcaggccttactggagaatgttcccgaaatccaggccttagtgcagacactgcaggggccttttcatactgccggactgctgaatatgggcaaggaggaagcttcgcttgaggaggttctggtttacctcaaccagatatattgtggccagattagcattgagacaagccagctgcagtcacaagacgagaaggactggttcgctaagcgattcgaagaactgcagaaggagacatttacgactgaggaacggaagcaccttagcaaactcatgctggagtctcagttgatgttcagaaaaatgcgtggtctgagcgaatttcccgaaaattttagtgctacgggggacgtgctttcccatctgacatcaagcgtagacctctactttggagcccatcacccactgcatgtgacaatgctccctaacccctctcacttggaagccgtaaacccagtggcagtgggaaaaacaaggggccgacaacagtctagacaggacggcgattatagtccagataattcagcccagccaggagacagggttatatgcctgcaagttcacggcgacgcttctttctgtggtcaggggatcgtgccggagacctttactctgtctaaccttccgcactttcgcatcggtggttctgtacatctcatcgtgaacaaccagctgggctacaccaccccttag

SEQ ID NO: 199788 - DNA, 645 bp, Artificial Sequence
  derived and/or modified sequence
tgaaaaatcattcgggcacggaaaagcatccccgatacatacgcagagcacctgatcgcaggtggcctcatgactcaggaagaagtgagcgagattaagtcatcctattacgccaagttaaatgaccatttgaataacatggcccactacagacccccagcactcaacttacaagcgcactggcaagggcttgcacagcccgaggcacagattaccacttggtcaaccggcgttccattggatctcttgcggttcgtgggaatgaagagcgtggaggttcccagagaactgcagatgcattcccacttgctgaagacccatgttcaatcaaggatggaaaagatgatggatggaatcaagctggattgggccaccgccgaagcacttgctctcgggtctctgttggctcaaggcttcaacgtcaggctttctggccaggacgtcgggagagggacattttcacaacggcatgctattgtcgtgtgtcaggaaaccgacgacacctatattcccctgaaccacatggacccaaaccagaaaggttttcttgaagagcgaccttctggaagctataaggccgcaagtagttcttcatttcacatggcgactatgggcctgggacagacgacacaccctgtggaatag

SEQ ID NO: 199789 - protein, 669 aa, Artificial Sequence
  derived and/or modified sequence
MDLRTAVYNAARDGKLQLLQKLLSGRSREELDELTGEVAGGGTPLLIAARYGHLDVVEYLVDRCGASVEAGGSVHFDGETIEGAPPLWAASAAGHLDVVRSLLRRGASVNRTTRTNSTPLRAACFDGHLEVVRYLVGEHQADLEVANRHGHTCLMISCYKGHREIARYLLEQGAQVNRRSAKGNTALHDCAESGSLEILQLLLGCKARMERDGYGMTPLLAASVTGHTNIVEYLIQEQPGQEQVAGGEAQPGLPQEDPSTSQGCAQPQGAPCCSSSPEEPLNGESYESCCPTSREAAVEALELLGATYVDKKRDLLGALKHWRRAMELRHQGGEYLPKPEPPQLVLAYDYSREVNTTEELEALITDPDEMRMQALLIRERILGPSHPDTSYYIRYRGAVYADSGNFERCIRLWKYALDMQQSNLEPLSPMTASSFLSFAELFSYVLQDRAAKGSLGTQIGFADLMGVLTKGVREVERALQLPREPGDSAQFTKALAIILHLLYLLEKVECTPSQEHLKHQTVYRLLKCAPRGKNGFTPLHMAVDKDTTNVGRYPVGRFPSLHVVKVLLDCGADPDSRDFDNNTPLHIAAQNNCPAIMNALIEAGAHMDATNAFKKTAYELLDEKLLARGTMQPFNYVTLQCLAARALDKNKIPYKGFIPEDLEAFIELH

SEQ ID NO: 199790 - DNA, 2007 bp, Artificial Sequence
  derived and/or modified sequence
acagcagggattttgacaacaacaccccgctacacatagcagcccagaacaactgcccggccatcatgaatgccctgatcgaagcaggggcccacatggacgccaccaatgccttcaagaagacggcctacgagctgctggacgagaagctgctggccaggggtaccatgcagcccttcaactacgtgaccctgcagtgccttgcggcccgggccctggataagaacaagatcccttacaagggcttcatcccggaagatctggaggcgttcatcgaactgcactgacctgcccagaacgcctgcaccctcacctctcccctctcctgctgagatgggggaaatccggctgcggcatagcagatgctcgttcttgcctccttcaggcaccaatcaggagaagggttctgcctcccatcccctctacctgcagacagggtcggaggtgttagcgagcctttggtgctagaagcctgcggggtcatgtgctaagaggacagtctttctccgggagcccgctcactcattctgagttaggaaaagacacaagaccttccccacatcctgtctgcctgggttagggaggcctttgccttgttacctagaggcggagggactgaagccattgcgttccttccctgctagaaacacaggaagaagttgaggacggtctgccttttctcgtccctttacctggccagataactccagccgctgaatacagtgttaggactgggggctcctgagatgagagtttgagattcagggaatgagaccacctctcatttcttccagcatgatcgcgccctgctcccgtgccaccgtagtccctggcagacaggcagggctctgcccagggcagcctgccacttgcatagctttcggttggtttggtgttctgtttatttaataagtgggcaggttgcaagcgttgcacagaaattctgagattttactgcctttttttttttttttttaagaaagttgtttgttggactccataagtgaatttcaagcagtgaggattttgtggtgcctgagatggccgagggcacagggagtgagctgtatgtgtgaggaatttggtgagcgagataaaagtccacggtgtcaacccctaaaacatgggtgaccgtacatttttatacatctccactctacggccttttacaggctttccgattttacaggcctttccaagtttccattctccttagagagagaactgtgcttccaaacagaaatcaggagtgaccacaaagcctgaaaacactttgccacccagcaaagaactggcacaattggtttgggtctgcattgccatagtgcccgagttaaaactgcaggccactctgccttgcaaacctcacgtggcctctgatttcattgtgggtgcatccacaggtggcccgagctgttctttcagctgctccaaggattgagacccaagtcatcatgaaaaaggcccaagtacagtcttaatgcgataaatccactagctaagacgtcgagtgccaagaccagccttccagccgaggtttggacaaagtctcaggttcccgtgactcagggtaaggtgctggggctgccagaggacctgccccagcaagattttttgtcaagagcgagactccatcagcccaggcagacgggagcaggttcttggccagcgtagacagcagcaaacagcagcagggaagccattctcactgcatcctccctgcagtagccacggccaggcccttaggaggagcagtgaccgggggtgtccagaaatatcctgtccctggatggaaactaggtctcgtttggattttttttttttttttgccgtgttaggaaattatttattaatttacaagacaggttttaactcagccgaggtgggaaatggtgtccctgtccctcccaaagcacagagcacagaaatgaggccgtttacatggcgagtctccgtgctggtgtttaagtcattaaaaagatactcaaagaaaaaaaaaaaaaaaaa

SEQ ID NO: 199791 - DNA, 2010 bp, Artificial Sequence
  derived and/or modified sequence
atggatctgaggaccgccgtgtataatgccgcccgggacggtaagctacaattgcttcagaagcttctcagcgggagatcacgcgaagagttagatgagttaactggcgaggtggccgggggaggcacacccctgctgatcgccgcccgctacgggcacctggatgtcgtggaatatctggtggaccgctgcggggcttccgtcgaggcaggcggttctgtccatttcgacggcgaaaccatagaaggggccccacccctgtgggccgcatccgccgccggtcacctagacgttgtgagatctctcctgagaaggggcgcctccgtgaacaggactacgcgtaccaattccacccccctgagggccgcctgctttgacggccatctagaggtcgttaggtacctggttggggaacaccaggctgacctcgaagtcgccaatagacacggacacacctgtttgatgattagctgctacaaaggtcaccgggaaatcgctcgctacctgctagaacagggtgcacaggtaaatagaagatcggctaaggggaatacggcactacacgattgcgcagaatccggctctctggagattctccagctgctgctggggtgtaaagctagaatggaacgggatggatacggaatgaccccccttctcgcagcaagtgtgactgggcacaccaacatcgttgagtatctaattcaagagcagcctgggcaggagcaggtcgccgggggcgaggctcaacccggcctgccacaagaagacccatccaccagccagggatgtgcccagccacaaggagccccatgctgcagttcatccccggaggagcccctgaatggagagtcttatgaatcctgttgcccaaccagtcgtgaggcggcagttgaagccctggaactgttgggagccacttacgttgataagaagcgcgatctccttggggcactaaagcactggagacgtgccatggagctgagacatcaagggggagaatatctgccaaagccagagccaccccaactggtcttggcttatgattattctagagaagtcaataccacagaggaactcgaagcactgattactgatccagacgagatgcgcatgcaggcccttctcattcgtgagcgaatcctcgggcctagccatccggatacgtcgtactatatccggtatcgaggtgctgtctatgcggattcggggaattttgaaaggtgtatccgcctgtggaaatacgccttggatatgcagcagtcgaatctggagcccctaagccctatgactgccagctcgttcctctccttcgcagaactgttctcctatgtgctccaggatcgcgccgccaagggctctcttggcactcaaattggtttcgcagaccttatgggcgtgctcaccaagggcgtgagggaagtcgagagagccctgcagctaccccgggagcccggtgatagtgcccagttcacaaaagctctcgccataatcctccatctcctctacctcctggagaaggtcgagtgtacaccctctcaagagcacctgaaacaccagaccgtataccgactgctcaaatgcgcccctcggggcaaaaacggctttacccctctacacatggccgtggacaaagacacaacgaatgttggacggtatcccgtgggacggtttccatcgctgcatgtcgtcaaagtcttgctagactgtggagccgacccagacagccgggattttgataacaacacccccctgcacatcgcagcccagaataactgtcctgccattatgaacgcactcatcgaagcaggagctcacatggatgcaaccaatgccttcaagaagactgcctatgagttgctggatgagaaactgctcgcccgaggaacgatgcagccgtttaattatgtgacccttcagtgtctggcagcccgggctttagacaaaaataagattccctacaaagggtttattcccgaggacttggaggctttcatcgaacttcactag

SEQ ID NO: 199792 - DNA, 2010 bp, Artificial Sequence
  derived and/or modified sequence
atggacctgaggacagctgtgtacaatgctgccagagatggcaagctgcagctgctgcagaagctgctgagcggccgcagccgggaggagctggatgagctgactggagaggtggccggcggcggcacccccctgctgattgctgcccgctatggccacctggatgtggtggagtacctggtggacagatgtggggcctctgtggaggccggcggctctgtgcactttgatggagagaccattgaaggagccccacccctgtgggccgccagcgctgctggccacctggatgtggtgcgcagcctgctgcggcggggggcctctgtgaacagaaccaccaggaccaacagcacccccctgcgggccgcctgctttgatggccacctggaggtggtgcgctacctggtgggggagcaccaggccgacctggaggtggccaacagacatggccacacctgcctgatgatcagctgctacaagggccaccgggagatcgcccgctacctgctggagcagggcgcccaggtgaacagaagaagtgccaagggcaacacagccctgcatgactgtgccgagagcggcagcctggagatcctgcagctgctgctgggctgcaaggccaggatggagagagatggctacggcatgacccccctgctggccgcctctgtgacaggccacaccaacatcgtggagtacctgatccaggagcagcccggccaggagcaggtggccggcggggaggcccagcccggcctgccccaggaggaccccagcaccagccagggctgtgcccagccccagggcgccccctgctgcagcagcagccctgaggagcccctgaatggagagagctatgagagctgctgccccaccagccgggaggccgctgtggaggccctggagctgctgggcgccacctacgtggacaagaagagggacctgctgggcgccctgaagcactggaggcgggccatggagctgcggcaccagggcggggagtacctgcccaagccagagcccccccagctggtgctggcctatgactacagccgggaggtgaacaccacagaggagctggaggccctgatcacagatcctgatgagatgaggatgcaggccctgctgatccgggagcgcatcctgggccccagccacccagacaccagctactacatccgctacagaggagctgtgtatgctgacagcggcaactttgagcgctgcatccggctgtggaagtatgccctggacatgcagcagagcaacctggagcccctgagccccatgacagccagcagcttcctgagctttgctgagctgttctcctatgtgctgcaggaccgggccgccaagggcagcctgggcacccagattggatttgctgacctgatgggcgtgctgaccaagggcgtgcgggaggtggagcgggccctgcagctgccccgggagcccggggacagcgcccagttcaccaaggccctggccatcatcctgcacctgctgtacctgctggagaaggtggagtgcacccccagccaggagcacctgaagcaccagacagtgtaccgcctgctgaagtgtgccccccggggcaagaatggcttcacccccctgcacatggctgtggacaaggacaccaccaacgtgggccgctaccctgtgggccgcttccccagcctgcacgtggtgaaggtgctgctggactgtggggctgaccctgacagccgggactttgacaacaacacccccctgcacatcgccgcccagaacaactgcccagccatcatgaatgccctgattgaagctggggcccacatggatgccaccaatgccttcaagaagacagcctatgagctgctggatgagaagctgctggcccggggcaccatgcagcccttcaactacgtgaccctgcagtgcctggccgcccgggccctggacaagaacaagatcccctacaagggcttcatccctgaggacctggaggccttcatcgagctgcactag

SEQ ID NO: 199793 - DNA, 2010 bp, Artificial Sequence
  derived and/or modified sequence
atggacctgcggaccgccgtgtacaacgccgcccgggacggcaagctgcagttactccagaagcttctatctggacgttctcgggaagaattggatgagctgacaggcgaggtagccggaggcggcacaccactgcttatcgctgcgcggtacggccacctggatgtcgtagagtatctggtcgatagatgcggcgcttctgtggaagccggggggtctgtacacttcgacggggagacgattgagggcgcacccccactatgggccgcttccgctgctggacacctggatgtcgtgcggagcctgttaagacggggcgcaagcgtaaaccgcacgacccgaacaaattccacaccattgagggcagcgtgctttgacggtcatttggaagtggtgaggtacttggtgggcgagcatcaggctgatctggaagtggcgaatcggcatggacacacgtgcttgatgatttcctgttataaggggcaccgggaaatcgctcgctatctgctagagcagggagcacaggttaatcggagaagtgccaagggcaacacagccctgcacgactgtgcggaatcaggatcattagaaatccttcagcttttactgggctgtaaagcacggatggaacgcgatgggtacggaatgaccccactgcttgccgcatccgtgaccggccacaccaatatagtggagtacctaattcaggagcagccagggcaggagcaggtggcaggtggagaagctcagcctggactcccacaagaggatccctcaacatcccaggggtgcgcgcagccccagggagctccatgttgctctagcagccccgaggagcctctgaacggcgagagttacgagagctgctgccccacaagccgggaggctgccgtggaagcactggagctcctcggcgctacgtacgtggataagaaaagggatttattgggagcactcaaacactggagacgcgcaatggagctgagacaccaaggcggggagtatctgccaaagcccgaaccaccacagctggtgctcgcatatgactactctcgtgaagttaacactacagaagaactagaagcactgattactgatccagatgaaatgcgcatgcaggcactgctgatacgtgagagaatcctgggcccaagccatcctgatactagttattatatccgctaccggggcgcagtgtatgctgactccggcaacttcgagagatgtatccgactctggaagtacgccttggacatgcaacaaagtaacctggaacctctatctcccatgaccgcttcatcttttttaagtttcgcggagctattttcgtacgtgctccaggacagagctgcaaaaggaagtctaggcacccagattggctttgccgatcttatgggggtattaactaaaggggtgagagaagtcgaacgtgccctccagctgccgagagaaccaggtgacagcgctcagtttacgaaagccctcgccataattttgcacctgctctacctgttagaaaaagtcgagtgtacgccaagccaagaacacctgaaacaccaaactgtgtacaggttgctgaagtgtgccccgcgcggaaagaacgggttcacccctcttcatatggcagtcgataaggatactacgaatgtcggccggtaccctgtgggccgattcccctctctccacgtggtaaaggttctgctggattgcggtgcggaccccgactcccgcgattttgataataacaccccgctgcacatcgccgcccagaataattgtccagccatcatgaatgcgttgattgaggccggggcccacatggatgccacaaatgctttcaaaaagacggcttacgagctgctggacgagaagttgctggcgcgggggactatgcagcctttcaattacgtaactctccagtgtctggccgccagggccctggacaaaaataaaatcccatacaagggcttcatcccagaggacctggaggccttcatagaactccactag

SEQ ID NO: 199794 - DNA, 2010 bp, Artificial Sequence
  derived and/or modified sequence
atggacctgcggaccgctgtgtacaacgcagcccgagatgggaagcttcagcttctccagaagttgttgagcgggcgttcacgtgaagagcttgatgaacttaccggcgaggtcgctggagggggaactccactactcatagccgcaaggtacggccatctggatgtggtggaatacttagtggataggtgcggcgcaagcgtagaagctgggggatccgtgcacttcgacggagagacaattgagggcgctcctccactctgggctgcctccgcagcgggacacctcgatgtagtgcggtccctgctgcgccgaggggcaagcgttaatcgcaccacgcgcaccaacagcacgccactgcgcgctgcctgtttcgatgggcacctagaggtcgtgcggtatcttgtgggcgaacaccaagccgacctggaggtcgccaatcgtcatgggcacacgtgcctcatgatctcatgctacaaagggcaccgagagatcgcacgatatttattagaacaaggggcacaggttaaccgacgatccgccaaaggcaataccgccctgcacgactgcgctgaaagcggaagtcttgagatcctgcagttactgctcgggtgtaaggcgcgtatggaacgagatggctacggaatgacacctctacttgctgcctctgtcaccggccacaccaatatcgtggagtacctgatacaggaacagcccggtcaggagcaggtggctggcggagaggcgcagcctgggctgccccaggaagatccatcaacatcccagggttgcgcccagccacaaggggctccttgctgttcctcctcaccagaggagccgctgaatggagaaagttacgaatcttgttgccctacaagccgggaggcagccgttgaagcgctggaactgctcggcgcaacctacgtcgacaagaagcgggaccttctgggagcacttaagcactggcgcagagcaatggaactgcgacaccaggggggagaatatctgccgaagcctgaacctccacagctggtactagcatacgactatagcagagaagtcaataccacagaggagctagaagcactgattactgatccagatgagatgcggatgcaggcactcctcatccgagaacgaatcctgggaccttcccatcccgacacctcgtattacatccgatacaggggtgcggtttacgcagactccggaaactttgagcgctgcatccgtctgtggaagtacgccctggacatgcagcaatctaacctcgagcccttgtctccaatgacagcgtccagcttcctctcttttgctgagctgtttagctacgtgctccaggatcgcgcagccaaggggtcactcgggacccagatcggcttcgctgacctgatgggcgtcctaacaaagggagtgcgggaggttgagcgtgccctgcagctgccacgtgagccaggggacagcgcccaattcactaaagcactggccataattcttcatctgctttatctcctagagaaagttgagtgcacacctagccaagaacatttgaagcatcagacagtctacagattactcaagtgtgctcctagagggaaaaatggctttactcccctgcacatggctgtggacaaagataccactaatgtgggacggtaccctgtgggaaggtttcctagcttacatgttgtgaaggttctgctggattgtggcgctgacccggattcgagggactttgacaataacacacctttacacatcgccgctcagaacaattgtccagccataatgaacgccctaatagaggctggggcacatatggacgctactaacgcgtttaagaagacagcatatgagctgctggatgaaaagttgttggctcgaggcaccatgcagcccttcaattatgtgacgcttcagtgtttggctgctcgcgctctggataagaacaaaataccttataagggattcattcctgaggacttggaggcttttattgagctacactag

SEQ ID NO: 199795 - DNA, 3844 bp, Artificial Sequence
  derived and/or modified sequence
agccattttgttccgcccgaggagaccctaagatggcggcgagggggacggtgaaggttgcctcccgcccgtccgggctctgatcctccgtctccccgtcccccggcggccggcccatggcctggcggaggcccgaaccatggacctccgcaccgccgtgtacaacgccgcccgtgatggcaagctgcagctgctccagaagctgctcagcggccggagccgggaggaactggacgagctgacgggcgaggtggccggcgggggaacgccgctactcatcgccgcccgctacggccacctggacgtggtggagtacctggtggaccggtgcggcgcgagcgtggaggccggtggctcggtgcacttcgatggcgagaccatcgagggcgcgccgccgctgtgggccgcctccgcagccggccacctggacgtggtgcggagcctgctgcgccgcggggcctcggtgaaccgcaccacgcgcaccaactccacgcctctccgcgccgcctgcttcgacggccacctggaggtggtgcgctacctggtcggcgagcaccaggccgacctggaggtggccaaccggcacggccacacgtgcctcatgatctcgtgctacaagggccaccgtgagatcgcccgctacctgctggagcagggcgcccaggtgaaccggcgcagcgccaagggcaacacggccctgcatgactgcgccgagtccggcagcctggagatcctgcagctgctgctggggtgcaaggcccgcatggaacgtgacggctacggcatgaccccgctgctcgcggccagcgtgacgggccacaccaacatcgtggagtacctcatccaggagcagcccggccaggagcaggtcgcagggggagaggctcagcctgggctgccccaagaagacccctccaccagccaggggtgtgcgcagcctcagggggctccgtgctgcagctcctccccagaggaaccactgaacggggaatcttacgaaagctgctgtcccaccagccgggaagctgccgtggaagccttggaattgctgggagctacgtatgtggataagaaacgagatctgcttggggcccttaaacactggaggcgggccatggagctgcgtcaccaggggggcgagtacctgcccaaaccggagcccccacagctggtcctggcctatgactattccagggaggtcaacaccaccgaggagctggaggcgctgatcaccgacccggatgagatgcgcatgcaggccctgttgatccgggagcgcatcctcggtccctcgcacccggacacttcctattacatccgttacaggggtgccgtgtacgccgactcgggcaatttcgagcgctgcatccgcttgtggaagtacgccctggacatgcaacagagcaacctggagcctctgagccccatgaccgccagcagcttcctctccttcgcggaactcttctcctacgtgcttcaggaccgggccgccaaaggcagcctgggcacccagatcggctttgcagacctcatgggggttctcaccaaaggggtccgggaagtggaacgggccctgcagctgcccagggagcccggagactcagcccagttcaccaaggcgctggccatcatcctccacctgctctacctgctggagaaagtggagtgcacccccagccaggagcacctgaagcaccagaccgtctaccgcctgctcaagtgcgcgcccaggggcaagaacggcttcacccctctgcacatggctgtggacaaggacaccacaaacgtgggccgctatcccgtgggcagattcccctccctgcacgtggtcaaagtgctgctcgactgcggggccgacccggacagcagggattttgacaacaacaccccgctacacatagcagcccagaacaactgcccggccatcatgaatgccctgatcgaagcaggggcccacatggacgccaccaatgccttcaagaagacggcctacgagctgctggacgagaagctgctggccaggggtaccatgcagcccttcaactacgtgaccctgcagtgccttgcggcccgggccctggataagaacaagatcccttacaagggcttcatcccggaagatctggaggcgttcatcgaactgcactgacctgcccagaacgcctgcaccctcacctctcccctctcctgctgagatgggggaaatccggctgcggcatagcagatgctcgttcttgcctccttcaggcaccaatcaggagaagggttctgcctcccatcccctctacctgcagacagggtcggaggtgttagcgagcctttggtgctagaagcctgcggggtcatgtgctaagaggacagtctttctccgggagcccgctcactcattctgagttaggaaaagacacaagaccttccccacatcctgtctgcctgggttagggaggcctttgccttgttacctagaggcggagggactgaagccattgcgttccttccctgctagaaacacaggaagaagttgaggactgtctgccttccctcgtccctttacctggccagataactccagccgctgaatacagtgttaggactgggggctcctgagatgagagtttgagattcagggaatgagaccacctctcatttcttccagcatgatcgcgccctgctcccgtgccaccgtagtccctggcagacaggcagggctctgcccagggcagcctgccacttgcatagctttcggttggtttggtgttctgtttatttaataagtgggcaggttgcaagcgttgcacagaaattctgagattttactgcctttttttttttttttaagaaagttgtttgttggactccataagtgaatttcaagcagtgaggattttgtggtgcctgagatggccgagggcacagggagtgagctgtatgtgtgaggaatttggtgagcgagataaaagtccacggtgtcaacccctaaaacatgggtgaccgtacatttttatacatctccactctacggccttttacaggctttccgattttacaggcctttccaagtttccattctccttagagagagaactgtgcttccaaacagaaatcaggagtgaccacaaagcctgaaaacactttgccacccagcaaagaactggcacaattggtttgggtctgcattgccatagtgcccgagttaaaactgcaggccactctgccttgcagtggcctctgatttcattgtgggtgcatccacaggtggcccgagctgttctttcagctgctccaaggattgagacccaagtcatcatgaaaaaggcccaagtacagtcttaatgcgataaatccactagctaagacgtcgagtgccaagaccagccttccagccgaggtttggacaaagtctcaggttcccgtgactcagggtaaggtgctggggctgccagaggacctgccccagcaagatttttgtcaagagcgagactccatcagcccaggcagacgggagcaggttcttggccagcgtagacagcagcaaacagcagcagggaagccattctcactgcatcctccctgcagtagccacggccaggcccttaggaggagcagtgaccgggggtgtccagaaatatcctgtccctggatggaaactaggtctcgtttggatttttttttttttttgccgtgttaggaaattatttattaatttacaagacaggttttaactcagccgaggtgggaaatggtgtccctgtccctcccaaagcacagagcacagaaatgaggccgtttacatggcgagtctccgtgctggtgtttaagtcattaaaaagatactcaaagagaa

SEQ ID NO: 199796 - DNA, 2010 bp, Artificial Sequence
  derived and/or modified sequence
atggacctgagaaccgccgtgtacaacgccgccagagacggcaagctgcagctgctgcagaagctgctgagcggcagaagcagagaggagctggacgagctgaccggcgaggtggccggcggcggcacccccctgctgatcgccgccagatacggccacctggacgtggtggagtacctggtggacagatgcggcgccagcgtggaggccggcggcagcgtgcacttcgacggcgagaccatcgagggcgccccccccctgtgggccgccagcgccgccggccacctggacgtggtgagaagcctgctgagaagaggcgccagcgtgaacagaaccaccagaaccaacagcacccccctgagagccgcctgcttcgacggccacctggaggtggtgagatacctggtgggcgagcaccaggccgacctggaggtggccaacagacacggccacacctgcctgatgatcagctgctacaagggccacagagagatcgccagatacctgctggagcagggcgcccaggtgaacagaagaagcgccaagggcaacaccgccctgcacgactgcgccgagagcggcagcctggagatcctgcagctgctgctgggctgcaaggccagaatggagagagacggctacggcatgacccccctgctggccgccagcgtgaccggccacaccaacatcgtggagtacctgatccaggagcagcccggccaggagcaggtggccggcggcgaggcccagcccggcctgccccaggaggaccccagcaccagccagggctgcgcccagccccagggcgccccctgctgcagcagcagccccgaggagcccctgaacggcgagagctacgagagctgctgccccaccagcagagaggccgccgtggaggccctggagctgctgggcgccacctacgtggacaagaagagagacctgctgggcgccctgaagcactggagaagagccatggagctgagacaccagggcggcgagtacctgcccaagcccgagcccccccagctggtgctggcctacgactacagcagagaggtgaacaccaccgaggagctggaggccctgatcaccgaccccgacgagatgagaatgcaggccctgctgatcagagagagaatcctgggccccagccaccccgacaccagctactacatcagatacagaggcgccgtgtacgccgacagcggcaacttcgagagatgcatcagactgtggaagtacgccctggacatgcagcagagcaacctggagcccctgagccccatgaccgccagcagcttcctgagcttcgccgagctgttcagctacgtgctgcaggacagagccgccaagggcagcctgggcacccagatcggcttcgccgacctgatgggcgtgctgaccaagggcgtgagagaggtggagagagccctgcagctgcccagagagcccggcgacagcgcccagttcaccaaggccctggccatcatcctgcacctgctgtacctgctggagaaggtggagtgcacccccagccaggagcacctgaagcaccagaccgtgtacagactgctgaagtgcgcccccagaggcaagaacggcttcacccccctgcacatggccgtggacaaggacaccaccaacgtgggcagataccccgtgggcagattccccagcctgcacgtggtgaaggtgctgctggactgcggcgccgaccccgacagcagagacttcgacaacaacacccccctgcacatcgccgcccagaacaactgccccgccatcatgaacgccctgatcgaggccggcgcccacatggacgccaccaacgccttcaagaagaccgcctacgagctgctggacgagaagctgctggccagaggcaccatgcagcccttcaactacgtgaccctgcagtgcctggccgccagagccctggacaagaacaagatcccctacaagggcttcatccccgaggacctggaggccttcatcgagctgcactag

SEQ ID NO: 199797 - protein, 257 aa, Artificial Sequence
  derived and/or modified sequence
MAADGVDERSPLLSASHSGNVTPTAPPYLQESSPRAELPPPYTAIASPDASGIPVINCRVCQSLINLDGKLHQHVVKCTVCNEATPIKNPPTGKKYVRCPCNCLLICKDTSRRIGCPRPNCRRIINLGPVMLISEEQPAQPALPIQPEGTRVVCGHCGNTFLWMELRFNTLAKCPHCKKISSVGSALPRRRCCAYITIGMICIFIGVGLTVGTPDFARRFRATYVSWAIAYLLGLICLIRACYWGAIRVSYPEHSFA

SEQ ID NO: 199798 - DNA, 774 bp, Artificial Sequence
  derived and/or modified sequence
atggccgccgacggcgtggacgagagaagccccctgctgagcgccagccacagcggcaacgtgacccccaccgcccccccctacctgcaggagagcagccccagagccgagctgccccccccctacaccgccatcgccagccccgacgccagcggcatccccgtgatcaactgcagagtgtgccagagcctgatcaacctggacggcaagctgcaccagcacgtggtgaagtgcaccgtgtgcaacgaggccacccccatcaagaacccccccaccggcaagaagtacgtgagatgcccctgcaactgcctgctgatctgcaaggacaccagcagaagaatcggctgccccagacccaactgcagaagaatcatcaacctgggccccgtgatgctgatcagcgaggagcagcccgcccagcccgccctgcccatccagcccgagggcaccagagtggtgtgcggccactgcggcaacaccttcctgtggatggagctgagattcaacaccctggccaagtgcccccactgcaagaagatcagcagcgtgggcagcgccctgcccagaagaagatgctgcgcctacatcaccatcggcatgatctgcatcttcatcggcgtgggcctgaccgtgggcacccccgacttcgccagaagattcagagccacctacgtgagctgggccatcgcctacctgctgggcctgatctgcctgatcagagcctgctactggggcgccatcagagtgagctaccccgagcacagcttcgcctag

SEQ ID NO: 199799 - DNA, 774 bp, Artificial Sequence
  derived and/or modified sequence
atggctgccgatggagtggatgagaggagccccctcctgagcgcctcccactccggtaacgtgacccccacggcgcctccctatctccaagagagctcacctagggcggagttaccgcctccctatacagccattgcctctccggatgccagcggtattccggtgatcaattgccgtgtgtgtcagtctcttataaatcttgacggtaaactacatcagcatgtcgtcaaatgtactgtgtgcaacgaggcgactccaattaagaacccaccgaccggaaagaaatatgttagatgcccctgtaactgtctgctcatttgcaaggacacctcaagacggatcggatgtccaagaccaaactgccgacgcatcatcaacttaggaccagtgatgcttatttctgaagagcagccagcccagcccgccttgcccatccagcccgaaggaacccgggtggtttgcggccattgcggtaatactttcttatggatggaactgcgttttaataccctggcaaagtgtccacattgcaagaaaatctcttccgtcgggtccgccctccctcgtcgacggtgctgtgcctacattacaattggcatgatatgtatattcatcggtgtcgggcttacggtgggcactcccgactttgctcggcgttttcgcgctacatatgtcagttgggctattgcctatctgctcgggctgatctgcctgatcagagcttgttactggggggcaatccgagtgtcataccctgagcattcctttgcatag

SEQ ID NO: 199800 - DNA, 774 bp, Artificial Sequence
  derived and/or modified sequence
atggctgctgatggagtggatgagaggagccccctgctgagcgccagccacagcggaaatgtgacccccacagccccaccctacctgcaggagagcagccccagggctgagctgcccccaccctacacagccatcgccagcccagatgccagcggcatccctgtgatcaactgccgggtgtgccagagcctcatcaacctggatggcaagctgcaccagcacgtggtgaagtgcaccgtgtgcaatgaggccacccccatcaagaacccccccaccgggaagaagtatgtgcgctgcccctgcaactgcctgctgatctgcaaggacaccagccgccgcatcggctgcccccggcccaactgccgccgcatcatcaacctgggccctgtgatgctgatcagcgaggagcagcctgcccagcctgccctgcccatccagcctgagggcaccagggtggtgtgtggccactgcggcaacaccttcctgtggatggagctgcgcttcaacaccctggccaagtgcccccactgcaagaagatcagctctgtgggcagcgccctgccccggcggcgctgctgtgcctacatcaccatcggcatgatctgcatcttcatcggcgtgggcctgactgtgggcaccccagactttgcccggcgcttccgggccacctacgtgtcctgggccatcgcctacctgctgggcctcatctgcctgatccgggcctgctactggggcgccatccgggtgtcctacccagagcacagctttgcctag

SEQ ID NO: 199801 - DNA, 774 bp, Artificial Sequence
  derived and/or modified sequence
atggccgccgacggcgtggacgagcggagccccctgctgagcgccagtcattccggcaatgtgactccaaccgctccaccatacctccaggagtcctctccaagggccgagctcccccccccgtataccgccatcgcgagccccgatgcttccggcatacccgtgataaactgtagggtctgtcagtctcttattaacttggatgggaaactgcaccagcatgtggtaaaatgcactgtgtgtaacgaggccacccctattaagaaccctccaactggcaagaagtatgttcgttgcccatgcaattgtctcctcatttgcaaagatacctctcgcagaatcggctgcccccggcccaattgtaggcggattattaatctcggtcccgtaatgctgatctctgaagagcagcctgctcagccagccctgccaattcaacccgaggggacaagggttgtttgcgggcattgcggaaataccttcctgtggatggaactgcgttttaacaccctggccaagtgcccgcattgtaaaaagatcagcagtgtcggttctgcgttgcctcgccgcaggtgttgtgcatacattacaataggcatgatatgtatcttcattggggtgggactaactgtcggaactccagatttcgccaggcgttttcgggcaacgtacgtgtcatgggctattgcttacctcctgggcttaatttgtcttatacgcgcatgttattggggggccattagagtcagctatcctgaacactctttcgcatag

SEQ ID NO: 199802 - DNA, 774 bp, Artificial Sequence
  derived and/or modified sequence
atggcagccgacggagtcgacgaacggagccctttgctgtccgccagccattctgggaacgtgacaccaacagccccaccctacctccaagaaagctcccccagagccgagttgcccccaccctatacggctattgcctcccctgacgcatcaggaattccggtgatcaattgtcgggtttgtcagtcactcataaatctagatggtaaactccaccaacacgttgtgaagtgtacggtgtgcaatgaggctacccccattaaaaacccgccaaccggcaaaaaatatgtgagatgtccttgtaattgcctactaatctgtaaggataccagcaggcgaattggatgccctaggcctaactgcaggcgaatcattaatctgggtcccgtgatgttaatctctgaggagcaacccgcacagcccgcactccccattcagccggaagggacacgtgttgtgtgcggccactgcggcaacacattcctgtggatggagctgagatttaatactctcgccaaatgtcctcactgtaagaagatatcttccgtcggatccgcactgccacggcgacgatgctgcgcttacatcaccatcggcatgatctgcatatttataggagtaggtctgactgtaggcactccagattttgccaggagatttcgggcaacttatgtaagctgggcaatagcatatctccttggactaatctgcttgattagggcgtgttattggggtgccatacgcgtctcatatcctgagcattcatttgcatag

SEQ ID NO: 199803 - DNA, 2970 bp, Artificial Sequence
  derived and/or modified sequence
cccttttctctggctggctgggctcccgctcctccactgctgctcctcccactctgcgggttctttctttctccctcccctcccctcccccagccatgcctcccagcgcgcttcccttcccccgcctcctggtcctgcaccctcccctcccctccccccgcttcctgccttgtgacacatcccgggccctcccggaggcggcagcagcagcagctgcagcggcagcagcggcagcagaggcagcagcagtagccaccactccgccgaggccgcaaccccggctcggcctccccaggccccgccgctgccgcagtcatggctgctgatggggtggacgaacgctcgcctctgctgtcagcatcccactccggaaatgtcactcccaccgccccaccgtacttgcaagaaagcagccccagagcggagctcccacctccatatacagccattgccagtccagacgccagtggtattccagtaataaactgccgtgtgtgccaatcactaatcaatttggatggcaagcttcaccagcatgtggttaagtgcacagtttgcaatgaagctacgccaatcaaaaaccccccaacaggcaagaaatatgttagatgcccttgtaattgtcttctcatttgtaaggacacatctcggcgaataggatgcccaagacccaactgtagacggataattaaccttggcccagtaatgcttatttctgaagaacaaccagctcagcctgcattgccaatccaaccagaaggtacaagggtcgtgtgtgggcactgtggaaacacattcctgtggatggaactgaggttcaacactctggcaaaatgcccacactgcaaaaaaatctcctcagtgggtagtgcacttccacgaagacgctgctgtgcatatattaccattggaatgatatgtattttcattggagttgggttaactgttggcaccccagattttgcaaggcgatttcgagcaacctatgtttcttgggcaattgcttatctcctaggattgatctgccttatccgagcttgttattggggagccataagagtcagttatccagaacacagttttgcataagcttgtttatgattcagtaatgcaggtgagagtgtctagcagttcttggtaagctactctggacatctttaaattatttatcctaatggattccattctggtttatgtataatcgtttcaagactttgggagtcttttatgaacaaatgctcattgcactatattatatgcaaattgttttgctgctaggttttcaaaatttgaataataaagccttttcatgttcttttacatctcttatagatatttttggatttgttaccaaacattacatttactctcacccttttattatttttaaataagttatttcattacttgctgatacatgagtattcctaagtgtttataaatatttctataatagtttcacatttatatttacattttaattaaacagtatcaaaattgcttgcttaaaacctaagcaatatgcattttgcttgaactgcttactgtaactttaacctaagattatagtgaccttattcaggaaaaaaaaaaaaatttagtgtaacttcaaagacttgacattcttgtcagaggaaaaaaaatttctagatactgtttgcttgttttttgttgtttgtagaaagataaaatattttggtagtaatttaaaatacaagaacgaatatttatttgtccacagttggagatgttggataaatgtcttttctcaaagatcacaggacttttgtctttcatttttgcctttttatttaccatttataaaagatctggtctggattatggaatttaatgtttatcagctctatgtattcctttatagaggcttgaggaagtatttcacataacatgttttataatacttaaccatttatccaaagatatatttacattgggttgtgcccctttcccttagatcatggtaaatttttcttattgaggtaattatgtactacttatatttgaaggaagcttatgacattttacagtagctaaaatgttgagattagaggtacttttactattcttctcaaaggtaactgatcagataattacccaaattattcaagaaaatagatcagaaataaagaacaacataattttctaagaattcattgaaatttatggaatcagctctcgcactgcccatctttgcagttttgaaaaagaaattgcttaatcacaaatgttctacagtctttaaatgtagtagaattagacagtgagatcatctgagtaaattgattggtgattccagagataagactaatattttaaattatttatgatactgattagtataaaaacgtactcatcacagaatttgaagcaaaatacatgtacacttcaaagagtaaatgacaaatgtataaatgctgtagctcaggattatatgtacctttaaaaatacactaataaagattattgttcaaaaattaccttgttttattccattaaaaataatgtcacttccagagttgccttgaaatcttgctgtaaagttttcatgtttaggaatgtacctgtttctttatataatattcatttatgttttttgtactattttcaaatggttttatttttaaaatatagtttttaaatccatttgtaatacacttgatgttaggtataaaataatcttacttcttttcctaatggttaactagttgtaacagcattgtatactgaataatccattctttccctcattgattggaaagctcacattaaattatatgctatgtcatattccttctggaataataactttatgagagcaagaaccctggtagtcttgttcacagctttatccccacttagaacagttcttagtgtacatgtgctcaatttacgtgaatgaatatgcatgaatgaataaatggttgaatgaattgctattttaaattctta

SEQ ID NO: 199804 - protein, 483 aa, Artificial Sequence
  derived and/or modified sequence
  misc_feature (1)..(1): Xaa can be any naturally occurring amino acid
XTFMVEDAVEAIGFGKFQWKLSVLTGLAWMADAMEMMILSILAPQLHCEWRLPSWQVALLTSVVFVGMMSSSTLWGNISDQYGRKTGLKISVLWTLYYGILSAFAPVYSWILVLRGLVGFGIGGVPQSVTLYAEFLPMKARAKCILLIEVFWAIGTVFEVVLAVFVMPSLGWRWLLILSAVPLLLFAVLCFWLPESARYDVLSGNQEKAIATLKRIATENGAPMPLGKLIISRQEDRGKMRDLFTPHFRWTTLLLWFIWFSNAFSYYGLVLLTTELFQAGDVCGISSRKKAVEAKCSLACEYLSEEDYMDLLWTTLSEFPGVLVTLWIIDRLGRKKTMALCFVIFSFCSLLLFICVGRNVLTLLLFIARAFISGGFQAAYVYTPEVYPTATRALGLGTCSGMARVGALITPFIAQVMLESSVYLTLAVYSGCCLLAALASCFLPIETKGRGLQESSHREWGQEMVGRGMHGAGVTRSNSGSQE

SEQ ID NO: 199805 - DNA, 1452 bp, Artificial Sequence
  derived and/or modified sequence
tgaaccttcatggtggaggacgccgtggaggccatcggcttcggcaagttccagtggaagctgagcgtgctgaccggcctggcctggatggccgacgccatggagatgatgatcctgagcatcctggccccccagctgcactgcgagtggagactgcccagctggcaggtggccctgctgaccagcgtggtgttcgtgggcatgatgagcagcagcaccctgtggggcaacatcagcgaccagtacggcagaaagaccggcctgaagatcagcgtgctgtggaccctgtactacggcatcctgagcgccttcgcccccgtgtacagctggatcctggtgctgagaggcctggtgggcttcggcatcggcggcgtgccccagagcgtgaccctgtacgccgagttcctgcccatgaaggccagagccaagtgcatcctgctgatcgaggtgttctgggccatcggcaccgtgttcgaggtggtgctggccgtgttcgtgatgcccagcctgggctggagatggctgctgatcctgagcgccgtgcccctgctgctgttcgccgtgctgtgcttctggctgcccgagagcgccagatacgacgtgctgagcggcaaccaggagaaggccatcgccaccctgaagagaatcgccaccgagaacggcgcccccatgcccctgggcaagctgatcatcagcagacaggaggacagaggcaagatgagagacctgttcaccccccacttcagatggaccaccctgctgctgtggttcatctggttcagcaacgccttcagctactacggcctggtgctgctgaccaccgagctgttccaggccggcgacgtgtgcggcatcagcagcagaaagaaggccgtggaggccaagtgcagcctggcctgcgagtacctgagcgaggaggactacatggacctgctgtggaccaccctgagcgagttccccggcgtgctggtgaccctgtggatcatcgacagactgggcagaaagaagaccatggccctgtgcttcgtgatcttcagcttctgcagcctgctgctgttcatctgcgtgggcagaaacgtgctgaccctgctgctgttcatcgccagagccttcatcagcggcggcttccaggccgcctacgtgtacacccccgaggtgtaccccaccgccaccagagccctgggcctgggcacctgcagcggcatggccagagtgggcgccctgatcacccccttcatcgcccaggtgatgctggagagcagcgtgtacctgaccctggccgtgtacagcggctgctgcctgctggccgccctggccagctgcttcctgcccatcgagaccaagggcagaggcctgcaggagagcagccacagagagtggggccaggagatggtgggcagaggcatgcacggcgccggcgtgaccagaagcaacagcggcagccaggagtag

SEQ ID NO: 199806 - DNA, 39 bp, Artificial Sequence
  derived and/or modified sequence
atggaggaggacctgttccagctgagacagctgccctag

SEQ ID NO: 199807 - DNA, 1452 bp, Artificial Sequence
  derived and/or modified sequence
tgaacgtttatggttgaagatgccgttgaggccattggattcggtaaatttcaatggaagcttagtgtgttgacaggcctagcatggatggctgacgcaatggagatgatgatcttgtcaattctagccccacaactgcactgtgaatggcgcctgccctcctggcaggtggcgctgctgaccagcgttgttttcgtcggcatgatgtcctcaagcactctttgggggaacatttctgatcagtatggccgcaaaaccgggctgaaaatatctgtgctgtggacgctttattatggtatcttgtccgccttcgcccctgtctattcctggatcttggtgttgagggggctggtcggattcggtattgggggcgtgccccagagtgtgacactctacgccgagttcctccccatgaaggcccgcgccaagtgtattctgttgatcgaagtgttctgggcgataggaacagtattcgaggtggtgctcgccgtgttcgttatgccttccctaggctggcgctggttgcttattctctccgcagttccattacttctctttgcggtcctttgtttctggctgcccgagtccgccaggtacgatgtgctgagcggcaaccaagagaaggcaatcgccacattaaagagaatagctactgagaatggcgctcctatgcccttaggaaagctcattatctctaggcaagaagacagaggcaagatgcgggaccttttcaccccccacttccgctggaccaccctgcttctctggtttatctggttcagtaatgcgtttagctattacggtctggtcctgctgactactgagctgtttcaagcaggagacgtgtgtggcattagctcacgtaagaaagcagtcgaagcaaaatgtagcctggcctgcgagtacctatccgaagaggattacatggacttactttggacaactctcagtgaatttcccggcgtgcttgtgactttgtggatcatcgaccgactggggagaaaaaaaacaatggctctgtgctttgtcatctttagcttttgcagtctgctgttattcatatgcgtggggaggaatgtgctcactctgttactgtttatcgcacgagccttcatctcagggggttttcaggccgcgtatgtgtatactcccgaagtgtaccccactgcaacaagggcattgggactcggaacatgttctggcatggcaagggtaggtgcattgataaccccgtttatcgcccaggtgatgctggagtcctctgtctatctgactctggctgtctactcaggctgctgcttgctggcagcccttgccagttgctttttaccaatcgaaactaaaggaagggggctgcaggaatcttcgcatagggaatggggccaagagatggtaggccgtgggatgcacggagcgggagtgacccgttcaaactccgggtcgcaagaatag

SEQ ID NO: 199808 - DNA, 39 bp, Artificial Sequence
  derived and/or modified sequence
atggaggaggacctgttccagctgagacaattgccatag

SEQ ID NO: 199809 - DNA, 1452 bp, Artificial Sequence
  derived and/or modified sequence
tgaaccttcatggtggaggatgctgtggaggccatcggctttgggaagttccagtggaagctgtctgtgctgaccggcctggcctggatggctgatgccatggagatgatgatcctgagcatcctggccccccagctgcactgtgagtggaggctgcccagctggcaggtggccctgctgacctctgtggtgtttgtgggcatgatgagcagcagcaccctgtggggcaacatcagtgaccagtatggcaggaagacaggcctgaagatctctgtgctgtggaccctgtactacggcatcctgagcgcctttgcccctgtgtacagctggatcctggtgctgcggggcctggtgggcttcggcatcggcggcgtgccccagagcgtgaccctgtatgcagagttcctgcccatgaaggcccgggccaagtgcatcctgctgattgaggtgttctgggccatcggcaccgtgtttgaggtggtgctggccgtgtttgtgatgcccagcctgggctggcgctggctgctgatcctgtctgctgtgcccctgctgctgtttgctgtgctgtgcttctggctgcctgagagcgcccgctatgatgtgctgagcggcaaccaggagaaggccatcgccaccctgaagagaattgccacagaaaatggagcccccatgcccctgggcaagctgatcatcagccggcaggaggaccggggcaagatgagggacctcttcaccccccacttccgctggaccaccctgctgctgtggttcatctggttcagcaatgccttctcctactacggcctggtgctgctgaccacagagctgttccaggccggagatgtgtgtggcatcagcagcaggaagaaggctgtggaggccaagtgcagcctggcctgtgagtacctgtctgaggaggactacatggacctgctgtggaccaccctgtctgagttccctggggtgctggtgaccctgtggatcatcgaccggctgggcaggaagaagaccatggccctgtgcttcgtcatcttctccttctgcagcctgctgctcttcatctgtgtgggcagaaatgtgctgaccctgctgctcttcatcgcccgggccttcatcagcggcggcttccaggccgcctacgtgtacaccccagaggtgtaccccacagccacccgggccctgggcctgggcacctgcagcggcatggcccgggtgggcgccctgatcacccccttcatcgcccaggtgatgctggagagctctgtgtacctgaccctggccgtgtacagcggctgctgcctgctggccgccctggccagctgcttcctgcccatcgagaccaagggccggggcctgcaggagagcagccaccgggagtggggccaggagatggtgggccggggcatgcacggggccggcgtgaccaggagcaacagcggcagccaggagtag

SEQ ID NO: 199810 - DNA, 39 bp, Artificial Sequence
  derived and/or modified sequence
atggaggaggacctcttccagctgcggcagctgccctag

SEQ ID NO: 199811 - DNA, 1452 bp, Artificial Sequence
  derived and/or modified sequence
tgaaccttcatggtggaggacgccgtggaggccatcggcttcggcaagttccagtggaagctgtccgtgttgaccggtttagcctggatggccgacgccatggagatgatgatactctctatcctggcgccccagctgcactgcgagtggaggctgccttcctggcaggtagccctgttaacttccgtcgtctttgtcggcatgatgtctagttccaccctgtggggaaacatctcggaccagtacggcaggaagaccggcctgaagataagtgtgctatggacgctttattatgggatcctcagcgctttcgctcctgtctacagttggatactggtcctccgcgggctggtcggctttggcattggtggggttccccaaagcgtgaccctgtacgccgaatttcttccgatgaaggcccgcgcaaaatgtatactccttatcgaagtgttctgggcgattggaaccgtgttcgaggttgtactggcagtgttcgtgatgccgagtctagggtggagatggctgcttatactgagtgctgtgcctttactgcttttcgctgtgctgtgtttctggttaccagaatcagcaagatatgacgttctgtctggaaatcaggaaaaagctatagccacccttaaacgcatcgccactgagaacggagcccccatgccccttgggaagctgatcatcagccgccaagaggacaggggaaagatgcgcgatctattcactccccacttcaggtggaccacattactgctgtggttcatttggttcagcaacgccttcagctattacggcctagtgctgctgactacagagcttttccaggccggcgatgtatgcggaatctcctcaaggaagaaggccgtggaggccaagtgctctttggcgtgcgaatatctatccgaggaagattacatggaccttctgtggacgactctgagcgaatttcccggagtgcttgtcactctgtggataatagatcgactgggacggaagaaaaccatggccctttgctttgtcatcttttctttttgcagtctgttgctgtttatctgtgtgggccgcaacgtcctaaccctccttctttttatcgcccgggcctttatctccggaggatttcaagctgcctacgtgtacacacctgaagtgtaccccacagcaacccgggctctaggactgggcacatgctccggcatggcccgggtgggcgcgctgattacaccgttcattgcccaggttatgctcgagagctctgtttatttaactctggccgtgtactctgggtgttgcttgctggccgcattggcaagttgttttctgccaattgaaactaaagggcgtgggttacaggagagttctcaccgcgagtggggacaggaaatggttggaaggggaatgcacggcgctggggtgacaagaagtaactctggtagccaggagtag

SEQ ID NO: 199812 - DNA, 39 bp, Artificial Sequence
  derived and/or modified sequence
atggaggaggacctgttccagctgcggcagctgccctag

SEQ ID NO: 199813 - DNA, 1452 bp, Artificial Sequence
  derived and/or modified sequence
taaacttttatggtagaagatgcagtcgaggctattggttttggcaagtttcagtggaagctgtccgtcctcacaggtctggcctggatggcggacgcgatggagatgatgatcctctctatactggcacctcaattacattgtgaatggagactccccagctggcaagtcgccctgttaacatccgtggtgttcgttggcatgatgtcatcctccactctttggggcaacatcagcgaccaatacggcaggaaaacgggcctgaagatttcggtactctggactctgtactacggcatactgagtgccttcgcaccagtgtactcttggatactcgttctgcggggacttgtcggcttcggcatcggaggcgtacctcaaagcgtcacactgtacgccgagtttctgccgatgaaggcccgagccaaatgcatcctactgatcgaggttttttgggctattggaactgtgttcgaggtcgtgctcgccgtattcgtgatgccttctctgggatggagatggctgctaatcttatcagctgtgcccttgctcttattcgccgtactgtgtttttggttgcctgagagcgctcggtacgacgtactttccggaaatcaggagaaggccattgctacattgaagcggatagctactgaaaatggcgctccgatgcctttaggaaaactgatcatttccagacaggaagatagaggcaagatgcgggatttgttcaccccacacttcagatggaccacacttctgctgtggttcatttggttcagcaacgccttttcttactacggactggtgttattgacaacagagttattccaggcaggagatgtgtgcggtatctccagtaggaagaaagcagttgaggctaaatgttcactggcctgcgagtacttaagcgaagaggattatatggatctcttgtggaccactttgtccgagtttcccggagtgctggtgactctgtggatcattgacagactgggacggaagaaaacaatggccctgtgtttcgtgatcttttctttttgtagtctcctgcttttcatatgcgtggggaggaacgtactgaccctgctgctgtttatagcacgggcattcattagcggcggattccaggccgcatacgtctacactccagaggtttacccaactgccacacgcgctctgggactgggtacctgcagcgggatggcacgtgtcggggctctcattactcctttcatcgcccaggttatgcttgaaagttctgtttaccttaccttggcagtttattccggatgttgcctgctggcggctctggcctcctgcttcctgcccatcgagaccaagggcagggggctgcaagagagcagtcatagagagtgggggcaggagatggtcggtcgcggaatgcacggagctggggtgacccgcagcaacagcggatcacaggagtag

SEQ ID NO: 199814 - DNA, 39 bp, Artificial Sequence
  derived and/or modified sequence
atggaggaggatctgtttcagcttagacagctcccctag

SEQ ID NO: 199815 - DNA, 3104 bp, Artificial Sequence
  derived and/or modified sequence
atactttcatggtggaagatgcagtggaagccattggctttggaaaatttcagtggaagctgtctgttctcactggcttggcttggatggctgatgccatggagatgatgatcctcagcatcctggcaccacagctgcattgcgagtggaggctcccaagctggcaggtggcattgctgacctcggtggtctttgtaggcatgatgtccagctccacgctctggggaaatatctcagaccagtacggcaggaaaacagggctgaagatcagcgtgctgtggactctgtactatggcatccttagtgcatttgcgcccgtgtatagctggatcctggtgctccggggcctggtgggcttcgggatcggaggagttccccagtcggtgacgctgtatgccgagttccttcccatgaaagccagagctaaatgtattttgctgattgaggtattctgggccatcgggacagtgttcgaggtcgtcctggctgtgttcgtgatgcccagcctgggctggcgttggctgctcatcctctcagctgtcccgctcctcctctttgccgtgctgtgtttctggctgcctgaaagtgcaaggtatgatgtgctgtcagggaaccaggaaaaggcaatcgccaccttaaagaggatagcaactgaaaacggagctcccatgccgctggggaaactcatcatctccagacaggaagaccgaggcaaaatgagggaccttttcacaccccattttagatggacaactttgctgctgtggtttatatggttttccaatgcattctcttactacgggttagttctactcaccacagaactcttccaggcaggagatgtctgcggcatctccagtcggaagaaggctgtagaggcaaaatgcagcctggcctgcgagtacctgagtgaggaggattacatggacttgctgtggaccaccctctctgagtttccaggtgtccttgtgactctgtggattattgaccgcctggggcgcaagaagaccatggccctgtgctttgtcatcttctccttctgcagcctcctgctgtttatctgtgttggaagaaatgtgctcactctgttactcttcattgcaagagcgtttatttctggaggctttcaagcggcatatgtttacacacctgaggtctaccccacggcaacgcgggccctcggcctgggcacctgcagcggcatggcaagagtgggtgctctcatcactccgttcatcgcccaggtgatgctggaatcctctgtgtacctgactctggcagtttacagtggctgctgcctcctggctgccctggcctcctgctttttgcccattgagaccaaaggccgaggactgcaggagtccagccaccgggagtggggccaggagatggtcggccgaggaatgcacggtgcaggtgttaccaggtcgaactctggctctcaggaatagtgaccgatgggggactgagctggtctttgaggctgcagagcttggggggctggcaggccccaactggggcactgattgtcactgccgacatcaagaactcacccaagagtatgacctggaccaacagggttttgtgtcttgactcagtttgctcatcttcattgaggtccacccagggatggggagatgtttgctctagggggttctctgtatatgtggtgaaagctttgttcataacctgtggatctacatgggaagactacccatattaggagggtctggtaatgccagcaaccaatcagacaccacccagagtcacccggccaaaccctcagtgaacaaccaaaatatctctctgtagataccgtccaggctcaggcccatgtgacacctgctgtccacccaccggacctgttcagtaggtttctcccacactcacagccccaggctttcttctttgaaattgcaggcgatctaggtgtggtctgagcagctatttcctggcaggggccccccggtttgcctccctagagcctgaccagtggattctctggcagatggacatggtgcattcaaactggagccacatgcccccacccagccccctctggagttgccgttgttggcaccaagagatccagatgtgtccctggggacagctggtcttgcaccaggtgacaacctcagaacgccgttaccccctgggaactgaggactgaggccaaagtgaatcaagctgaagtcagagcacgggcctccccttctgaagcagcgaaggccacggttccgacttctttcctggccccctccttggtcaggctgaatggtgacttttattgttttttgagacggagtcttgatctgtcgcccaggctggagtgcagtagcgtgatctcggctcactgcaactctgcctcccgggttcaagcaattctcctgtctcagcctcccgagtagctgggattacaggtgcccacctgtactttttagtagagacagggtttcaccatgttggccaggctggtctcgaactcctgacctcaagtgatccacccgcctcggcctcccacagtgctgagattacaggtgggagccactgcacccggcctgaatgatgactcttgaggggaaaaagtttactcaggtttgcaggtacaaaatccaaaatccagggctttgggttttgtgcatgggtagacagctgaatgggcagagaaaccagaaggatgctacacccaccatctcatcccatggggatcaggggaccaggattccctgatgcgaagctgctcctctgtccagggacgtcttgatcattacacaaaggcagcccctggagttccattcatggagcctgccgtggagtggagaggggtgggaggactcaggtgtgtgaaatgtatatgttttcaaaggaagcagtgggaggccagttggttttgagttggtctccgcaggcaacatcacttctgggatttggtttactggagccttttttcccatggtgaaggcaggggacatagacaaggagggaggaagctggcagatcccatcaaaggccagagcagacagacctactgcttgaagtaaacattgcaaggaagccaatttgtgcgttcaactcttattaaaacatgtcagtgatggacattg

SEQ ID NO: 199816 - protein, 334 aa, Artificial Sequence
  derived and/or modified sequence
MKHFLRMLIQVCLYFYCKFLWRCLKFVMRKLTGRCELQRICYNTKPGASRTMKIETSLRDSKSKLLQTSVSVHPDAIEKTIEDIMELKKINPDVNPQLGISLQACLLQIVGYRNLIADVEKLRREAYDSDNPQHEEMLLKLWKFLKPNTPLESRISKQWCEIGFQGDDPKTDFRGMGLLGLYNLQYFAERDATAAQQVLSDSLHPKCRDITKEEISKFSKAEWEKKRMDKAIGYSFAIVGINITDLAYNLLVSGALKTHFYNIAPEAPTLSHFQQTFCYLMHEFHKFWIEEDPMDIMEFNRVREKFRKRIIKQLQNPDMALCPHFAASEGLINM

SEQ ID NO: 199817 - DNA, 1005 bp, Artificial Sequence
  derived and/or modified sequence
atgaagcacttcctgagaatgctgatccaggtgtgcctgtacttctactgcaagttcctgtggagatgcctgaagttcgtgatgagaaagctgaccggcagatgcgagctgcagagaatctgctacaacaccaagcccggcgccagcagaaccatgaagatcgagaccagcctgagagacagcaagagcaagctgctgcagaccagcgtgagcgtgcaccccgacgccatcgagaagaccatcgaggacatcatggagctgaagaagatcaaccccgacgtgaacccccagctgggcatcagcctgcaggcctgcctgctgcagatcgtgggctacagaaacctgatcgccgacgtggagaagctgagaagagaggcctacgacagcgacaacccccagcacgaggagatgctgctgaagctgtggaagttcctgaagcccaacacccccctggagagcagaatcagcaagcagtggtgcgagatcggcttccagggcgacgaccccaagaccgacttcagaggcatgggcctgctgggcctgtacaacctgcagtacttcgccgagagagacgccaccgccgcccagcaggtgctgagcgacagcctgcaccccaagtgcagagacatcaccaaggaggagatcagcaagttcagcaaggccgagtgggagaagaagagaatggacaaggccatcggctacagcttcgccatcgtgggcatcaacatcaccgacctggcctacaacctgctggtgagcggcgccctgaagacccacttctacaacatcgcccccgaggcccccaccctgagccacttccagcagaccttctgctacctgatgcacgagttccacaagttctggatcgaggaggaccccatggacatcatggagttcaacagagtgagagagaagttcagaaagagaatcatcaagcagctgcagaaccccgacatggccctgtgcccccacttcgccgccagcgagggcctgatcaacatgtag

SEQ ID NO: 199818 - DNA, 1005 bp, Artificial Sequence
  derived and/or modified sequence
atgaagcattttctgagaatgctgattcaggtctgtctgtacttttattgcaaattcctctggaggtgtttgaagttcgtgatgcggaagctcactgggagatgcgagctgcagcggatctgttacaataccaaacccggggcctccaggaccatgaaaatcgaaactagcctcagagacagtaagtccaaactgctgcagactagcgtgtcagtacaccctgatgcgatcgaaaagacaattgaggatattatggagctgaagaaaataaacccggacgtaaacccacagttggggatctctctgcaggcatgcctcctccagattgttggttatagaaacctcatcgcggatgtcgagaagctccgtcgtgaagcctacgattccgataacccccagcatgaggagatgctgctgaagttgtggaagtttttgaagcccaacacccctcttgagagtcgcatatcgaagcagtggtgtgagatcggattccaaggagatgatccaaaaactgacttccgtggcatggggctgctcgggttgtacaatctgcagtacttcgctgagcgggatgccaccgccgcccagcaggttctgtcagacagtctgcatccaaagtgccgggatatcacgaaggaggaaatttcaaagtttagcaaggcagagtgggagaaaaaacggatggacaaagccattggttacagttttgccattgtcggaattaatatcacagacctggcctataatctgctcgtttccggtgcattaaagactcatttttacaacattgcgcccgaggccccgacattgtcccatttccagcagacattctgctacttgatgcacgaattccacaagttttggatagaagaggaccccatggatatcatggagttcaatagagtcagagagaaatttcgaaagaggatcatcaagcagctgcagaaccccgatatggcactctgtccccattttgctgcctccgagggcctaattaatatgtag

SEQ ID NO: 199819 - DNA, 2852 bp, Artificial Sequence
  derived and/or modified sequence
cccttccgcgcccgcagccagtgcggcagccgcggccgcccctgtccagcctcggcgcccgggaccgagcgcgtcgctcgccgccgcggagcgcgtagccggagcgcctggggaaggcggagatgaagaccacgccgccgcgcgccgggagctgctgagcctaccgccgccagagtccagttgacacttactttgacaaaggcaaatttggaagcaattacttgaggacagttcatatagcatctggacagtcaacacgggcaccatgaagcacttcctgagaatgttgatccaggtatgcctgtatttttactgtaaatttctgtggcgctgcctgaaatttgtaatgaggaagctaactggaagatgtgaactacaacggatctgttataataccaagccgggagcttctagaaccatgaaaatcgaaacatcactgagggattctaaaagtaagctgttgcagacttctgtgagtgttcaccccgacgctattgaaaaaactatagaagatatcatggaactgaaaaaaattaatcctgacgtaaatccacagctgggaatctctcttcaggcttgccttctgcaaatcgttgggtacaggaaccttattgcagatgtggaaaaactgcgtagagaggcctatgattctgataatccccaacatgaagaaatgcttttgaagttatggaaattcttgaagcccaatactccactggaatctcggatttctaagcagtggtgtgaaattggtttccaaggtgatgatcctaaaacagactttcgaggaatgggacttctgggactgtacaatttgcagtatttcgcggaaagggatgccacagcagctcagcaggtcctgtctgactctcttcatccgaaatgcagggatatcactaaagaagaaataagcaaattcagcaaagcagaatgggagaagaaaaggatggataaggcaattgggtactcatttgcaattgtgggcatcaatataactgacctggcatataatctactggtcagcggagctctaaaaacccatttctacaatatcgccccagaagctccaacattgtctcactttcagcaaacattctgctatttgatgcatgaatttcataagttttggatcgaagaggaccccatggacataatggaatttaatcgtgtgagggagaaattccgcaagaggatcatcaaacagctgcagaacccagacatggcgctgtgcccacattttgctgcctcggaaggtttaatcaacatgtagttgcccacgccggttttaatggataccctggaacactgcctcattgtcttgttagatctctgcttaggtcgcagctcacgcattgaatgcacacagtgattgtatgcatgccttttggtacagtgttttcatctcttggtcataattccgagatccccagagaccactgtttctggagtatctgtcatccagtgactgctcatattgtggcattatgcagtgttacatcttgccttgatacccaggtatggagagagttttctatttttttagactttttttcctctccctcataattcagcattaaagaattgtatttctctagctgtattttgtatgtaagaggtttagctgaatctcattctgtgaaagccttttaatttattgaaatgtttcatgactactgctgctagctcttcaagccaggttcatgcttggacctcattctgataaagtataagactttaaaataatacaaaacagggccgggcgcagtggctcacacctgtaatcccagcactttggggagctgaggcgggcggatcacgaggtcaagagatcgagaccatcctggccaacatggtgaaaccccgtctctactaaaaataacaaaaattagctgggcgtggtggtgggtgcctgtaatcccagctactcgggaggctgaggcaggagaatcgcttgaacccgggaggtggaggttacagtgagccgagatcataccactgcactccagcctggcgacagagcaagactccatctcaaaaataaataaataaataaataaataaataaataaataaataaataaataaataaaatagtacagacagacacatgataagccaaactgttcctgcaaacatagctatgcttcatgaggcttacaagaagtaactttaggtaggagctgtttttgtttgaagtactgcaaaattatattgtaacttcccctcaccccagttgcaattgtgtcatagtcatctgtatatcaaactattttattcccataacttcattggcttggatgcctaagtgtatgatgcttgaagcctcagaaaagaaataagcatatttcaaaagctgcaaaaggtttttcactgcctgcctcttgcggaactgggttacaccctggcactgttctgatccaagcatatttgcttggggaactaagtgctgactagtttgttttctatgtcaaggggcaatattaaaaaacaatttgcaagaaaatgtgtttcaagagagcaacctaagctaagtcactctgcgatatttcttgaaaataacgaccttgtcttgtatcagtggaagaagtaagttgcttagaaagggaaaagtcaaattgttccagaactgctaaaaatcattttaaaaaccatgatttagtttggaattatgattgtagtctgttgaatagtatttaccatggcatttcatacccatggtattttataccttctgactatcaattttagtattattagatgtttgtgtaaccacttgcttatttaaatgaattttgagtactgcctaattgtcagttatatgaataaattacatgtcattctactgtaacgta

SEQ ID NO: 199820 - DNA, 1005 bp, Artificial Sequence
  derived and/or modified sequence
atgaagcacttcctgaggatgctgatccaggtgtgcctgtacttctactgcaagttcctgtggcgctgcctgaagtttgtgatgaggaagctgaccggccgctgtgagctgcagaggatctgctacaacaccaagccaggggccagcaggaccatgaagattgagaccagcctgcgggacagcaagagcaagctgctgcagacctctgtgtctgtgcacccagatgccatcgagaagaccatcgaggacatcatggagctgaagaagatcaacccagatgtgaacccccagctgggcatcagcctgcaggcctgcctgctgcagatcgtgggctacagaaacctgattgctgatgtggagaagctgcggcgggaggcctatgacagcgacaacccccagcacgaggagatgctgctgaagctgtggaagttcctgaagcccaacacccccctggagagccgcatcagcaagcagtggtgtgagatcggcttccagggagatgaccccaagacagacttccggggcatgggcctgctgggcctgtacaacctgcagtactttgctgagagagatgccacagctgcccagcaggtgctgagtgacagcctgcaccccaagtgccgggacatcaccaaggaggagatcagcaagttcagcaaggccgagtgggagaagaagaggatggacaaggccatcggctacagctttgccatcgtgggcatcaacatcacagacctggcctacaacctgctggtgtctggggccctgaagacccacttctacaacatcgcccctgaggcccccaccctgagccacttccagcagaccttctgctacctgatgcatgagttccacaagttctggattgaggaggaccccatggacatcatggagttcaacagagtgcgggagaagttcaggaagaggatcatcaagcagctgcagaacccagacatggccctgtgcccccactttgctgccagcgagggcctcatcaacatgtag

SEQ ID NO: 199821 - DNA, 1005 bp, Artificial Sequence
  derived and/or modified sequence
atgaagcacttcctgcggatgctgatccaggtgtgcctgtacttctattgtaagtttctatggaggtgtctgaaatttgtaatgcgtaaactgaccggaaggtgcgagcttcaaagaatctgttataatacaaaaccaggggcgagccgaactatgaagatcgagacctccttgcgcgacagtaaatcgaaactcttgcagaccagcgtgagcgtacacccagatgctatagagaaaaccatagaggacatcatggaactaaaaaagatcaacccagatgtgaacccccagttgggaatatcgctgcaggcctgcctgctgcagattgtagggtaccgtaaccttattgccgacgtggaaaagcttagacgggaagcctatgactccgataaccctcagcatgaggaaatgcttctcaagctctggaagtttctgaagcccaatacaccgctcgaatctagaattagcaagcagtggtgcgagatcggatttcagggagatgatccgaagaccgatttccgaggtatgggtctgctgggcctgtacaacctgcagtatttcgctgaacgggacgcaacagccgcccaacaggttctctctgactcattgcatccaaaatgccgcgatataacaaaggaagaaattagtaaattctctaaagccgagtgggagaagaagaggatggacaaggcaatcggatatagcttcgccatagtcgggattaatattaccgatctcgcttacaatctccttgtttccggagccctcaaaacgcatttttacaatatagcccctgaggcgcccaccctgtcccactttcagcagactttctgttaccttatgcatgaatttcacaagttctggatcgaagaggatccaatggacattatggagttcaatcgcgtgagagagaaattcagaaaacggattattaagcaactccagaatcccgatatggccttatgcccccatttcgctgcgagcgaagggttgatcaatatgtag

SEQ ID NO: 199822 - DNA, 1005 bp, Artificial Sequence
  derived and/or modified sequence
atgaagcacttcctccggatgttgatccaggtctgcctgtatttttattgcaaattcctgtggaggtgcctgaaattcgtgatgcggaagctaaccggaaggtgtgaactccaacgaatctgttataataccaagccgggtgccagcaggaccatgaagattgagactagtctgagagactccaaatcaaaattgctgcaaacatctgtttctgtgcaccccgacgccatcgaaaaaaccattgaggacatcatggagctgaagaaaatcaatcctgatgtcaacccccagttgggcatatcactgcaggcctgtctcttacagatagtgggctaccgcaatttgatagctgatgttgaaaaactgagaagagaggcatatgacagcgataacccacagcacgaggagatgctcttaaagctgtggaaatttctgaagccgaacacgccactcgaatccaggatttccaagcagtggtgtgagatcggctttcagggagacgacccaaaaactgatttcagaggcatgggtctgctgggcctgtacaatctacaatacttcgcggagcgagatgctaccgctgcacagcaggttctcagtgacagtcttcaccctaagtgtcgcgatatcacgaaagaggaaatatctaagttctcaaaagccgaatgggagaagaaaagaatggacaaagccatagggtactccttcgcaatcgtgggaattaacattactgaccttgcctataatctgctggtgtctggggctctgaagacccacttttataacattgcgccagaagcaccaacgctgagtcactttcagcaaacattttgttatttgatgcacgagtttcacaaattttggatcgaagaagaccccatggatatcatggaatttaaccgtgtacgagagaagttccgaaagcggatcatcaaacaactgcagaacccagacatggcactctgcccccatttcgctgcaagtgagggccttatcaatatgtag

SEQ ID NO: 199823 - protein, 485 aa, Artificial Sequence
  derived and/or modified sequence
MGRYSGKTCRLLFMLVLTVAFFVAELVSGYLGNSIALLSDSFNMLSDLISLCVGLSAGYIARRPTRGFSATYGYARAEVVGALSNAVFLTALCFTIFVEAVLRLARPERIDDPELVLIVGVLGLLVNVVGLLIFQDCAAWFACCLRGRSRRLQQRQQLAEGCVPGAFGGPQGAEDPRRAADPTAPGSDSAVTLRGTSVERKREKGATVFANVAGDSFNTQNEPEDMMKKEKKSEALNIRGVLLHVMGDALGSVVVVITAIIFYVLPLKSEDPCNWQCYIDPSLTVLMVIIILSSAFPLIKETAAILLQMVPKGVNMEELMSKLSAVPGISSVHEVHIWELVSGKIIATLHIKYPKDRGYQDASTKIREIFHHAGIHNVTIQFENVDLKEPLEQKDLLLLCNSPCISKGCAKQLCCPPGALPLAHVNGCAEHNGGPSLDTYGSDGLSRRDAREVAIEVSLDSCLSDHGQSLNKTQEDQCYVNRTHF

SEQ ID NO: 199824 - protein, 223 aa, Artificial Sequence
  derived and/or modified sequence
MGRYSGKTCRLLFMLVLTVAFFVAELVSGYLGNSIALLSDSFNMLSDLISLCVGLSAGYIARRPTRGFSATYGYARAEVVGALSNAVFLTALCFTIFVEAVLRLARPERIDDPELVLIVGVLGLLVNVVGLLIFQDCAAWFACCLRGRSRRLQQRQQLAEGCVPGAFGGPQGAEDPRRAADPTAPGSDSAVTLRGTSVERKREKGATVFANVAELIHNTRFLL

SEQ ID NO: 199825 - DNA, 1458 bp, Artificial Sequence
  derived and/or modified sequence
atgggccgctattcaggcaaaacctgccgtctactgttcatgctcgtgctcaccgtggcattctttgtggcggaacttgtgtccgggtacctgggaaactccatcgcacttttgagcgattccttcaacatgctctctgacctgatcagcctctgtgtgggactcagtgctgggtatatagctcgacggcctacacggggctttagcgcaacttacgggtatgcccgggctgaggtagtgggggccttgagcaacgcggtgttcctcaccgcactgtgtttcacaatttttgtggaagctgtgctgaggctggcccgccctgagcgcatagacgatcccgaactcgtactgatcgtaggggtactggggctgcttgtgaacgtcgtgggcctcctaatctttcaagattgtgcagcctggtttgcgtgctgcctccggggcagatcccgcaggctgcagcagcggcaacagttggcagagggatgcgttcctggcgcttttggcggtcctcagggggcggaggatccgcggcgcgcagcagatcctacggcccctggatcagactccgctgttacactgaggggtacctcagtggagcgcaagagggaaaagggcgccacagtgtttgccaatgtggccggagactcctttaatacccagaatgagcccgaggacatgatgaaaaaggaaaagaaatcagaggccctgaacatcaggggtgttctgctgcatgtgatgggggacgctcttggcagtgttgtcgtcgtcatcacagctatcatcttctatgtgctaccccttaaatccgaagatccgtgcaattggcagtgttacatcgatccttccttaacggttctcatggtgatcattatactgtcttctgcattccccctgattaaggagacggccgcgattctgctgcagatggtgccgaagggggtgaacatggaagagctgatgtctaaattgagtgccgtgccaggcatatcttccgtgcacgaggtgcacatttgggaactcgtcagcggaaagatcattgccacactccacatcaagtatcctaaggaccgggggtaccaggacgcttctaccaaaataagggaaatctttcatcacgcaggcattcacaacgttacgattcagttcgaaaatgtggatctcaaggagcctcttgagcagaaagacctgctgctgttatgcaattctccctgcatctctaagggatgcgcaaagcagctttgttgcccccctggtgctctgccgctggctcatgtgaatgggtgtgctgaacataatggaggccccagcttggacacctacgggtcggatgggctatctcggagagatgctagggaagttgcgattgaagttagcctggattcctgcttgtcagaccatggccagtccttaaataagacccaagaggatcagtgttacgttaatcgcacacacttttag

SEQ ID NO: 199826 - DNA, 672 bp, Artificial Sequence
  derived and/or modified sequence
atgggcaggtacagcggcaagacctgccgcctcttgttcatgcttgttctcaccgtagctttctttgtcgctgagttagttagcgggtacttgggcaactcgatcgcgctgctgtccgattcttttaacatgctgtccgacctgatttccctgtgtgtcggcctgagtgctgggtacatcgcacggcggccgacccgggggttctcggccacttatggatatgcacgggcagaagtggtaggtgccctgtcaaatgcagtcttccttacggccctgtgtttcacaattttcgttgaggcagttctgcgattagcccggccagaaagaatagacgaccctgagctggtcctgattgtgggtgtgctcggtctcctcgtaaacgttgttggactgctgatcttccaggactgcgccgcctggtttgcctgctgcctcagaggtcgtagcaggaggttacagcagaggcagcaactagccgaggggtgcgtacccggcgcttttggtgggcctcagggagctgaagatccaaggagggccgcagacccaaccgcaccagggtcggactctgccgtcacactaagggggacatccgtcgaacgaaaaagagagaagggtgccaccgtgttcgctaacgtagccgagctcattcataatactaggtttctgctgtag

SEQ ID NO: 199827 - DNA, 1458 bp, Artificial Sequence
  derived and/or modified sequence
atgggccgctacagcggcaagacctgccgcctgctcttcatgctggtgctgactgtggccttctttgtggccgagctggtgtctggctacctgggcaacagcatcgccctgctgagtgacagcttcaacatgctgagtgacctgatcagcctgtgtgtgggcctgtctgctggctacatcgcccggcggcccacccggggcttcagcgccacctacggctacgcccgggcagaggtggtgggcgccctgagcaatgctgtgttcctgacagccctgtgcttcaccatctttgtggaggccgtgctgcggctggcccggcctgagagaattgatgatcctgagctggtgctgattgtgggcgtgctgggcctgctggtgaatgtggtgggcctgctgatcttccaggactgtgccgcctggtttgcctgctgcctgcggggccgcagccggcggctgcagcagaggcagcagctggccgagggctgtgtgcctggggcctttggaggcccccagggcgctgaggaccccaggagagctgctgaccccacagcccctggcagtgacagcgctgtgaccctgcggggcacctctgtggagaggaagcgggagaagggggccaccgtgtttgccaacgtggccggggacagcttcaacacccagaatgaacctgaggacatgatgaagaaggagaagaagtctgaggccctgaacatccggggcgtgctgctgcacgtgatgggagatgccctgggctctgtggtggtggtgatcacagccatcatcttctacgtgctgcccctgaagtctgaggacccctgcaactggcagtgctacatcgaccccagcctgactgtgctgatggtgatcatcatcctgagcagcgccttccccctcatcaaggagacagctgccatcctgctgcagatggtgcccaagggcgtgaacatggaggagctgatgagcaagctgtctgctgtgcccggcatcagctctgtgcatgaggtgcacatctgggagctggtgtctgggaagatcatcgccaccctgcacatcaagtaccccaaggaccggggctaccaggatgccagcaccaagatccgggagatcttccaccacgccggcatccacaacgtgaccatccagtttgaaaatgtggacctgaaggagcccctggagcagaaggacctgctgctgctgtgcaacagcccctgcatcagcaagggctgtgccaagcagctgtgctgccccccaggggccctgcccctggcccacgtgaatggctgtgccgagcacaacggcggccccagcctggacacctacggcagtgatggcctgagcagaagagatgcccgggaggtggccatcgaggtgtccctggacagctgcctgagtgaccacggccagagcctgaacaagacccaggaggaccagtgctacgtgaacagaacccacttctag

SEQ ID NO: 199828 - DNA, 672 bp, Artificial Sequence
  derived and/or modified sequence
atgggccgctacagcggcaagacctgccgcctgctcttcatgctggtgctgactgtggccttctttgtggccgagctggtgtctggctacctgggcaacagcatcgccctgctgagtgacagcttcaacatgctgagtgacctgatcagcctgtgtgtgggcctgtctgctggctacatcgcccggcggcccacccggggcttcagcgccacctacggctacgcccgggcagaggtggtgggcgccctgagcaatgctgtgttcctgacagccctgtgcttcaccatctttgtggaggccgtgctgcggctggcccggcctgagagaattgatgatcctgagctggtgctgattgtgggcgtgctgggcctgctggtgaatgtggtgggcctgctgatcttccaggactgtgccgcctggtttgcctgctgcctgcggggccgcagccggcggctgcagcagaggcagcagctggccgagggctgtgtgcctggggcctttggaggcccccagggcgctgaggaccccaggagagctgctgaccccacagcccctggcagtgacagcgctgtgaccctgcggggcacctctgtggagaggaagcgggagaagggggccaccgtgtttgccaacgtggccgagctgatccacaacacccgcttcctgctgtag

SEQ ID NO: 199829 - DNA, 1458 bp, Artificial Sequence
  derived and/or modified sequence
atgggccggtacagcggcaagacctgccggctgctgttcatgctggttctaacggtggccttctttgtagccgagttggtgagtggatatcttgggaactccatcgcccttctgtccgactcttttaacatgctctccgacctgataagcctgtgcgttggactatctgctggatatatcgcgcggcggccaacacgcggcttctctgctacttacggttatgctcgagccgaggttgtgggcgcactctctaatgccgtgttccttaccgctctgtgttttaccatcttcgtggaggccgtgctccgcttagcacgcccagagcgtatcgacgatccggagctggtccttatagtgggcgtgcttggcctgctcgtgaacgtcgtgggactgctgattttccaggactgcgctgcctggtttgcttgttgcctgagaggaaggagccgccgcctgcagcaacggcagcagctcgccgaggggtgtgtccctggggcctttggaggccctcagggtgcagaagatccccggcgagcggctgatcccactgccccggggtctgacagcgctgtgactcttagggggacaagtgtggagcggaagcgggagaagggagctacagtcttcgctaacgttgccggggattctttcaatactcagaacgagccagaagacatgatgaagaaagaaaagaagtccgaggccctcaatatacgcggcgtgcttctgcacgtgatgggagacgctctgggctccgttgtggtagtaatcacggctattattttctacgttctgcctttaaagtcagaggacccatgtaactggcagtgttatatagatccctccctgactgtgctgatggttatcattatactcagctctgcctttcccttgatcaaggagaccgcagctattctactacagatggtgccaaaaggggttaatatggaagagctcatgagcaagctctccgcagtgccaggcatctcttcagtccatgaagttcacatctgggagttagttagcggcaaaatcatcgccaccctccacattaagtatcccaaggatcgagggtaccaagatgcttctacaaagatcagggagatcttccatcacgcgggcatacacaacgtcacaattcagtttgagaatgtcgacctgaaagagccactagagcaaaaggacctcctcctgttgtgcaattcaccctgtattagcaagggatgtgccaagcagttgtgctgtccaccaggggccttacccctcgctcatgtaaatgggtgcgcagaacacaatggtggaccctcgctggacacatacgggagcgacggtttaagccgccgggacgcacgcgaggtcgctatcgaggtttcacttgatagctgtctgagtgatcacggccagagcctcaataagacgcaggaagatcagtgttacgtgaacagaactcacttctag

SEQ ID NO: 199830 - DNA, 672 bp, Artificial Sequence
  derived and/or modified sequence
atgggccggtacagcggcaagacctgccggctgctgttcatgctggtgctgaccgtggcatttttcgtggccgagttggtgtctggctatctcggaaattcaatcgccttactgtcggattcctttaacatgctctcagacctcatatcactgtgtgttggcctgagcgccggctatatcgccaggagaccaactcgcggattctccgcgacatatggctatgctcgcgctgaggtcgtaggcgccctcagcaatgccgtgtttctgacagccctctgctttaccatattcgttgaggcagtactgcgccttgcccggcccgaaaggattgacgacccagaactcgtgctcatcgttggcgtcctcggcttgctcgttaatgtggttggattgctgattttccaggactgcgcagcatggtttgcatgttgtctccgcggccggagtaggagacttcagcaacggcaacaactagccgagggctgcgtgcccggtgctttcggtggcccacagggagcggaggacccaaggagggccgccgaccccacggcacccggatctgattcagcagtgacgctccgcggaacttccgtagaacgcaagagggagaagggcgccacagtttttgccaatgttgctgagctgatccacaacactagattccttctttag

SEQ ID NO: 199831 - DNA, 1458 bp, Artificial Sequence
  derived and/or modified sequence
atgggcaggtactcagggaagacatgtcgactcctgtttatgctggtgctgaccgtagcgttttttgtcgccgaactggtgtccggttatctagggaatagcatagccctgttgtccgactcgtttaatatgttgagcgatttgataagtctgtgtgtggggctgagcgccggatatatcgcccgacgtccaacaaggggattttcagccacctacgggtatgcacgcgcagaggtggtgggagctttgtcgaatgctgtgtttcttacagcactctgtttcacgatctttgtggaggccgtcctaaggctcgcgcgaccagagcggatcgatgatcctgaactggtgttaatcgtgggtgtgttaggcctactggtgaacgtggtcggccttctcatctttcaggattgtgccgcatggtttgcatgctgccttcgtggaaggagcagacggctccagcaaagacagcagctcgccgaaggctgtgtgcctggagcatttggagggccacagggtgctgaggaccctagacgagccgctgaccccaccgccccaggtagcgactccgcagttactttaagaggcaccagcgtcgaaagaaagcgggagaaaggtgcaaccgtctttgccaatgtagccggtgattccttcaacacacagaatgagcctgaggacatgatgaaaaaggagaagaaatccgaagcattaaatatccggggtgtactcttgcacgtgatgggcgacgccctcggttccgtggtcgtggtcatcacggccataattttctacgttctgccacttaaatctgaggacccttgcaattggcagtgctacatcgacccctcgcttaccgtcctgatggtgatcataatactcagttctgcattccccttgattaaagagacagctgctatacttttacaaatggtacccaaaggggtcaatatggaggaattgatgtcaaaactgtccgcagttcctggtatctcttcagtgcacgaagtgcacatctgggaattggtgagcggcaagattattgctaccctgcatattaagtacccaaaggaccggggttatcaggacgccagcaccaagattcgggagatcttccaccacgctgggatacataacgtgacaattcagttcgagaacgtagacctgaaggaaccattggaacagaaggatctgctgcttttatgcaacagcccttgcatcagtaagggctgcgccaaacaactgtgctgtccacctggcgcacttcctctggcacacgtcaatgggtgcgctgagcataacggaggcccaagtctggatacatacggatccgacggcctgtcaagaagggacgctcgcgaggttgccatcgaggtgtcgctggatagttgcctgagcgatcacggccagagcttgaataagacgcaggaggaccagtgctatgtgaatcgaacacacttctag

SEQ ID NO: 199832 - DNA, 672 bp, Artificial Sequence
  derived and/or modified sequence
atggggagatattctgggaaaacttgccgcctcttattcatgctggtgctgacagtcgccttttttgtggccgagctggtctccggatacttgggaaactcgatagccctcctgtcagactctttcaatatgctgagcgatctaatctctctgtgcgtgggtctctctgccggttatattgccaggcgccctaccaggggcttctctgctacctacgggtacgccagggctgaggtggtgggagcccttagcaatgcagtgtttttaaccgcgctttgcttcaccattttcgtggaggcagtcctccgtttggctcgacccgaaagaatcgatgacccagagcttgtcctgatcgtgggagtgctgggcctgctggtgaacgtggtgggactgttgatttttcaggattgcgccgcttggttcgcgtgctgtctcagaggtcgttctagacggcttcaacaaagacagcagctggcagagggatgcgttcccggagcctttggaggtccccaaggtgcagaagacccgaggcgcgctgccgaccccactgcaccaggcagcgactctgctgtgacgttgcgcggtacgtctgtagaacgcaaaagagaaaagggcgctacggtttttgccaacgtggccgaactgattcataacactaggtttttactgtag

SEQ ID NO: 199833 - DNA, 1915 bp, Artificial Sequence
  derived and/or modified sequence
ctcggcctcgcgttataaaaagcggtggggcagggccggcgagacaatctgggaggcgggtaccgggcctcacggatccgcgccgcgccccccacctgtggctgcgcgcggggtgggctgcgctcccctgggcggcgccgggcgcccggggctggtggcgagatgggccgctactctggcaagacgtgccggctgctcttcatgctggtgctcaccgtcgccttcttcgtggcggagctggtctccggctacctgggcaactccatcgcgctgctctccgactccttcaacatgctctccgacctgatctcgctgtgcgtgggcctgagcgccggctacatcgcccggcgccccacccggggcttcagcgccacctacggctacgcccgcgccgaggtggtgggcgcgctgagcaacgcggtcttcctcaccgcgctctgcttcaccatcttcgtggaggccgtgctgcgcctggcccggcccgagcgcatcgatgaccccgagctggtgctcatcgtcggcgtcctggggctgttggtcaacgtggtggggctgctcatcttccaggactgcgccgcctggttcgcgtgctgcctccggggacgcagtcgccgcctgcagcagcggcagcagctggcggagggctgtgtccccggcgctttcggggggcctcagggcgcggaggacccgcggcgcgcggcggacccgacagccccaggctcggactcggccgtaaccctccgggggacctcggtggaaaggaagcgggagaagggggcgaccgtgttcgcaaacgtagcaggtgattccttcaacacccagaatgagccagaagacatgatgaaaaaagagaaaaagtctgaagctctgaatatcagaggtgtacttttgcatgtgatgggagatgccctggggtccgtggttgtggtcatcacggccatcatattctatgtgcttcccctgaagagtgaggacccgtgtaactggcagtgttacattgaccccagcctgactgtcctcatggtcatcatcattttgtcatctgccttcccgcttatcaaggagaccgctgccattctgctacagatggtcccaaaaggagtcaacatggaagagctgatgagtaaactctctgctgtgcctggaattagcagtgtacatgaagtgcacatctgggaacttgtaagtggaaagattattgccaccctgcacatcaagtatcctaaggacaggggatatcaagatgccagcacaaaaattcgagaaatcttccaccatgcgggaatccacaatgtgaccatccagtttgaaaatgtggacttgaaggaacccctggagcagaaggacttactgttgctctgcaactcaccctgcatctccaagggctgtgctaagcagctgtgttgtccccccggggcactgcctctggctcacgtcaatggctgtgctgagcacaatggtgggccctctctagacacatacggaagtgatggcctcagtagaagagacgcaagagaagtggctattgaagtgtctttggatagctgtctgagtgaccacggacaaagtcttaacaaaactcaggaggaccaatgttatgtcaacagaacgcatttttaatctggtactcacataatcagaccatatagacgaggcactttggaaccacaagcttggctcacaaaaagagctttctgggttgtaggcccagactagacttgcagcatgcatgctctgtgttcactaggggttggctgtttgggattttagttaaacgtgtctgtgaatttttatgtaactaactcctttccattcccctgggtgtctcatgctgctctttgactgtttcagcttgaacatgcattttctaaagcaaactgcactagtgtatatatcagggacattaaagtctggg

SEQ ID NO: 199834 - DNA, 883 bp, Artificial Sequence
  derived and/or modified sequence
actgcccccgccactcctttagactctggacgtgcggggactggtggcgctcggcctcgcgttataaaaagcggtggggcagggccggcgagacaatctgggaggcgggtaccgggcctcacggatccgcgccgcgccccccacctgtggctgcgcgcggggtgggctgcgctcccctgggcggcgccgggcgcccggggctggtggcgagatgggccgctactctggcaagacgtgccggctgctcttcatgctggtgctcaccgtcgccttcttcgtggcggagctggtctccggctacctgggcaactccatcgcgctgctctccgactccttcaacatgctctccgacctgatctcgctgtgcgtgggcctgagcgccggctacatcgcccggcgccccacccggggcttcagcgccacctacggctacgcccgcgccgaggtggtgggcgcgctgagcaacgcggtcttcctcaccgcgctctgcttcaccatcttcgtggaggccgtgctgcgcctggcccggcccgagcgcatcgatgaccccgagctggtgctcatcgtcggcgtcctggggctgttggtcaacgtggtggggctgctcatcttccaggactgcgccgcctggttcgcgtgctgcctccggggacgcagtcgccgcctgcagcagcggcagcagctggcggagggctgtgtccccggcgctttcggggggcctcagggcgcggaggacccgcggcgcgcggcggacccgacagccccaggctcggactcggccgtaaccctccgggggacctcggtggaaaggaagcgggagaagggggcgaccgtgttcgcaaacgtagcagaacttatacacaacacaaggtttcttctttga

SEQ ID NO: 199835 - DNA, 1458 bp, Artificial Sequence
  derived and/or modified sequence
atgggcagatacagcggcaagacctgcagactgctgttcatgctggtgctgaccgtggccttcttcgtggccgagctggtgagcggctacctgggcaacagcatcgccctgctgagcgacagcttcaacatgctgagcgacctgatcagcctgtgcgtgggcctgagcgccggctacatcgccagaagacccaccagaggcttcagcgccacctacggctacgccagagccgaggtggtgggcgccctgagcaacgccgtgttcctgaccgccctgtgcttcaccatcttcgtggaggccgtgctgagactggccagacccgagagaatcgacgaccccgagctggtgctgatcgtgggcgtgctgggcctgctggtgaacgtggtgggcctgctgatcttccaggactgcgccgcctggttcgcctgctgcctgagaggcagaagcagaagactgcagcagagacagcagctggccgagggctgcgtgcccggcgccttcggcggcccccagggcgccgaggaccccagaagagccgccgaccccaccgcccccggcagcgacagcgccgtgaccctgagaggcaccagcgtggagagaaagagagagaagggcgccaccgtgttcgccaacgtggccggcgacagcttcaacacccagaacgagcccgaggacatgatgaagaaggagaagaagagcgaggccctgaacatcagaggcgtgctgctgcacgtgatgggcgacgccctgggcagcgtggtggtggtgatcaccgccatcatcttctacgtgctgcccctgaagagcgaggacccctgcaactggcagtgctacatcgaccccagcctgaccgtgctgatggtgatcatcatcctgagcagcgccttccccctgatcaaggagaccgccgccatcctgctgcagatggtgcccaagggcgtgaacatggaggagctgatgagcaagctgagcgccgtgcccggcatcagcagcgtgcacgaggtgcacatctgggagctggtgagcggcaagatcatcgccaccctgcacatcaagtaccccaaggacagaggctaccaggacgccagcaccaagatcagagagatcttccaccacgccggcatccacaacgtgaccatccagttcgagaacgtggacctgaaggagcccctggagcagaaggacctgctgctgctgtgcaacagcccctgcatcagcaagggctgcgccaagcagctgtgctgcccccccggcgccctgcccctggcccacgtgaacggctgcgccgagcacaacggcggccccagcctggacacctacggcagcgacggcctgagcagaagagacgccagagaggtggccatcgaggtgagcctggacagctgcctgagcgaccacggccagagcctgaacaagacccaggaggaccagtgctacgtgaacagaacccacttctag

SEQ ID NO: 199836 - DNA, 672 bp, Artificial Sequence
  derived and/or modified sequence
atgggcagatacagcggcaagacctgcagactgctgttcatgctggtgctgaccgtggccttcttcgtggccgagctggtgagcggctacctgggcaacagcatcgccctgctgagcgacagcttcaacatgctgagcgacctgatcagcctgtgcgtgggcctgagcgccggctacatcgccagaagacccaccagaggcttcagcgccacctacggctacgccagagccgaggtggtgggcgccctgagcaacgccgtgttcctgaccgccctgtgcttcaccatcttcgtggaggccgtgctgagactggccagacccgagagaatcgacgaccccgagctggtgctgatcgtgggcgtgctgggcctgctggtgaacgtggtgggcctgctgatcttccaggactgcgccgcctggttcgcctgctgcctgagaggcagaagcagaagactgcagcagagacagcagctggccgagggctgcgtgcccggcgccttcggcggcccccagggcgccgaggaccccagaagagccgccgaccccaccgcccccggcagcgacagcgccgtgaccctgagaggcaccagcgtggagagaaagagagagaagggcgccaccgtgttcgccaacgtggccgagctgatccacaacaccagattcctgctgtag

SEQ ID NO: 199837 - protein, 980 aa, Artificial Sequence
  derived and/or modified sequence
MATAATSPALKRLDLRDPAALFETHGAEEIRGLERQVRAEIEHKKEELRQMVGERYRDLIEAADTIGQMRRCAVGLVDAVKATDQYCARLRQAGSAAPRPPRAQQPQQPSQEKFYSMAAQIKLLLEIPEKIWSSMEASQCLHATQLYLLCCHLHSLLQLDSSSSRYSPVLSRFPILIRQVAAASHFRSTILHESKMLLKCQGVSDQAVAEALCSIMLLEESSPRQALTDFLLARKATIQKLLNQPHHGAGIKAQICSLVELLATTLKQAHALFYTLPEGLLPDPALPCGLLFSTLETITGQHPAGKGTGVLQEEMKLCSWFKHLPASIVEFQPTLRTLAHPISQEYLKDTLQKWIHMCNEDIKNGITNLLMYVKSMKGLAGIRDAMWELLTNESTNHSWDVLCRRLLEKPLLFWEDMMQQLFLDRLQTLTKEGFDSISSSSKELLVSALQELESSTSNSPSNKHIHFEYNMSLFLWSESPNDLPSDAAWVSVANRGQFASSGLSMKAQAISPCVQNFCSALDSKLKVKLDDLLAYLPSDDSSLPKDVSPTQAKSSAFDRYADAGTVQEMLRTQSVACIKHIVDCIRAELQSIEEGVQGQQDALNSAKLHSVLFMARLCQSLGELCPHLKQCILGKSESSEKPAREFRALRKQGKVKTQEIIPTQAKWQEVKEVLLQQSVMGYQVWSSAVVKVLIHGFTQSLLLDDAGSVLATATSWDELEIQEEAESGSSVTSKIRLPAQPSWYVQSFLFSLCQEINRVGGHALPKVTLQEMLKSCMVQVVAAYEKLSEEKQIKKEGAFPVTQNRALQLLYDLRYLNIVLTAKGDEVKSGRSKPDSRIEKVTDHLEALIDPFDLDVFTPHLNSNLHRLVQRTSVLFGLVTGTENQLAPRSSTFNSQEPHNILPLASSQIRFGLLPLSMTSTRKAKSTRNIETKAQVVPPARSTAGDPTVPGSLFRQLVSEEDNTSAPSLFKLGWLSSMTK

SEQ ID NO: 199838 - protein, 940 aa, Artificial Sequence
  derived and/or modified sequence
MATAATSPALKRLDLRDPAALFETHGAEEIRGLERQVRAEIEHKKEELRQMVGERYRDLIEAADTIGQMRRCAVGLVDAVKATDQYCARLRQAGSAAPRPPRAQQPQQPSQEKFYSMAAQIKLLLEIPEKIWSSMEASQCLHATQLYLLCCHLHSLLQLDSSSSRYSPVLSRFPILIRQVAAASHFRSTILHESKMLLKCQGVSDQAVAEALCSIMLLEESSPRQALTDFLLARKATIQKLLNQPHHGAGIKAQICSLVELLATTLKQAHALFYTLPEGLLPDPALPCGLLFSTLETITGQHPAGKGTGVLQEEMKLCSWFKHLPASIVEFQPTLRTLAHPISQEYLKDTLQKWIHMCNEDIKNGITNLLMYVKSMKGLAGIRDAMWELLTNESTNHSWDVLCRRLLEKPLLFWEDMMQQLFLDRLQTLTKEGFDSISSSSKELLVSALQELESSTSNSPSNKHIHFEYNMSLFLWSESPNDLPSDAAWVSVANRGQFASSGLSMKAQAISPCVQNFCSALDSKLKVKLDDLLAYLPSDDSSLPKDVSPTQAKSSAFDRYADAGTVQEMLRTQSVACIKHIVDCIRAELQSIEEGVQGQQDALNSAKLHSVLFMARLCQSLGELCPHLKQCILGKSESSEKPAREFRALRKQGKVKTQEIIPTQAKWQEVKEVLLQQSVMGYQVWSSAVVKVLIHGFTQSLLLDDAGSVLATATSWDELEIQEEAESGSSVTSKIRLPAQPSWYVQSFLFSLCQEINRVGGHALPKVTLQEMLKSCMVQVVAAYEKLSEEKQIKKEGAFPVTQNRALQLLYDLRYLNIVLTAKGDEVKSGRSKPDSRIEKVTDHLEALIDPFDLDVFTPHLNSNLHRLVQRTSVLFGLVTGTENQLAPRSSTFNSQEPHNILPLASSQIRFGLLPLSMTSTRKAKSTRNIETKAQYDANC

SEQ ID NO: 199839 - DNA, 2943 bp, Artificial Sequence
  derived and/or modified sequence
atggctactgccgccacttcaccagccctgaagcggctggacttaagagaccctgctgcgctttttgaaacacatggagcagaagaaatccgtggacttgaacgccaggtgagggctgagattgagcacaagaaggaggagctaagacagatggttggggaacggtacagggacttgatcgaagcagccgatactatcggccagatgcggcgctgcgctgtcgggctggtcgatgctgtgaaggctactgatcagtattgcgcccgattgagacaggcaggttctgccgccccaaggccaccacgggcacagcagcctcagcagcccagccaggaaaagttctattccatggcggcccagataaagcttctacttgaaatccctgagaagatctggtcctccatggaagcaagccagtgtctgcatgccactcaactgtacctgctgtgttgccaccttcacagtctccttcagctggactcctccagtagccgatacagcccagtgctgtccagattccctattctcatacgacaggttgctgccgctagtcactttagatcaactattcttcatgaaagcaaaatgttgctgaagtgtcaaggagtgtctgatcaggctgtcgcagaagcactgtgtagtatcatgctgctggaggagtccagcccaagacaggctttaacagatttcttgctggccaggaaagcgaccatccagaagctgctgaaccagccccatcacggcgccggcattaaggcacaaatctgctctctcgtggagctcctggccaccacactgaagcaggcccatgcactcttttataccctgcctgaagggctgttacctgatcctgcactgccgtgtggactgttattttccacgctggaaacaataacagggcagcaccctgcgggtaaggggacgggcgtgctgcaagaggagatgaaactgtgcagctggttcaaacacttaccggcatccatagtcgaattccagccgacattgaggaccctggcacaccctatctctcaagagtacctaaaagatacgctccaaaaatggattcacatgtgcaacgaggacattaaaaacggtatcaccaatctgctgatgtatgttaaatctatgaaggggcttgccggaatccgcgacgctatgtgggaactgttgaccaacgaatcaaccaaccatagttgggatgtgctgtgtcggcggctgctagaaaagcctctgttgttctgggaggacatgatgcaacagctgttcctcgacaggctccaaacattaacaaaagagggatttgatagtatttcttctagctcaaaggagctactggttagcgccctgcaagaactggagtcttcaaccagcaatagtccctccaacaagcatatccacttcgagtataacatgtccctgttcctgtggagcgagtcccctaacgatcttccctcggatgccgcatgggtctccgttgctaatcggggccagtttgctagctccggactcagcatgaaggcccaggccatctccccttgtgtgcagaacttttgttcagctcttgactcaaagcttaaggtcaagttagatgacctgctggcttaccttccttccgacgatagctctttacctaaggacgtgagcccaactcaagcaaaaagtagcgcctttgaccgctatgccgacgcaggcaccgtgcaagaaatgctaagaacccaatctgtggcgtgtattaagcacatcgtggactgcatccgggccgagctccagtccatcgaagaaggcgtgcaggggcagcaggatgctctgaactctgccaagcttcacagcgttcttttcatggcacgactatgtcagtccctgggcgaattgtgtcctcatttaaagcaatgcattttgggaaagagtgagagttccgaaaaacccgctcgtgaatttcgtgccttaaggaagcaggggaaagtgaaaacacaggaaatcatccctacgcaggctaaatggcaggaggtgaaagaggttcttttacaacaaagtgtgatggggtaccaggtctggagtagcgctgtagttaaggtgctgatccatggcttcacacagtcactgctgctggatgatgccggatccgtgctggccacggccacgagctgggacgagctcgaaatccaggaagaggccgaatccggatcgtccgttactagcaagatcaggttaccggcccagccaagctggtacgtgcagtcttttctgttttccttgtgccaagagatcaatcgggtcggcggtcatgccttgcctaaagttacattacaggaaatgctgaagagctgcatggttcaagttgtggctgcttatgagaaattgagcgaggagaagcaaatcaagaaggaaggcgccttccctgtgacccaaaatcgcgcactccagctcctgtatgacctgcgatacctgaacattgtgttgacagccaaaggggacgaagtcaagtccggacggtccaaaccagactcacgcatcgagaaggtcacagaccatctagaagccctaatagatccatttgatctggatgttttcacccctcacctaaatagcaatctgcaccgactcgtgcagaggacctctgtgttgtttgggctggtgacaggaactgagaaccaattggcacctcgctcttccaccttcaatagtcaggaaccgcacaacatccttccgctcgcatccagccagattcgctttggacttctgcccttaagcatgacgtcaacccggaaggcaaagtccacacggaatattgaaacaaaggcccaagtggttcctcccgccagatctaccgctggggaccctactgtaccaggcagtctgtttagacaactggtgtctgaagaagacaacacgtctgccccatctctgtttaagttgggttggctgtcttcaatgactaaatag

SEQ ID NO: 199840 - DNA, 2823 bp, Artificial Sequence
  derived and/or modified sequence
atggcaacggcagccacaagccccgccctgaagaggctggatttacgcgaccctgccgctctgtttgaaactcacggagccgaagagatacgcggacttgagagacaggtgcgagcggagattgaacacaagaaggaggagctgaggcagatggtaggcgagcggtaccgtgacctgatcgaagcagcggacacaattggccaaatgaggagatgcgccgtggggctcgtggacgcagttaaagccacagatcaatattgcgcgcgactgcgtcaggcaggtagcgccgcaccgcggccaccaagagcacagcagccccagcagcccagtcaggagaagttctactcgatggcagcgcagataaaactacttttggagatcccagagaaaatttggagctccatggaagcctcccagtgcctccatgctacacagttatacctattatgttgccatttacactccctgctgcagttggacagttctagctcccgctatagccctgtgctgtcccggttcccaatcctcataagacaggtagccgctgcatcacacttcagatccacgatcttacacgaaagtaaaatgctcctgaagtgccagggggtgagcgaccaggcagtcgcagaggcgctttgcagcatcatgctgcttgaagaaagttcaccaaggcaggcactgacagactttcttttggcgcggaaggcgactatccagaagctccttaatcagccgcaccacggggccggaattaaggctcaaatatgtagcctagtagagctgcttgccactacgttaaaacaggcacacgccctgttttacactctaccagagggcctgctgccagatccagccctgccttgcggactactgttcagtacgttggagacaatcactggacagcatcccgctggcaaaggcactggcgtcttgcaagaagagatgaaactgtgcagttggttcaagcatttgcctgcctccatagtggagttccagcctacattgaggacgctggcacatcccatctcccaagagtatctgaaggacacgctgcagaagtggattcatatgtgcaacgaggatattaagaacggcattacaaacttgctgatgtatgtgaaaagcatgaagggacttgcgggtatcagggacgctatgtgggagctcctgacaaatgaatctacaaaccacagctgggacgtgctgtgccgacgacttctagagaagccactcctgttctgggaagatatgatgcagcagctctttctggatcgactgcagacgctgactaaagagggctttgacagcattagctcatccagtaaggaacttctggtctccgctctccaggaattggaatccagtacaagtaattccccttctaacaagcacattcactttgaatataacatgtctctcttcttatggtcagagtctcctaacgacctgccctcggacgctgcttgggtgtccgtggcaaacagaggacagttcgcttcctcaggcctttctatgaaagcccaggccatcagcccatgcgtccagaatttttgcagcgctcttgatagtaaactaaaagtgaagctggacgacctgttggcttacctgccttccgatgactcaagcctcccgaaggatgtgtctcccacccaggccaaatccagcgcctttgataggtacgccgacgccggcactgtccaggaaatgttaaggacacagagcgtggcctgcatcaagcatatagtggactgcatcagggcagagctacaaagtatcgaggagggtgtacagggtcagcaggatgcactgaacagtgctaagttgcatagtgtcctcttcatggcccgcctgtgtcagtccctcggcgaactgtgcccccacctgaaacagtgcatcctgggcaagtctgagagctccgaaaaacccgccagggaattcagggccctgagaaagcaagggaaagtcaaaacacaagagattatacccactcaggccaagtggcaggaggtcaaagaggtgctattacaacagtccgtcatgggctaccaggtctggtccagtgccgtcgtgaaagtcctaatccacgggtttactcaaagcctcctgctggatgacgcgggtagcgttctggccacggctacaagttgggatgaactcgaaatccaggaagaggccgaaagtgggagtagtgtaacatcaaaaatcaggctccccgctcagccttcttggtacgtgcaaagctttcttttttcactatgccaggaaatcaatcgggttggcggccacgcactccctaaggtaaccctgcaggagatgttaaagtcctgtatggtccaggtggtcgcagcatacgagaagctgtccgaggaaaagcaaatcaaaaaggaaggcgccttcccagtcacacagaaccgggccttgcagttgctgtacgatctgagatatctgaacattgttctcacagcaaaaggcgacgaggtcaagtctggccgatctaagcccgattcacggatagagaaagtaaccgaccacctggaggccttgatcgacccgtttgatctggacgttttcacccctcatctgaatagcaatttacaccggctggtacagcgaacctctgttctgttcggactggttacaggcactgagaatcagctggctccgcgtagctcgacatttaactcccaggaacctcataatattctccccctggctagttcacaaataaggtttggcctgctgccactgtcgatgacttctacccgaaaagcaaaatctacaaggaacatcgagaccaaggcccaatacgacgccaactgctag

SEQ ID NO: 199841 - DNA, 2943 bp, Artificial Sequence
  derived and/or modified sequence
atggccacagctgccaccagccctgccctgaagaggctggacctgcgggaccctgctgccctgtttgagacccatggagctgaggagatccggggcctggagcggcaggtgcgggcagaaattgagcacaagaaggaggagctgcggcagatggtgggggagcgctacagagacctgattgaggccgctgacaccatcggccagatgaggcgctgtgctgtgggcctggtggatgctgtgaaggccacagaccagtactgtgcccggctgcggcaggccggcagcgctgccccccggcccccccgggcccagcagccccagcagcccagccaggagaagttctacagcatggccgcccagatcaagctgctgctggagatccctgagaagatctggagctccatggaggccagccagtgcctgcacgccacccagctgtacctgctgtgctgccacctgcacagcctgctgcagctggacagcagcagcagccgctacagccctgtgctgagccgcttccccatcctgatccggcaggtggccgccgccagccacttccgcagcaccatcctgcacgagagcaagatgctgctgaagtgccagggcgtgtctgaccaggccgtggccgaggccctgtgcagcatcatgctgctggaggagagcagcccccggcaggccctgacagacttcctgctggccaggaaggccaccatccagaagctgctgaaccagccccaccacggggccggcatcaaggcccagatctgcagcctggtggagctgctggccaccaccctgaagcaggcccacgccctcttctacaccctgcctgagggcctgctgcctgaccctgccctgccctgtggcctgctcttcagcaccctggagaccatcaccggccagcaccctgctgggaagggcaccggggtgctgcaggaggagatgaagctgtgctcctggttcaagcacctgcctgccagcatcgtggagttccagcccaccctgcggaccctggcccaccccatcagccaggagtacctgaaggacaccctgcagaagtggatccacatgtgcaatgaagacatcaagaatggcatcaccaacctgctgatgtatgtgaagtccatgaagggcctggccggcatcagagatgccatgtgggagctgctgaccaatgaaagcaccaaccacagctgggatgtgctgtgccggcggctgctggagaagcccctgctcttctgggaggacatgatgcagcagctgttcctggaccggctgcagaccctgaccaaggagggctttgacagcatcagcagcagcagcaaggagctgctggtgtctgccctgcaggagctggagagcagcaccagcaacagccccagcaacaagcacatccactttgagtacaacatgagcctcttcctgtggagcgagagccccaatgacctgcccagtgatgctgcctgggtgtctgtggccaacagaggccagtttgccagcagcggcctgtccatgaaggcccaggccatcagcccctgtgtgcagaacttctgcagcgccctggacagcaagctgaaggtgaagctggatgacctgctggcctacctgcccagtgatgacagcagcctgcccaaggatgtgagccccacccaggccaagagcagcgcctttgacagatatgcagatgctggcaccgtgcaggagatgctgcggacccagagcgtggcctgcatcaagcacatcgtggactgcatccgggcagagctgcagagcattgaggagggcgtgcagggccagcaggatgccctgaacagcgccaagctgcacagcgtgctcttcatggcccggctgtgccagagcctgggggagctgtgcccccacctgaagcagtgcatcctgggcaagtctgagagcagcgagaagccagcccgggagttccgggccctgaggaagcagggcaaggtgaagacccaggagatcatccccacccaggccaagtggcaggaggtgaaggaggtgctgctgcagcagagcgtgatgggctaccaggtgtggagcagcgctgtggtgaaggtgctgattcatggcttcacccagagcctgctgctggatgatgctggctctgtgctggccacagccacctcctgggatgagctggagatccaggaggaggccgagagcggcagctctgtgaccagcaagatccggctgcctgcccagcccagctggtacgtgcagagcttcctgttcagcctgtgccaggagatcaacagagtgggcggccacgccctgcccaaggtgaccctgcaggagatgctgaagagctgcatggtgcaggtggtggccgcctatgagaagctgtctgaggagaagcagatcaagaaggagggcgccttccctgtgacccagaacagagccctgcagctgctgtatgacctgcgctacctgaacatcgtgctgacagccaagggagatgaggtgaagagcggccgcagcaagccagacagccgcatcgagaaggtgacagaccacctggaggccctgattgacccctttgacctggatgtgttcaccccccacctgaacagcaacctgcaccggctggtgcagaggacctctgtgctgtttggcctggtgactggaacagagaaccagctggcccccaggagcagcaccttcaacagccaggagccccacaacatcctgcccctggccagcagccagatccgcttcggcctgctgcccctgtccatgaccagcaccaggaaggccaagagcaccaggaacatcgagaccaaggcccaggtggtgcccccagcccggagcacagctggggaccccaccgtgcccggcagcctcttccggcagctggtgtctgaggaggacaacaccagcgcccccagcctcttcaagctgggctggctgagctccatgaccaagtag

SEQ ID NO: 199842 - DNA, 2823 bp, Artificial Sequence
  derived and/or modified sequence
atggccacagctgccaccagccctgccctgaagaggctggacctgcgggaccctgctgccctgtttgagacccatggagctgaggagatccggggcctggagcggcaggtgcgggcagaaattgagcacaagaaggaggagctgcggcagatggtgggggagcgctacagagacctgattgaggccgctgacaccatcggccagatgaggcgctgtgctgtgggcctggtggatgctgtgaaggccacagaccagtactgtgcccggctgcggcaggccggcagcgctgccccccggcccccccgggcccagcagccccagcagcccagccaggagaagttctacagcatggccgcccagatcaagctgctgctggagatccctgagaagatctggagctccatggaggccagccagtgcctgcacgccacccagctgtacctgctgtgctgccacctgcacagcctgctgcagctggacagcagcagcagccgctacagccctgtgctgagccgcttccccatcctgatccggcaggtggccgccgccagccacttccgcagcaccatcctgcacgagagcaagatgctgctgaagtgccagggcgtgtctgaccaggccgtggccgaggccctgtgcagcatcatgctgctggaggagagcagcccccggcaggccctgacagacttcctgctggccaggaaggccaccatccagaagctgctgaaccagccccaccacggggccggcatcaaggcccagatctgcagcctggtggagctgctggccaccaccctgaagcaggcccacgccctcttctacaccctgcctgagggcctgctgcctgaccctgccctgccctgtggcctgctcttcagcaccctggagaccatcaccggccagcaccctgctgggaagggcaccggggtgctgcaggaggagatgaagctgtgctcctggttcaagcacctgcctgccagcatcgtggagttccagcccaccctgcggaccctggcccaccccatcagccaggagtacctgaaggacaccctgcagaagtggatccacatgtgcaatgaagacatcaagaatggcatcaccaacctgctgatgtatgtgaagtccatgaagggcctggccggcatcagagatgccatgtgggagctgctgaccaatgaaagcaccaaccacagctgggatgtgctgtgccggcggctgctggagaagcccctgctcttctgggaggacatgatgcagcagctgttcctggaccggctgcagaccctgaccaaggagggctttgacagcatcagcagcagcagcaaggagctgctggtgtctgccctgcaggagctggagagcagcaccagcaacagccccagcaacaagcacatccactttgagtacaacatgagcctcttcctgtggagcgagagccccaatgacctgcccagtgatgctgcctgggtgtctgtggccaacagaggccagtttgccagcagcggcctgtccatgaaggcccaggccatcagcccctgtgtgcagaacttctgcagcgccctggacagcaagctgaaggtgaagctggatgacctgctggcctacctgcccagtgatgacagcagcctgcccaaggatgtgagccccacccaggccaagagcagcgcctttgacagatatgcagatgctggcaccgtgcaggagatgctgcggacccagagcgtggcctgcatcaagcacatcgtggactgcatccgggcagagctgcagagcattgaggagggcgtgcagggccagcaggatgccctgaacagcgccaagctgcacagcgtgctcttcatggcccggctgtgccagagcctgggggagctgtgcccccacctgaagcagtgcatcctgggcaagtctgagagcagcgagaagccagcccgggagttccgggccctgaggaagcagggcaaggtgaagacccaggagatcatccccacccaggccaagtggcaggaggtgaaggaggtgctgctgcagcagagcgtgatgggctaccaggtgtggagcagcgctgtggtgaaggtgctgattcatggcttcacccagagcctgctgctggatgatgctggctctgtgctggccacagccacctcctgggatgagctggagatccaggaggaggccgagagcggcagctctgtgaccagcaagatccggctgcctgcccagcccagctggtacgtgcagagcttcctgttcagcctgtgccaggagatcaacagagtgggcggccacgccctgcccaaggtgaccctgcaggagatgctgaagagctgcatggtgcaggtggtggccgcctatgagaagctgtctgaggagaagcagatcaagaaggagggcgccttccctgtgacccagaacagagccctgcagctgctgtatgacctgcgctacctgaacatcgtgctgacagccaagggagatgaggtgaagagcggccgcagcaagccagacagccgcatcgagaaggtgacagaccacctggaggccctgattgacccctttgacctggatgtgttcaccccccacctgaacagcaacctgcaccggctggtgcagaggacctctgtgctgtttggcctggtgactggaacagagaaccagctggcccccaggagcagcaccttcaacagccaggagccccacaacatcctgcccctggccagcagccagatccgcttcggcctgctgcccctgtccatgaccagcaccaggaaggccaagagcaccaggaacatcgagaccaaggcccagtatgatgccaactgctag

SEQ ID NO: 199843 - DNA, 2943 bp, Artificial Sequence
  derived and/or modified sequence
atggccaccgccgccaccagccccgccctgaagcggctggacctgagagacccagctgctcttttcgaaacccacggagccgaagagattcgaggactcgaacgacaagtacgcgctgagatcgagcacaagaaggaggagttaaggcagatggtgggtgagcgctatagggatctgattgaggccgctgacaccatcggacaaatgcggcggtgtgccgtgggccttgtggacgctgttaaggcaaccgatcagtattgtgcgcgcttgcggcaggccgggtctgccgcgccacgtcccccccgagctcagcagccccaacagcccagccaggagaagttctactctatggcagcacagataaaacttctgctagagatccctgagaagatttggtccagtatggaagcctcccaatgtttacacgcaacgcaactgtatctgctgtgctgccatttgcacagccttcttcagctggacagtagttcttctaggtacagcccagtgctttctcggtttccgattctcatcagacaggtggccgccgcctcgcactttcggtctactatcctgcacgaatctaagatgctgctaaagtgtcaaggcgttagcgaccaggccgtggctgaagctttatgctccatcatgctacttgaagagagttctcctaggcaagcgttgacggatttcttacttgccagaaaggccactatccaaaagctgctcaatcagccccatcacggcgccgggatcaaagcacagatctgctcgttggttgagctgctcgcaactaccctcaagcaggcccacgccctcttttatacactccctgaaggcctactacctgaccccgcactgccttgtgggctgctgttcagtaccctagaaaccatcactgggcagcatccagctggcaagggcactggggtcctccaagaggaaatgaaactatgctcctggttcaaacacttgccagcaagcatcgtcgagtttcagccaacacttagaactctggcgcacccaattagtcaggaatacttaaaggatacactacagaagtggatccacatgtgcaatgaagacataaaaaacggaataactaatctgctgatgtatgtgaaaagcatgaaagggcttgcgggaattagagacgcaatgtgggagctgttgacgaacgaaagtaccaatcacagttgggacgtgctgtgtcgaaggctgctcgagaagccccttcttttttgggaggacatgatgcaacagctgtttctcgacagattacagaccttgaccaaggagggatttgatagcatctcctcatcatcaaaagaactgcttgtctccgcactccaggaacttgagagttccacctctaatagccccagtaacaaacatattcacttcgagtataatatgagtttgttcctgtggagtgaaagccccaatgacctgcccagcgacgctgcttgggtaagtgtcgccaacaggggacaatttgccagctccggcctgagcatgaaagcccaggccatcagcccatgtgtccaaaacttctgtagcgccctggactctaaactcaaggtcaaacttgacgatcttctggcatacctgccatcagatgacagttctttgcccaaggatgtatctccaacccaggcaaaaagctccgcgttcgatagatacgctgatgccggaactgttcaggagatgctacgcacgcagtcggttgcgtgtatcaagcatatcgtggattgtatcagagctgaactgcagagcatcgaggagggcgtccagggacagcaggatgctcttaacagtgctaaactccacagtgttctgtttatggcacgtctctgccagagcctgggagagctgtgcccccatctgaagcagtgcatcctgggaaagtcagagtctagcgagaagccggccagggaatttcgcgctcttcggaaacagggcaaggtcaagactcaagagatcatccctacccaggccaaatggcaagaggtaaaggaggtcttacttcagcagagcgtgatgggttaccaggtgtggtcctccgccgtggtcaaagtgctcatccacggcttcacgcagtcgctgctgctcgacgacgccggctcggtgctggcgacagccacctcttgggacgaattggagatacaggaggaggcagaatcgggcagcagtgtgaccagcaaaatccgactgcctgcccagcccagttggtatgttcaaagcttcctcttcagcctgtgtcaggaaatcaaccgagttggaggccatgctcttccaaaagtgactctgcaagaaatgctgaaaagctgtatggtgcaggtcgtcgctgcttacgaaaagcttagcgaggagaagcagatcaagaaagagggggccttcccagtgacgcagaatcgggccctccaactcctctatgatttgagatacctgaacattgtgttgaccgcgaagggggatgaggtgaagagcggcaggagtaagcccgactcaaggatcgagaaagtgactgatcatctcgaagccttaatcgatccctttgatctggatgttttcacccctcatcttaacagtaaccttcaccgcctcgtgcaacggacaagtgtactgttcgggctcgttacaggcacggaaaaccagttggctccacggtctagcactttcaattcccaggaaccccataatatcctgccactggcatcctctcagattagattcggcttactcccccttagcatgacctctacccggaaggccaaaagtacgcggaatattgagaccaaagcccaagttgtgcctcccgccagatctactgcaggggacccgacagtacccggcagtctctttcggcagcttgtatccgaagaagataacactagcgctccttctctctttaaacttggatggctgtcgtcgatgaccaagtag

SEQ ID NO: 199844 - DNA, 2823 bp, Artificial Sequence
  derived and/or modified sequence
atggccaccgccgccaccagccccgccctgaagcggctggacctgcgggacccagccgcgttattcgagacacacggggccgaagagatccgggggctcgagagacaagtccgggctgaaattgaacataaaaaggaggagctgaggcagatggtcggggagaggtatcgggatttgatcgaggcggcagacaccatcggccagatgagacgatgtgctgtcgggctggtggacgcggtcaaagcgacggatcagtactgcgcgagacttcgtcaggcgggtagcgccgctccccgaccccctcgcgcccaacagcctcagcagccctcccaggagaagttttactccatggccgcacagatcaagctactcctcgagatcccagagaagatttggagttctatggaggcttcccagtgcctccatgctacccagctttatttgctatgttgccacctacattccttacttcaactggacagtagctcttccagatactctcctgtgctctctagatttcctattttaatcagacaggttgccgccgcctctcatttccgcagtacaattttacatgagtctaaaatgttactgaaatgtcaaggcgtgagcgaccaagcagtcgcagaagccctttgcagcattatgctgctggaagagtctagcccccggcaggcacttacagacttcctgttggccaggaaagccacaattcagaagctgctcaaccaaccccatcacggggccgggattaaagcccagatctgcagtctggtggaattgttagccaccaccctaaagcaggcacatgctctgttctacactttaccggagggcctcctcccagaccccgcactcccctgcggcctgcttttttccacactcgaaactattacagggcagcatccggcaggaaagggtactggcgtcttgcaggaggaaatgaagctgtgtagctggtttaaacacttgcccgctagcatcgttgagttccagcccaccctgagaaccctggcccacccaattagccaagagtatctgaaagatactttgcaaaaatggatccacatgtgcaacgaagacattaaaaatggaatcaccaacctgctgatgtatgtgaagagtatgaaaggactagcgggcatccgggatgccatgtgggagttgcttaccaatgagtcgacaaaccacagttgggacgtgctctgccgtagattactagagaagcccctgctgttctgggaggatatgatgcaacagctctttttagacagactccagacactgaccaaagagggatttgatagcatcagctcatcttccaaggaactcctcgtgagtgcgctacaggaactggagagttccacaagcaacagcccctcaaataaacacatccacttcgagtacaacatgtctctctttctctggagtgagagtcccaatgacctgccctctgacgcagcctgggtgtcagtggctaacagagggcagttcgccagcagtggcctgtcaatgaaagctcaggctatatccccgtgtgtgcagaacttttgctccgccctcgactcaaaactaaaggtaaaactggacgatctcctcgcgtaccttccaagtgacgattccagcctgcccaaagacgtcagccctactcaggccaaatcaagcgcgtttgatagatatgccgatgccgggacggtgcaggagatgctgcgaacacagtctgtggcatgcatcaaacatatcgtagattgtattcgagcagagctccagtccatcgaggaaggggtccagggacagcaggatgcgcttaactccgcaaaactgcactctgtgctgtttatggcccgtctgtgccaatctctgggcgagctctgtcctcacctgaagcagtgtatcctaggaaagtccgagtcatccgaaaaaccagccagagaattccgcgccttgcgtaagcagggcaaagtcaagactcaggaaattatccccacacaggcaaagtggcaggaagtgaaggaggtgctgctgcagcaatctgttatgggatatcaggtgtggtccagtgccgttgtgaaagtcctcatacacggattcacacagtctctactcctggacgatgcaggatctgtccttgccacagctactagctgggacgagttggagattcaggaagaagctgaatctggctcttcagtgactagtaaaatccggttaccggcacagccatcctggtatgtgcagtccttcctgttcagcttgtgtcaggaaatcaaccgggtcggcggccatgcgctcccaaaggtgactttgcaagagatgctgaaatcatgcatggtgcaggttgtagccgcttacgaaaagctgagtgaggaaaagcaaatcaagaaggaaggcgcctttccagtaacacagaatagagccctacagttgctttacgatctccgctaccttaatatcgtgctgaccgccaaaggggacgaggtcaaaagcggaagaagtaagcctgattctcggatcgaaaaagtcacagatcacctcgaggcactgatcgaccctttcgacctggacgtgtttacacctcacctaaattcaaacctccatagactcgtgcaacgcacgagtgttctctttggcctagtgacaggcacagagaaccagctggcacctcgtagctcaacatttaattctcaggagccccataatatcctgcctcttgcatcatcacagattcggttcggactgctacccctgtccatgactagcacgcgcaaagcaaaatcaacaaggaatatagagactaaagcccagtatgacgccaattgttag

SEQ ID NO: 199845 - DNA, 2943 bp, Artificial Sequence
  derived and/or modified sequence
atggccacggcggctaccagccctgcactgaaaaggttggatctcagggatccagcagccctatttgaaacacatggggctgaagagattcgtggcttagaacggcaggtcagggccgagattgaacacaagaaggaggagctgaggcagatggttggggagcggtacagagacctgattgaggccgctgatacaatcggccagatgaggcggtgtgctgtaggtctggtggatgcagttaaggccaccgaccagtattgcgctagattgaggcaggcagggagcgccgctcctaggcctccgagggcgcaacagcctcagcagccctctcaggagaaattctattcaatggccgctcagattaagctgttgctcgaaattcctgaaaaaatttggtcctcaatggaggcctcgcagtgcttacacgctactcagctatatttgctttgctgccacctgcactctctgctccagctggacagctctagctcgcgctactcacctgtgctcagcagattccccatacttattaggcaagttgccgcagcctcccattttcggagcaccattctgcatgagagcaaaatgctgttaaaatgtcaaggcgtctccgaccaagccgtagctgaagccctgtgtagcatcatgttgcttgaggaaagttcaccaaggcaagcactgaccgatttcctcctcgcccgaaaagctaccattcaaaagctgctcaaccagcctcaccatggtgccggaattaaagcgcagatttgtagcctggtggaactgcttgccaccacgctgaagcaagcccacgctcttttctatacattgccagaaggcctgttgcctgatccggcactgccttgcggactgctcttctccactttagaaactattactggccagcacccagcagggaaaggaactggggtccttcaggaagagatgaaattgtgctcttggttcaagcacctgcccgctagcattgtggagttccagccaacactccggacattagcacaccctattagccaagaatacctcaaggacacacttcagaagtggatccatatgtgtaacgaggacattaaaaacggcataaccaacttgctgatgtacgtcaagagcatgaagggcctggctggaattcgagacgctatgtgggagctgctaactaacgagtcgactaatcactcatgggacgtgctctgtcggcgactgttggagaagcctctcttgttctgggaggacatgatgcagcaactgttcctggatcggctccagacccttactaaggaggggtttgacagcatcagttcctcatccaaggagttgttagtgtccgcactgcaggagctggagtcgagtacctccaattccccttccaataagcatattcacttcgaatacaatatgtctctgtttctttggtcagagtcgcctaatgacctcccttcggatgcagcttgggtgagtgttgcaaatagagggcagtttgcatcatcgggcctgtcgatgaaggcacaagccatcagtccctgcgtccagaacttttgttctgcccttgactccaaattgaaggtgaagctggacgacttgctggcatatctgccatccgacgactccagcttgcctaaggatgtgtctcctacccaggccaaatctagcgcgtttgacagatacgctgacgccggaaccgtgcaggagatgctgcggacgcagtcagtcgcctgtataaagcacattgtcgactgcattagagccgagctgcagtcaatcgaagaaggtgtacaagggcagcaagatgcccttaatagtgcgaaactgcactcagtattatttatggctaggctgtgtcaaagcctgggcgagctatgcccccacctgaagcagtgcatattggggaaatccgaatccagtgagaaaccagcacgcgaatttcgagccctgagaaagcaggggaaagtgaagacacaggaaatcattcccacacaggcaaaatggcaggaagtgaaggaggtcctattacagcagagtgtgatgggttatcaagtgtggtctagtgcagttgtcaaagttctcatccacggattcacccagagtttgcttctggatgacgcagggtcagtgttggccactgccacctcatgggatgagctcgaaattcaggaggaggccgaaagcggaagcagcgtgacctctaaaatcagactgcccgctcaaccctcctggtatgtgcagtcgtttctgtttagcttatgtcaggagatcaacagggtgggcggacatgcgctgcccaaggtcacactccaagaaatgttgaagtcttgtatggttcaggttgttgccgcttatgagaagctctcagaggagaagcaaatcaaaaaggagggcgcattcccggtgacccagaacagagccctgcaacttttgtacgacctgcgatacctgaacatagtccttacagccaaaggagacgaagttaaatccggacgatccaaaccagactcaagaattgaaaaagtcaccgaccatctggaagcactgatcgatccgtttgatttagatgtatttacaccacatctgaacagcaatctgcacagactcgtccagcggacatccgtcctgttcggtcttgtcaccggaacagaaaaccagctcgcaccacgaagctctaccttcaattcacaagaaccacataacattttgcctctcgcctccagccagatccgattcggattgcttcccctgtccatgacaagcacacggaaggctaaaagcacgcgtaacatcgagacaaaggctcaagtcgtgcctccagcaaggagcaccgctggtgatccaaccgtccccggatccctgttccgccaactggtctctgaggaggataacaccagtgctcccagcctctttaagcttgggtggctcagttcaatgaccaagtag

SEQ ID NO: 199846 - DNA, 2823 bp, Artificial Sequence
  derived and/or modified sequence
atggccacagctgccacttctcccgctcttaagaggctggatctaagagatcccgctgccctgtttgagactcacggtgccgaggagatcagaggcttggaaagacaggtgagagcagaaatcgaacacaagaaggaggaactaagacagatggttggtgagaggtatagggacttgatagaggccgcagacacaatcggccagatgcggaggtgtgctgtcggactggtggatgccgtcaaggcaacagatcaatattgcgcgaggcttcgccaggccggtagcgccgcacccaggcccccacgcgctcaacaacctcagcagccctcacaggaaaaattctatagcatggctgcgcaaattaagctgctgctagagatcccggaaaagatctggagtagcatggaggctagccagtgcttgcacgcaactcaactgtacctgctttgctgtcacctgcacagtctgctccagctggattcctctagttctaggtattctcctgtactatcacgctttcccattcttataaggcaggtagcagcagcaagccattttcggagcacaatattgcatgaatctaagatgctgctgaaatgtcaaggggtcagcgaccaggccgtagcggaggctctgtgctccattatgttgcttgaggaaagctccccacgtcaggctcttaccgattttctgcttgcacgcaaagctaccatacagaagttactgaatcagccccaccacggtgcagggatcaaagcccagatctgctccctggtggagctcttggcaaccacactgaagcaggcgcatgcactattctataccctacctgaaggcctgctgcccgatcccgctctgccctgtgggctcctgtttagtacactcgagaccataacaggtcagcaccctgcaggaaagggtactggcgtactgcaggaagaaatgaagctgtgcagctggttcaagcacctccccgcttccattgtcgagttccagcccacccttcggaccctcgcacaccccattagccaggagtatctgaaggacacactgcaaaagtggattcacatgtgtaatgaagatatcaagaatgggatcactaacctgctaatgtacgtgaagtctatgaagggactggctggcatcagggatgccatgtgggagcttctcactaacgagtccacgaatcattcctgggatgtattatgtaggcgccttctggagaagcccctgttattctgggaagacatgatgcagcaactgtttctagatcgactacagaccctgacgaaggaagggttcgatagtatttccagctcctctaaagaactgctggtttcggctttacaggagcttgagtcctcaacctccaacagtccatcaaataagcacattcatttcgagtacaatatgtctctttttctgtggtcagaaagccccaacgacctgcctagcgatgcagcctgggtgtctgtggccaataggggtcagttcgccagcagtggcctgtcaatgaaagctcaggcgatctctccgtgtgtgcagaatttctgctcggctttagattccaagttgaaagtcaaattggatgatctactcgcctatctgccgagcgacgattccagcctgcccaaagacgtttccccgacacaagccaagtcttccgctttcgatcgatacgccgacgccggtactgttcaggagatgcttcgcacacaaagcgtcgcctgtattaaacatatcgtggactgtataagagccgaactccagtccatagaagagggtgttcagggccagcaggacgccctgaactctgctaagctgcatagtgtgttgtttatggcaaggttgtgtcaaagtctcggggagctgtgtccccacctaaaacagtgtatcctgggtaaaagtgaatcttctgaaaaaccagccagagaattccgggctctgcgcaagcagggcaaagtcaaaactcaggagatcatacctactcaggcaaagtggcaggaagttaaggaagtcctgctacagcagtcagtcatgggatatcaggtttggtcaagtgcggtcgtcaaggtgttaatacatggctttacacagtctctcttgctggacgacgccggttctgtgctggccacagccactagctgggatgagctggagatacaagaggaagcagaaagtggctcatctgtgacctccaaaattaggctgcctgcccaaccatcttggtacgtccagtcctttctcttttctctttgtcaggagatcaatcgagtcggagggcacgctcttcccaaggtaaccctgcaggagatgctgaaaagttgtatggtgcaggtcgtggcagcatacgagaagctcagcgaagaaaagcagatcaaaaaggagggggcttttccagtgacccagaatagggcactgcagcttctgtacgatctgcggtacctgaacatcgtcttaacagcaaagggtgacgaggtcaagtccgggagatccaagccagactctcgaatagaaaaagtaaccgatcatttggaagccctaatcgatccttttgatctggacgtgttcacacctcatttgaactccaatctgcatagacttgtccagaggacaagtgttctcttcggattggttaccggcaccgaaaatcagctggcccctcggtcatcaacgttcaatagccaggagccacacaatatcctgcctctcgcctcatcccagatccgttttgggttgcttccgctctcaatgactagtaccagaaaggcaaaatcgacccgcaacatcgagaccaaggcccaatatgatgcgaattgctag

SEQ ID NO: 199847 - DNA, 3035 bp, Artificial Sequence
  derived and/or modified sequence
ggcgtaggtagatcgccgggggctgacgagtgcaccatggccaccgcggcaacctcacccgcgctgaagcggctggatctgcgcgaccctgcggctcttttcgagacgcatggagcggaggagatccgcgggctggagcgccaggttcgggccgagatcgagcacaagaaggaggagctgcggcagatggtgggcgaacggtaccgcgacctgatcgaggcggccgacaccatcggccagatgcgccgctgcgccgtggggctagtggacgccgtgaaggccaccgaccagtactgcgcccgcctccgccaggccggctcggccgcgccccggccaccgcgggcccagcagccacagcagccatcccaggagaagttctacagcatggctgcccagatcaagctactcttagaaattccggagaagatctggagctcgatggaagcctctcagtgtctccacgccacacagctctacctgctctgctgccacctccacagcctgctccagctggattcttctagttcccgatacagtcccgtcctctcccggtttcctatactcatccggcaggtggcagccgccagccacttccggtcaactattctgcatgaaagcaagatgttgctcaaatgccaaggtgtgtctgaccaagctgtggccgaggccctgtgctctataatgctcttagaagagagttctcctcgccaagccctcacagacttcctgctggccagaaaggcaactattcagaaacttctcaaccagccacaccatggtgctggtatcaaggctcagatttgctcattagtggagttgctggccaccactctgaagcaagctcatgcccttttctacactttgccagaaggactgctgccagatccagccctgccatgtggcttgctcttctctactctggagaccatcacaggccagcatcctgccggaaagggcactggtgtcctgcaggaagagatgaaactctgcagctggtttaaacacctgccagcatccatcgtcgagttccagccaacactccgaacccttgcacatcccatcagtcaggaatacctgaaagacacgctgcagaaatggatccacatgtgtaatgaagacattaaaaatgggatcaccaacctgctcatgtacgtgaagagcatgaagggtctcgcgggaatccgggacgccatgtgggagttacttaccaatgagtccaccaatcacagctgggatgtgctatgtcggcggcttctggagaagccgctcttgttctgggaagatatgatgcagcaactgttccttgaccgattacagactctgacaaaagaaggctttgactccatctccagtagctccaaggagctcttggtttcagctttgcaggaacttgaaagcagcaccagcaactccccttcaaataagcacatccactttgagtacaacatgtcgctcttcctctggtctgagagtcctaatgacctgccttccgatgcggcctgggtcagcgtggcaaaccggggtcagtttgccagtagcggcctctccatgaaagcacaagccatcagcccttgtgtacagaacttctgttctgccctggattctaagctgaaggttaaactagatgacctcctggcttacctcccctctgatgactcatcactgcccaaggacgtttctcccacacaggccaagagttctgcctttgacagatacgcagatgcggggaccgtgcaggagatgctgcggactcagtccgtggcatgcatcaagcacatcgtggactgcatccgggcagagctacagagcattgaagagggtgtgcaagggcaacaggatgccctcaacagtgccaagctgcactcagttcttttcatggccagactctgccagtccctgggagagctgtgcccccatctgaagcagtgcatcctgggaaaatcagagagctcagagaaaccagcaagggagtttagggctctgagaaaacagggaaaggtgaaaactcaggaaatcattcctacacaggccaagtggcaagaggttaaagaagtactcctccagcagagcgtgatgggctaccaggtctggagcagtgcagttgtgaaagttttgattcatggattcacccagtcattacttctagatgatgctggctcagttctggccacagccaccagctgggatgagctagaaattcaggaggaggcagagtctggcagcagtgtcacatccaagatccgactccctgcacagccgtcctggtatgtacagtccttcctgtttagtttatgccaggaaattaatcgggttggaggccatgccttgccaaaggtgacattacaggagatgctgaaaagctgtatggttcaagtagtagctgcctatgagaaactctccgaagaaaaacagattaagaaagaaggtgcatttccagtcacccagaaccgggcgctgcagctgctttatgatctgcgttacctcaacattgttctgacagccaagggtgacgaggtgaagagtggccggagcaagccagactccagaattgagaaagtgactgaccacctggaagccctcattgatccatttgacctggacgttttcacgccacacctcaacagcaaccttcatcgcctggtgcagcgaacttctgttctgtttggattggtgactggtacagagaatcagctcgccccccggagcagtacgttcaactcccaagaaccccataacatcctgccactggcatccagtcagatcaggtttggacttctcccactgagcatgacaagcactcgaaaggctaaatcaaccagaaacatcgaaacaaaagctcaggttgtccccccggcacgctccacagctggtgacccgacagttcctggctccttgttcagacagcttgtcagtgaagaagacaacacgtctgcaccttcattattcaaacttggctggctctctagtatgactaagtaacatggcaacacatctgtctctccctaaataaatactaccacattatttcttctaaa

SEQ ID NO: 199848 - DNA, 3369 bp, Artificial Sequence
  derived and/or modified sequence
gcggctgcgcctgcgccaacgccgtcagtccgcggggcccgatcccgacacctaactccacagagaagctctgctcctaagggaaagggaagacttcagccacagtttcgcagccaacctggcgacctcacctctctggcgacctcacttcccagccggctccgtttaagaaaaccccgcgcaggaccgcgcccgcccccgccccctcgcgcccgccccctcgggtaacaaacatggcccccggcggggcggaagcgcttccgcccccaacgaagatggcggagggggcgggactaaaagggcgtaggtagatcgccgggggctgacgagtgcaccatggccaccgcggcaacctcacccgcgctgaagcggctggatctgcgcgaccctgcggctcttttcgagacgcatggagcggaggagatccgcgggctggagcgccaggttcgggccgagatcgagcacaagaaggaggagctgcggcagatggtgggcgaacggtaccgcgacctgatcgaggcggccgacaccatcggccagatgcgccgctgcgccgtggggctagtggacgccgtgaaggccaccgaccagtactgcgcccgcctccgccaggccggctcggccgcgccccggccaccgcgggcccagcagccacagcagccatcccaggagaagttctacagcatggctgcccagatcaagctactcttagaaattccggagaagatctggagctcgatggaagcctctcagtgtctccacgccacacagctctacctgctctgctgccacctccacagcctgctccagctggattcttctagttcccgatacagtcccgtcctctcccggtttcctatactcatccggcaggtggcagccgccagccacttccggtcaactattctgcatgaaagcaagatgttgctcaaatgccaaggtgtgtctgaccaagctgtggccgaggccctgtgctctataatgctcttagaagagagttctcctcgccaagccctcacagacttcctgctggccagaaaggcaactattcagaaacttctcaaccagccacaccatggtgctggtatcaaggctcagatttgctcattagtggagttgctggccaccactctgaagcaagctcatgcccttttctacactttgccagaaggactgctgccagatccagccctgccatgtggcttgctcttctctactctggagaccatcacaggccagcatcctgccggaaagggcactggtgtcctgcaggaagagatgaaactctgcagctggtttaaacacctgccagcatccatcgtcgagttccagccaacactccgaacccttgcacatcccatcagtcaggaatacctgaaagacacgctgcagaaatggatccacatgtgtaatgaagacattaaaaatgggatcaccaacctgctcatgtacgtgaagagcatgaagggtctcgcgggaatccgggacgccatgtgggagttacttaccaatgagtccaccaatcacagctgggatgtgctatgtcggcggcttctggagaagccgctcttgttctgggaagatatgatgcagcaactgttccttgaccgattacagactctgacaaaagaaggctttgactccatctccagtagctccaaggagctcttggtttcagctttgcaggaacttgaaagcagcaccagcaactccccttcaaataagcacatccactttgagtacaacatgtcgctcttcctctggtctgagagtcctaatgacctgccttccgatgcggcctgggtcagcgtggcaaaccggggtcagtttgccagtagcggcctctccatgaaagcacaagccatcagcccttgtgtacagaacttctgttctgccctggattctaagctgaaggttaaactagatgacctcctggcttacctcccctctgatgactcatcactgcccaaggacgtttctcccacacaggccaagagttctgcctttgacagatacgcagatgcggggaccgtgcaggagatgctgcggactcagtccgtggcatgcatcaagcacatcgtggactgcatccgggcagagctacagagcattgaagagggtgtgcaagggcaacaggatgccctcaacagtgccaagctgcactcagttcttttcatggccagactctgccagtccctgggagagctgtgcccccatctgaagcagtgcatcctgggaaaatcagagagctcagagaaaccagcaagggagtttagggctctgagaaaacagggaaaggtgaaaactcaggaaatcattcctacacaggccaagtggcaagaggttaaagaagtactcctccagcagagcgtgatgggctaccaggtctggagcagtgcagttgtgaaagttttgattcatggattcacccagtcattacttctagatgatgctggctcagttctggccacagccaccagctgggatgagctagaaattcaggaggaggcagagtctggcagcagtgtcacatccaagatccgactccctgcacagccgtcctggtatgtacagtccttcctgtttagtttatgccaggaaattaatcgggttggaggccatgccttgccaaaggtgacattacaggagatgctgaaaagctgtatggttcaagtagtagctgcctatgagaaactctccgaagaaaaacagattaagaaagaaggtgcatttccagtcacccagaaccgggcgctgcagctgctttatgatctgcgttacctcaacattgttctgacagccaagggtgacgaggtgaagagtggccggagcaagccagactccagaattgagaaagtgactgaccacctggaagccctcattgatccatttgacctggacgttttcacgccacacctcaacagcaaccttcatcgcctggtgcagcgaacttctgttctgtttggattggtgactggtacagagaatcagctcgccccccggagcagtacgttcaactcccaagaaccccataacatcctgccactggcatccagtcagatcaggtttggacttctcccactgagcatgacaagcactcgaaaggctaaatcaaccagaaacatcgaaacaaaagctcagtacgatgccaactgttaagcctgcaggaatcctcctgggttgtccccccggcacgctccacagctggtgacccgacagttcctggctccttgttcagacagcttgtcagtgaagaagacaacacgtctgcaccttcattattcaaacttggctggctctctagtatgactaagtaacatggcaacacatctgtctctccctaaataaatactaccacattatttcttc

SEQ ID NO: 199849 - DNA, 2943 bp, Artificial Sequence
  derived and/or modified sequence
atggccaccgccgccaccagccccgccctgaagagactggacctgagagaccccgccgccctgttcgagacccacggcgccgaggagatcagaggcctggagagacaggtgagagccgagatcgagcacaagaaggaggagctgagacagatggtgggcgagagatacagagacctgatcgaggccgccgacaccatcggccagatgagaagatgcgccgtgggcctggtggacgccgtgaaggccaccgaccagtactgcgccagactgagacaggccggcagcgccgcccccagaccccccagagcccagcagccccagcagcccagccaggagaagttctacagcatggccgcccagatcaagctgctgctggagatccccgagaagatctggagcagcatggaggccagccagtgcctgcacgccacccagctgtacctgctgtgctgccacctgcacagcctgctgcagctggacagcagcagcagcagatacagccccgtgctgagcagattccccatcctgatcagacaggtggccgccgccagccacttcagaagcaccatcctgcacgagagcaagatgctgctgaagtgccagggcgtgagcgaccaggccgtggccgaggccctgtgcagcatcatgctgctggaggagagcagccccagacaggccctgaccgacttcctgctggccagaaaggccaccatccagaagctgctgaaccagccccaccacggcgccggcatcaaggcccagatctgcagcctggtggagctgctggccaccaccctgaagcaggcccacgccctgttctacaccctgcccgagggcctgctgcccgaccccgccctgccctgcggcctgctgttcagcaccctggagaccatcaccggccagcaccccgccggcaagggcaccggcgtgctgcaggaggagatgaagctgtgcagctggttcaagcacctgcccgccagcatcgtggagttccagcccaccctgagaaccctggcccaccccatcagccaggagtacctgaaggacaccctgcagaagtggatccacatgtgcaacgaggacatcaagaacggcatcaccaacctgctgatgtacgtgaagagcatgaagggcctggccggcatcagagacgccatgtgggagctgctgaccaacgagagcaccaaccacagctgggacgtgctgtgcagaagactgctggagaagcccctgctgttctgggaggacatgatgcagcagctgttcctggacagactgcagaccctgaccaaggagggcttcgacagcatcagcagcagcagcaaggagctgctggtgagcgccctgcaggagctggagagcagcaccagcaacagccccagcaacaagcacatccacttcgagtacaacatgagcctgttcctgtggagcgagagccccaacgacctgcccagcgacgccgcctgggtgagcgtggccaacagaggccagttcgccagcagcggcctgagcatgaaggcccaggccatcagcccctgcgtgcagaacttctgcagcgccctggacagcaagctgaaggtgaagctggacgacctgctggcctacctgcccagcgacgacagcagcctgcccaaggacgtgagccccacccaggccaagagcagcgccttcgacagatacgccgacgccggcaccgtgcaggagatgctgagaacccagagcgtggcctgcatcaagcacatcgtggactgcatcagagccgagctgcagagcatcgaggagggcgtgcagggccagcaggacgccctgaacagcgccaagctgcacagcgtgctgttcatggccagactgtgccagagcctgggcgagctgtgcccccacctgaagcagtgcatcctgggcaagagcgagagcagcgagaagcccgccagagagttcagagccctgagaaagcagggcaaggtgaagacccaggagatcatccccacccaggccaagtggcaggaggtgaaggaggtgctgctgcagcagagcgtgatgggctaccaggtgtggagcagcgccgtggtgaaggtgctgatccacggcttcacccagagcctgctgctggacgacgccggcagcgtgctggccaccgccaccagctgggacgagctggagatccaggaggaggccgagagcggcagcagcgtgaccagcaagatcagactgcccgcccagcccagctggtacgtgcagagcttcctgttcagcctgtgccaggagatcaacagagtgggcggccacgccctgcccaaggtgaccctgcaggagatgctgaagagctgcatggtgcaggtggtggccgcctacgagaagctgagcgaggagaagcagatcaagaaggagggcgccttccccgtgacccagaacagagccctgcagctgctgtacgacctgagatacctgaacatcgtgctgaccgccaagggcgacgaggtgaagagcggcagaagcaagcccgacagcagaatcgagaaggtgaccgaccacctggaggccctgatcgaccccttcgacctggacgtgttcaccccccacctgaacagcaacctgcacagactggtgcagagaaccagcgtgctgttcggcctggtgaccggcaccgagaaccagctggcccccagaagcagcaccttcaacagccaggagccccacaacatcctgcccctggccagcagccagatcagattcggcctgctgcccctgagcatgaccagcaccagaaaggccaagagcaccagaaacatcgagaccaaggcccaggtggtgccccccgccagaagcaccgccggcgaccccaccgtgcccggcagcctgttcagacagctggtgagcgaggaggacaacaccagcgcccccagcctgttcaagctgggctggctgagcagcatgaccaagtag

SEQ ID NO: 199850 - DNA, 2823 bp, Artificial Sequence
  derived and/or modified sequence
atggccaccgccgccaccagccccgccctgaagagactggacctgagagaccccgccgccctgttcgagacccacggcgccgaggagatcagaggcctggagagacaggtgagagccgagatcgagcacaagaaggaggagctgagacagatggtgggcgagagatacagagacctgatcgaggccgccgacaccatcggccagatgagaagatgcgccgtgggcctggtggacgccgtgaaggccaccgaccagtactgcgccagactgagacaggccggcagcgccgcccccagaccccccagagcccagcagccccagcagcccagccaggagaagttctacagcatggccgcccagatcaagctgctgctggagatccccgagaagatctggagcagcatggaggccagccagtgcctgcacgccacccagctgtacctgctgtgctgccacctgcacagcctgctgcagctggacagcagcagcagcagatacagccccgtgctgagcagattccccatcctgatcagacaggtggccgccgccagccacttcagaagcaccatcctgcacgagagcaagatgctgctgaagtgccagggcgtgagcgaccaggccgtggccgaggccctgtgcagcatcatgctgctggaggagagcagccccagacaggccctgaccgacttcctgctggccagaaaggccaccatccagaagctgctgaaccagccccaccacggcgccggcatcaaggcccagatctgcagcctggtggagctgctggccaccaccctgaagcaggcccacgccctgttctacaccctgcccgagggcctgctgcccgaccccgccctgccctgcggcctgctgttcagcaccctggagaccatcaccggccagcaccccgccggcaagggcaccggcgtgctgcaggaggagatgaagctgtgcagctggttcaagcacctgcccgccagcatcgtggagttccagcccaccctgagaaccctggcccaccccatcagccaggagtacctgaaggacaccctgcagaagtggatccacatgtgcaacgaggacatcaagaacggcatcaccaacctgctgatgtacgtgaagagcatgaagggcctggccggcatcagagacgccatgtgggagctgctgaccaacgagagcaccaaccacagctgggacgtgctgtgcagaagactgctggagaagcccctgctgttctgggaggacatgatgcagcagctgttcctggacagactgcagaccctgaccaaggagggcttcgacagcatcagcagcagcagcaaggagctgctggtgagcgccctgcaggagctggagagcagcaccagcaacagccccagcaacaagcacatccacttcgagtacaacatgagcctgttcctgtggagcgagagccccaacgacctgcccagcgacgccgcctgggtgagcgtggccaacagaggccagttcgccagcagcggcctgagcatgaaggcccaggccatcagcccctgcgtgcagaacttctgcagcgccctggacagcaagctgaaggtgaagctggacgacctgctggcctacctgcccagcgacgacagcagcctgcccaaggacgtgagccccacccaggccaagagcagcgccttcgacagatacgccgacgccggcaccgtgcaggagatgctgagaacccagagcgtggcctgcatcaagcacatcgtggactgcatcagagccgagctgcagagcatcgaggagggcgtgcagggccagcaggacgccctgaacagcgccaagctgcacagcgtgctgttcatggccagactgtgccagagcctgggcgagctgtgcccccacctgaagcagtgcatcctgggcaagagcgagagcagcgagaagcccgccagagagttcagagccctgagaaagcagggcaaggtgaagacccaggagatcatccccacccaggccaagtggcaggaggtgaaggaggtgctgctgcagcagagcgtgatgggctaccaggtgtggagcagcgccgtggtgaaggtgctgatccacggcttcacccagagcctgctgctggacgacgccggcagcgtgctggccaccgccaccagctgggacgagctggagatccaggaggaggccgagagcggcagcagcgtgaccagcaagatcagactgcccgcccagcccagctggtacgtgcagagcttcctgttcagcctgtgccaggagatcaacagagtgggcggccacgccctgcccaaggtgaccctgcaggagatgctgaagagctgcatggtgcaggtggtggccgcctacgagaagctgagcgaggagaagcagatcaagaaggagggcgccttccccgtgacccagaacagagccctgcagctgctgtacgacctgagatacctgaacatcgtgctgaccgccaagggcgacgaggtgaagagcggcagaagcaagcccgacagcagaatcgagaaggtgaccgaccacctggaggccctgatcgaccccttcgacctggacgtgttcaccccccacctgaacagcaacctgcacagactggtgcagagaaccagcgtgctgttcggcctggtgaccggcaccgagaaccagctggcccccagaagcagcaccttcaacagccaggagccccacaacatcctgcccctggccagcagccagatcagattcggcctgctgcccctgagcatgaccagcaccagaaaggccaagagcaccagaaacatcgagaccaaggcccagtacgacgccaactgctag

SEQ ID NO: 199851 - protein, 82 aa, Artificial Sequence
  derived and/or modified sequence
MGWDCRRTTVENPSPIRNCVNQEWPEGSSPGLTEGNTGLVRDLRPAHQDRSGTREDPAGQETTAITNPSPSCTSGASAGQKL

SEQ ID NO: 199852 - protein, 543 aa, Artificial Sequence
  derived and/or modified sequence
LQETVKRKLEGARSPLNGDQQNGACDGNFSPTSKRIRKDISAGMEAINNLPSNMPLPSASPLHQLDLKPSLPLQNSGTHTPGLLEDLSKNGRLPEIKLPVNGCSDLEDSFTILQSKDLKQEPLDDPTCIDTSETSLSNQNKLFSDINLNDQEWQELIDELANTVPEDDIQDLFNEDFEEKKEPEFSQPATETPLSQESASVKSDPSHSPFAHVSMGSPQARPSSSGPPFSTVSTATSLPSVASTPAAPNPASSPANCAVQSPQTPNQAHTPGQAPPRPGNGYLLNPAAVTVAGSASGPVAVPSSDMSPAEQLKQMAAQQQQRAKLMQQKQQQQQQQQQQQQQQQQQQQQQQQQQHSNQTSNWSPLGPPSSPYGAAFTAEKPNSPMMYPQAFNNQNPIVPPMANNLQKTTMNNYLPQNHMNMINQQPNNLGTNSLNKQHNILTYGNTKPLTHFNADLSQRMTPPVANPNKNPLMPYIQQQQQQQQQQQQQQQQQQPPPPQLQAPRAHLSEDQKRLLLMKQKGVMNQPMAYAALPSHGQEQQPVG

SEQ ID NO: 199853 - protein, 276 aa, Artificial Sequence
  derived and/or modified sequence
MSPAEQLKQMAAQQQQRAKLMQQKQQQQQQQQQQQQQQHSNQTSNWSPLGPPSSPYGAAFTAEKPNSPMMYPQAFNNQNPIVPPMANNLQKTTMNNYLPQNHMNMINQQPNNLGTNSLNKQHNILTYGNTKPLTHFNADLSQRMTPPVANPNKNPLMPYIQQQQQQQQQQQQQQQQQQPPPPQLQAPRAHLSEDQKRLLLMKQKGVMNQPMAYAALPSHGQVSVKVTHSSSSSCGAFDCRCVMFYKSTVVGSNCLQKTSLHPQVVARFGVFFFHFS

SEQ ID NO: 199854 - protein, 1138 aa, Artificial Sequence
  derived and/or modified sequence
MGDFAAPAAAANGSSICINSSLNSSLGGAGIGVNNTPNSTPAAPSSNHPAAGGCGGSGGPGGGSAAVPKHSTVVERLRQRIEGCRRHHVNCENRYQQAQVEQLELERRDTVSLYQRTLEQRAKKSGAGTGKQQHPSKPQQDAEAASAEQRNHTLIMLQETVKRKLEGARSPLNGDQQNGACDGNFSPTSKRIRKDISAGMEAINNLPSNMPLPSASPLHQLDLKPSLPLQNSGTHTPGLLEDLSKNGRLPEIKLPVNGCSDLEDSFTILQSKDLKQEPLDDPTCIDTSETSLSNQNKLFSDINLNDQEWQELIDELANTVPEDDIQDLFNEDFEEKKEPEFSQPATETPLSQESASVKSDPSHSPFAHVSMGSPQARPSSSGPPFSTVSTATSLPSVASTPAAPNPASSPANCAVQSPQTPNQAHTPGQAPPRPGNGYLLNPAAVTVAGSASGPVAVPSSDMSPAEQLKQMAAQQQQRAKLMQQKQQQQQQQQQQQQQQQQQQQQQQQQQHSNQTSNWSPLGPPSSPYGAAFTAEKPNSPMMYPQAFNNQNPIVPPMANNLQKTTMNNYLPQNHMNMINQQPNNLGTNSLNKQHNILTYGNTKPLTHFNADLSQRMTPPVANPNKNPLMPYIQQQQQQQQQQQQQQQQQQPPPPQLQAPRAHLSEDQKRLLLMKQKGVMNQPMAYAALPSHGQEQHPVGLPRTTGPMQSSVPPGSGGMVSGASPAGPGFLGSQPQAAIMKQMLIDQRAQLIEQQKQQFLREQRQQQQQQQQQILAEQQLQQSHLPRQHLQPQRNPYPVQQVNQFQGSPQDIAAVRSQAALQSMRTSRLMAQNAGMMGIGPSQNPGTMATAAAQSEMGLAPYSTTPTSQPGMYNMSTGMTQMLQHPNQSGMSITHNQAQGPRQPASGQGVGMVSGFGQSMLVNSAITQQHPQMKGPVGQALPRPQAPPRLQSLMGTVQQGAQSWQQRSLQGMPGRTSGELGPFNNGASYPLQAGQPRLTKQHFPQGLSQSVVDANTGTVRTLNPAAMGRQMMPSLPGQQGTSQARPMVMSGLSQGVPGMPAFSQPPAQQQIPSGSFAPSSQSQAYERNAPQDVSYNYSGDGAGGSFPGLPDGADLVDSIIKGGPGDEWMQELDELFGNP

SEQ ID NO: 199855 - protein, 445 aa, Artificial Sequence
  derived and/or modified sequence
EQHPVGLPRTTGPMQSSVPPGSGGMVSGASPAGPGFLGSQPQAAIMKQMLIDQRAQLIEQQKQQFLREQRQQQQQQQQQILAEQQLQQSHLPRQHLQPQRNPYPVQQVNQFQGSPQDIAAVRSQAALQSMRTSRLMAQNAGMMGIGPSQNPGTMATAAAQSEMGLAPYSTTPTSQPGMYNMSTGMTQMLQHPNQSGMSITHNQAQGPRQPASGQGVGMVSGFGQSMLVNSAITQQHPQMKGPVGQALPRPQAPPRLQSLMGTVQQGAQSWQQRSLQGMPGRTSGELGPFNNGASYPLQAGQPRLTKQHFPQGLSQSVVDANTGTVRTLNPAAMGRQMMPSLPGQQGTSQARPMVMSGLSQGVPGMPAFSQPPAQQQIPSGSFAPSSQSQAYERNAPQDVSYNYSGDGAGGSFPGLPDGADLVDSIIKGGPGDEWMQELDELFGNP

SEQ ID NO: 199856 - DNA, 2013 bp, Artificial Sequence
  derived and/or modified sequence
  misc_feature (301)..(301): n is a, c, g, or t
  misc_feature (1707)..(1707): n is a, c, g, or t
  misc_feature (1722)..(1722): n is a, c, g, or t
  misc_feature (1756)..(1756): n is a, c, g, or t
  misc_feature (1880)..(1880): n is a, c, g, or t
  misc_feature (1882)..(1882): n is a, c, g, or t
  misc_feature (1885)..(1885): n is a, c, g, or t
  misc_feature (1887)..(1887): n is a, c, g, or t
gaattccaatcagaacaagctgttctcagacattaatctgaatgatcaggagtggcaagaattaatagatgaattggacaacacggttcctgaggatgacatacaggacctgttcaacgaagactttgaagagaagaaggagccagaattctcgcagacagcaactgagcacccctctctcccaggagagtgcgagcgtgaagagcgacccctctcactctcccttcggacatgtctccatgggatctccccaggcgaggtcttcttcttctggtcctcccttttcttctgtctccacggncactagtttaccttctggtgacagcactcccgcaggtccaaaccctgcaagctcaccagcaaacttgtgcttgtccagtccccttcaaaacttccaaaccaagcccacactccaggccaagctccacctcggcctggaaatggttatctcctgaatccggcagcagtgacagtggccggttcagcgtcagggcctgtggctgtgcccagctctgacatgtctccagcagaacagctcaaacagatggctgcacagcagcaacaaagggccaaactcatgcagcagaaacagcaacagcaacagcagcagcagcagcagcagcagcaacagcactcaaatcagacttcaaattggtctcccttaggacctccctctagtccatatggagcagcttttactgcagaaaaaccaaatagcccaatgatgtacccccaagcctttaacaaccaaaaccctatagtgcctccaatggcaaacaacctgcagaagacaacaatgaataactacctccctcagaatcacatgaatatgatcaatcagcagccaaataacttgggtacaaactccttaaacaaacagcacaatattctgacttatggcaacactaaacccctgacccacttcaatgcagacctgagtcagaggatgacaccaccagtggccaaccccaacaaaaaccccttgatgccgtatatccagcagcagcaacagcagcagcaacagcaacagcagcagcagcagcagcagcagccgccacctccacagctccaggcccccagggcacacctgagcgaagaccagaaacgcctgcttctcatgaagcagaaaggagtgatgaatcagcccatggcttacgctgcacttccatcccacggtcaggtaagtgtgaaagtgacacactcttcgagcagttcttgtggtgcatttcaagactgtcgatgtgtgatgttctacaaagcttccactgtagtggggtctaattgcctgcagaaaacctctttacaacatcctcaggtagtggccaggtttggagtgttctttttccatttctcctaagaaatggaaaagggtggcatgataaactttcgtgtatttcagtgtctaggaatcaaacttcttttattcccaactgcagataagaattacataaaattctcactctgagggagggaggctgcagaggtcactccaccaaacacggcactacctctgtagcttctctcccagcttgcatgatcccaggctctgggtggtgggaagcaggggacattcagggctgtctacaacagttttataaggccctgagcagccttcgagttttttaaattttattttagtgaatacatgcattaaaataaaacaacaacaacaacaacaacaaaaacacaaagaggctagagatttcnccgtttctacccccnaaataacgcttgctatcaagactttggagggggntgggggaaaagaatttaaaagccaaataatttttttttcataaaaagtaaaagctaccataaaacatttttttttctgtcacactgattaaatttcttctgaaaagccgcacatatagacaaancnaancnaaaattcctgaactggacaaacagcaaatactcaacagggttgttaacctaggtaacagttcagtagtttaaagaatcttttagacatctggaagcctttctattcattcctcagtacagtgttcc

SEQ ID NO: 199857 - DNA, 249 bp, Artificial Sequence
  derived and/or modified sequence
atgggctgggactgcagaagaaccaccgtggagaaccccagccccatcagaaactgcgtgaaccaggagtggcccgagggcagcagccccggcctgaccgagggcaacaccggcctggtgagagacctgagacccgcccaccaggacagaagcggcaccagagaggaccccgccggccaggagaccaccgccatcaccaaccccagccccagctgcaccagcggcgccagcgccggccagaagctgtag

SEQ ID NO: 199858 - DNA, 249 bp, Artificial Sequence
  derived and/or modified sequence
atggggtgggactgtcggaggacgactgtggaaaatccatcccccatccgtaactgcgtaaatcaggagtggcccgaggggtcaagccccgggctgacagaaggcaacaccggcctggtacgggacttacggcccgcccaccaggaccgatctgggactagggaagatcctgctgggcaagagaccaccgcaataacaaaccccagcccttcctgtacaagcggcgcttcagccggccagaaactttag

SEQ ID NO: 199859 - DNA, 249 bp, Artificial Sequence
  derived and/or modified sequence
atgggctgggactgcaggaggaccaccgtggagaaccccagccccatccggaactgtgtgaaccaggagtggccagagggcagcagccctggcctgacagagggcaacacaggcctggtgcgggacctgcggcctgcccaccaggacagaagtggcaccagagaagatcctgctggccaggagaccacagccatcaccaaccccagccccagctgcaccagcggggccagcgctggccagaagctgtag

SEQ ID NO: 199860 - DNA, 249 bp, Artificial Sequence
  derived and/or modified sequence
atgggatgggactgcagaaggaccactgtcgagaacccatctcctattcggaattgcgtgaatcaagagtggcctgaagggtcgagccctggcctgaccgaaggaaatactgggcttgttagagatcttcggcctgcccatcaagataggagcggtacacgggaagacccagcaggacaggaaactactgcgataacaaacccttcacctagctgtacttctggcgcaagcgctggacaaaaactgtag

SEQ ID NO: 199861 - DNA, 1632 bp, Artificial Sequence
  derived and/or modified sequence
ttacaagagactgtcaaacggaagttagagggagccaggagcccgctgaacggggatcaacagaatggggcgtgcgatgggaatttctcgcctaccagtaaaaggatccggaaggacatcagtgctggaatggaggccatcaacaatctaccgtctaatatgccactgccctctgctagccccctgcaccagttggacttgaaaccatcgctcccgctccaaaattcagggacacatacgcctgggctgctcgaagatctgtcgaagaatggcagacttccggaaattaagcttccagtcaatggatgtagcgacctcgaggactccttcacaattctgcaaagcaaggatctcaaacaggagcccctcgatgaccccacgtgtatcgacactagtgagacaagcctctcaaaccaaaataaactgttcagcgatatcaacttaaacgaccaggagtggcaagagcttattgatgagttggctaacactgtgcctgaggatgacatccaagaccttttcaatgaggatttcgaggaaaagaaagagcccgagttcagccagcccgcgactgagacgcccctctcccaggagtctgctagcgtgaagagcgatccaagccactcacctttcgcacacgtctctatggggtccccacaagcacgcccatcctcgtcagggcctcccttctcaaccgtttctaccgcgacatctctgccatcagttgcatccaccccagccgcacccaatccggccagctcgcctgccaattgcgcggtgcagtccccgcaaacccccaatcaggcacatacgcctggacaagctcccccgaggcctggtaatggctatttacttaatcctgctgccgtgactgtggctggttcagcaagtggccctgtggcagttcctagtagcgacatgagtccggccgagcagctgaaacagatggccgcccagcagcagcaacgggccaagctgatgcagcaaaagcaacagcaacaacagcagcagcagcagcagcagcaacagcagcagcaacagcaacaacagcagcaacaacagcagcactccaatcagaccagcaactggagccctctgggaccacccagcagtccctatggcgccgctttcactgcagaaaagccaaattcccccatgatgtacccacaggcatttaacaatcagaaccctatagtcccccccatggccaacaatctacagaaaacaacaatgaacaattatcttcctcagaaccatatgaatatgatcaatcagcagcccaacaacttaggcaccaacagtttgaataagcaacataatatactcacatacggtaacaccaagccactcacacattttaacgccgatctcagccaacggatgactcctcccgtggccaaccccaataaaaatcctctgatgccatacatccagcagcagcagcagcagcagcagcagcaacagcagcaacagcagcaacagcagcccccacccccacaactccaggcacctcgcgcccacctctccgaggatcaaaagaggctactccttatgaaacagaagggagtaatgaatcagccgatggcctacgctgctctgccctcccacgggcaggagcagcagcctgttgggtag

SEQ ID NO: 199862 - DNA, 831 bp, Artificial Sequence
  derived and/or modified sequence
atgtctcccgcggagcagctcaaacagatggctgcccagcaacaacagcgggctaagctgatgcagcaaaagcagcagcagcaacagcagcagcagcagcaacagcaacagcagcattctaatcagacttcaaattggtcccccctggggccacccagttccccttacggagcagcttttaccgcagaaaaacccaattcccctatgatgtaccctcaggcgttcaacaaccagaacccgatcgtgcctccaatggctaacaacctacagaagaccaccatgaataattacttacctcagaatcacatgaacatgattaaccagcagcctaataacctggggaccaacagtctgaacaaacagcataacatcctgacttatgggaacacgaaaccgctcacacactttaatgctgacctttcacagaggatgacacctccagtcgccaacccaaataaaaatccactgatgccctacatacaacagcaacagcaacaacaacagcagcagcaacagcagcagcagcagcagcagcccccaccgccccagctccaggcccctagagcccatctgagcgaggatcagaaacgcctgttactcatgaagcagaaaggcgtgatgaaccagccaatggcctacgcagccctccctagccatggacaggtctctgtaaaggtgacgcattctagctcctcttcttgcggtgcctttgattgtagatgcgtcatgttttataaatctaccgtggtcggatccaattgtctgcagaaaactagtctccatccacaggtggttgcacgttttggagtctttttttttcacttcagttag

SEQ ID NO: 199863 - DNA, 3417 bp, Artificial Sequence
  derived and/or modified sequence
atgggagatttcgctgcccctgccgccgcagcaaacgggagctccatctgtataaactcttctcttaactcgtccctgggcggggcgggaatcggagtgaataatacccctaactctacccccgccgctccctcttccaatcaccctgctgccggcggatgtggcgggtcgggagggccaggaggcgggtcagctgcagtaccgaagcatagtactgttgtggaacgcctgaggcagaggattgaaggttgtagaagacaccacgttaactgtgagaacaggtatcagcaggcccaggtggagcagttggaactggagaggagggacactgtgtcattgtaccagcggaccctggaacagcgcgctaagaagtccggggcaggaactggaaaacaacagcacccgagcaagcctcagcaggacgccgaagctgcctccgccgaacaaagaaaccacaccctgatcatgctccaggaaaccgtaaagcggaaactggaaggtgcccgctcacctctgaatggagatcagcagaacggcgcttgcgatgggaactttagccccacatcgaaacgcattcgaaaggacatctccgcaggaatggaggccatcaataacttgccttccaacatgcccctcccctctgcctccccgttacatcagcttgatcttaaaccctctcttcctttgcaaaactctggcacacatacccccgggcttctcgaggatctgtccaagaatggccgactcccagaaattaaactccccgtcaacggctgttcagacctcgaggatagcttcacaattctgcagtcgaaggacctgaagcaggaacctctagatgatcccacttgcatagatacttccgagacgtccctatcaaatcagaacaagctgtttagtgatatcaaccttaatgatcaggaatggcaggagctgatagatgaactggcaaacactgtgccagaggatgacatacaagatttgttcaacgaggatttcgaagaaaagaaggagcccgagttctcacagcccgccaccgagaccccattgtcccaggagagtgcatccgtcaaatcggacccatcccattccccgtttgcacacgtatcaatgggctcccctcaggcccggcctagctctagtggtcccccgttctctaccgtgtccacagctacttcactaccaagtgtcgcaagtacaccagcggcacccaatcccgcttcatctccagccaattgcgctgtacagtcgccacagaccccgaatcaagcgcatactccgggacaggcccctccaaggccgggtaacggatacctgttgaacccagccgcagttacggttgccggatctgcttcagggcctgttgccgtcccatcttcggacatgagccctgcagagcaactgaagcagatggccgctcagcagcagcaacgggccaagctgatgcaacagaaacaacaacaacaacagcaacaacagcagcagcaacaacagcagcagcagcagcagcaacaacaacaacaacagcagcactcgaaccagacctctaactggtctcccctaggacctccctcatctccttatggcgcggcatttacagcagaaaaaccgaatagtcccatgatgtacccccaggcatttaataaccagaatccaatagtgcccccaatggccaacaatctccaaaagaccacaatgaacaattacctgccacagaaccacatgaatatgattaaccagcagcccaacaatctgggcacaaatagcttgaacaaacagcacaacattctgacatatggaaatacaaagccactgacacactttaacgcagacctgtctcaacggatgacgcctcctgtggcgaatcccaataagaacccccttatgccatatattcagcagcagcagcaacagcaacagcaacaacagcagcagcagcagcagcaacagcccccccctcctcagcttcaagctccaagagcccacctttccgaggaccagaagaggctgttgctaatgaaacagaaaggtgtaatgaaccagccgatggcttatgccgcgctcccatctcatggacaagagcaacatccagtaggactaccaagaaccactgggccaatgcagagcagcgtcccccctggtagtggcggcatggtcagtggggcctcgcccgccggccccgggtttctgggctcccagccgcaggcagctatcatgaaacaaatgctgatcgatcaaagggcccaactgatcgagcagcagaagcagcagtttctcagagagcagaggcagcaacaacagcagcagcagcaacaaattctggccgaacaacagttgcaacaaagccacctccctcgccagcacttgcaaccccagcggaatccatacccggtgcagcaggttaaccagttccagggctccccacaagacatagctgcagtccgcagccaggctgctcttcaaagcatgagaacctcaaggctgatggcacagaacgctggtatgatgggcatcggcccaagccagaaccctggcacaatggccacggcggcagcccagtccgagatggggctcgcaccttacagtactacccctacctctcagccgggaatgtataacatgtccactggtatgacacaaatgctacaacaccccaaccagtccggcatgagcatcacacataaccaagcacaggggccccggcaacccgcctctgggcaaggggtgggaatggtgtcaggttttggtcagagcatgctggtgaactctgcaattactcaacagcaccctcagatgaaggggcctgtcgggcaggccttgcctcggcctcaggccccacccagattacaatctttaatgggaaccgtgcagcagggagcccagtcctggcagcagaggagcctgcagggtatgcctgggaggacctccggagaacttggaccatttaacaacggtgcttcgtatcccctgcaggcgggccagccccggctgactaaacagcattttcctcagggactaagtcagtcagtcgtggatgcaaatacgggtacagttcggaccctgaatccagctgctatgggacgacagatgatgccgagtcttccaggacaacagggcaccagtcaggccaggcctatggtgatgagtgggctcagccagggcgtgccagggatgccagcgttttcgcagccacccgcacagcagcagatcccaagcgggtcgtttgccccttcgtcacagtctcaggcctacgaaaggaatgcgcctcaggacgttagctataattacagcggcgatggtgccggaggctcatttccgggtctgccggacggggcagatctggtcgactcgatcatcaagggcggcccaggagatgaatggatgcaagagctggatgagctgttcggcaacccctag

SEQ ID NO: 199864 - DNA, 1338 bp, Artificial Sequence
  derived and/or modified sequence
gaacaacatccagtgggtctgccacgcactacgggacccatgcagtctagcgtgccccctgggagcggcgggatggtttccggagcttccccggccggacctggttttcttggcagtcagccccaggcggccatcatgaagcagatgttgatagaccagagagcccaattaatcgagcagcaaaagcagcagtttctcagagaacagcgacagcagcagcagcagcagcaacagcagattctagccgagcagcagctacaacaatcccacctcccacgtcaacacttgcagccacagaggaatccctatcctgtgcagcaggtcaatcagttccaaggctcacctcaggatatcgccgccgttcgcagtcaggccgctctgcagtctatgagaacatctaggctcatggcacagaacgccggcatgatgggtatcgggccatcgcagaaccccggaacgatggctacagccgccgctcagagcgagatggggttggccccgtactctactaccccaacttcacagcctggtatgtacaacatgtcaactggaatgactcaaatgctgcagcacccaaatcagtcagggatgtcaatcactcataaccaagcccaggggccccggcagcccgcaagtgggcagggcgtcgggatggtgtccggatttgggcagtccatgttggtaaattctgccattacccagcagcatcctcagatgaaggggcccgtgggtcaggccctccctaggcctcaggcacctcctagattacaaagcctgatggggacagtccagcagggggcccaatcctggcagcagaggtccctgcaaggcatgcctggtcgaacaagtggcgagctagggccgtttaataacggagcctcctatcctctgcaggctgggcaacctaggcttactaaacagcactttccgcagggcctttctcagtccgttgtggacgctaataccggtaccgtccgcacattgaatccagccgctatgggcaggcagatgatgccatcccttcctggccaacaggggactagccaagcgcgtccaatggttatgtctgggttgagtcaaggggtccccgggatgcctgcattctcccagccaccagcacaacagcaaatcccatctggcagctttgcccccagctctcagagccaggcgtacgaacggaatgcccctcaggacgtaagctacaactacagcggggacggagccgggggatccttccccggcctgcctgacggagccgatctggtcgattccattatcaaaggcggccccggcgacgagtggatgcaagaactcgacgagctgttcggcaacccctag

SEQ ID NO: 199865 - DNA, 1632 bp, Artificial Sequence
  derived and/or modified sequence
ctgcaggagaccgtgaagaggaagctggagggcgcccggagccccctgaatggagaccagcagaatggagcctgtgatggcaacttcagccccaccagcaagaggatcaggaaggacatctctgctggcatggaggccatcaacaacctgcccagcaacatgcccctgcccagcgccagccccctgcaccagctggacctgaagcccagcctgcccctgcagaacagcggcacccacaccccaggcctgctggaggacctgagcaagaatggccgcctgcctgagatcaagctgcctgtgaatggctgcagcgacctggaggacagcttcaccatcctgcagagcaaggacctgaagcaggagcccctggatgaccccacctgcatcgacaccagcgagaccagcctgagcaaccagaacaagctgttcagtgacatcaacctgaatgaccaggagtggcaggagctgattgatgagctggccaacacagtgcctgaagatgacatccaggacctcttcaatgaagattttgaggagaagaaggagcctgagttcagccagcctgccacagagacccccctgagccaggagagcgcctctgtgaagagtgaccccagccacagcccctttgcccacgtgtccatgggcagcccccaggcccggcccagcagcagcggcccccccttcagcacagtgtccacagccaccagcctgcccagcgtggccagcaccccagctgcccccaacccagccagcagccctgccaactgtgctgtgcagagcccccagacccccaaccaggcccacaccccaggccaggccccacccaggcctggaaatggctacctgctgaacccagctgctgtgacagtggccggcagcgccagcggccctgtggccgtgcccagcagtgacatgagccctgctgagcagctgaagcagatggccgcccagcagcagcagagggccaagctgatgcagcagaagcagcagcagcagcagcagcagcagcagcagcagcagcagcagcagcagcagcagcagcagcagcagcagcagcagcacagcaaccagaccagcaactggagccccctgggcccccccagcagcccctacggggccgccttcaccgctgagaagcccaacagccccatgatgtacccccaggccttcaacaaccagaaccccatcgtgccccccatggccaacaacctgcagaagaccaccatgaacaactacctgccccagaaccacatgaacatgatcaaccagcagcccaacaacctgggcaccaacagcctgaacaagcagcacaacatcctgacctacggcaacaccaagcccctgacccacttcaatgctgacctgagccagaggatgaccccacctgtggccaaccccaacaagaaccccctgatgccctacatccagcagcagcagcagcagcagcagcagcagcagcagcagcagcagcagcagcagcccccaccaccccagctgcaggccccccgggcccacctgtctgaggaccagaagaggctgctgctgatgaagcagaagggcgtgatgaaccagcccatggcctatgctgccctgcccagccacggccaggagcagcagcctgtgggctag

SEQ ID NO: 199866 - DNA, 831 bp, Artificial Sequence
  derived and/or modified sequence
atgagccctgctgagcagctgaagcagatggccgcccagcagcagcagagggccaagctgatgcagcagaagcagcagcagcagcagcagcagcagcagcagcagcagcagcagcacagcaaccagaccagcaactggagccccctgggcccccccagcagcccctacggggccgccttcaccgctgagaagcccaacagccccatgatgtacccccaggccttcaacaaccagaaccccatcgtgccccccatggccaacaacctgcagaagaccaccatgaacaactacctgccccagaaccacatgaacatgatcaaccagcagcccaacaacctgggcaccaacagcctgaacaagcagcacaacatcctgacctacggcaacaccaagcccctgacccacttcaatgctgacctgagccagaggatgaccccacctgtggccaaccccaacaagaaccccctgatgccctacatccagcagcagcagcagcagcagcagcagcagcagcagcagcagcagcagcagcagcccccaccaccccagctgcaggccccccgggcccacctgtctgaggaccagaagaggctgctgctgatgaagcagaagggcgtgatgaaccagcccatggcctatgctgccctgcccagccacggccaggtgtctgtgaaggtgacccacagcagcagcagcagctgtggggcctttgactgccgctgtgtgatgttctacaagagcacagtggtgggcagcaactgcctgcagaagaccagcctgcacccccaggtggtggccaggtttggagtcttcttcttccacttctcctag

SEQ ID NO: 199867 - DNA, 3417 bp, Artificial Sequence
  derived and/or modified sequence
atgggagactttgctgccccagctgctgctgccaacggcagcagcatctgcatcaacagcagcctgaacagcagcctgggcggggccggcattggagtgaacaacacccccaacagcaccccagctgcccccagcagcaaccaccctgctgctgggggctgcggcggcagcggcggccctgggggcggcagcgctgctgtgcccaagcacagcacagtggtggagcggctgcggcagagaattgagggctgcagaagacaccacgtgaactgtgagaaccgctaccagcaggcccaggtggagcagctggagctggagcggcgggacacagtgtccctgtaccagaggaccctggagcagagggccaagaagtctggagctggcaccgggaagcagcagcaccccagcaagccccagcaggatgctgaggccgccagcgctgagcagaggaaccacaccctcatcatgctgcaggagaccgtgaagaggaagctggagggcgcccggagccccctgaatggagaccagcagaatggagcctgtgatggcaacttcagccccaccagcaagaggatcaggaaggacatctctgctggcatggaggccatcaacaacctgcccagcaacatgcccctgcccagcgccagccccctgcaccagctggacctgaagcccagcctgcccctgcagaacagcggcacccacaccccaggcctgctggaggacctgagcaagaatggccgcctgcctgagatcaagctgcctgtgaatggctgcagcgacctggaggacagcttcaccatcctgcagagcaaggacctgaagcaggagcccctggatgaccccacctgcatcgacaccagcgagaccagcctgagcaaccagaacaagctgttcagtgacatcaacctgaatgaccaggagtggcaggagctgattgatgagctggccaacacagtgcctgaagatgacatccaggacctcttcaatgaagattttgaggagaagaaggagcctgagttcagccagcctgccacagagacccccctgagccaggagagcgcctctgtgaagagtgaccccagccacagcccctttgcccacgtgtccatgggcagcccccaggcccggcccagcagcagcggcccccccttcagcacagtgtccacagccaccagcctgcccagcgtggccagcaccccagctgcccccaacccagccagcagccctgccaactgtgctgtgcagagcccccagacccccaaccaggcccacaccccaggccaggccccacccaggcctggaaatggctacctgctgaacccagctgctgtgacagtggccggcagcgccagcggccctgtggccgtgcccagcagtgacatgagccctgctgagcagctgaagcagatggccgcccagcagcagcagagggccaagctgatgcagcagaagcagcagcagcagcagcagcagcagcagcagcagcagcagcagcagcagcagcagcagcagcagcagcagcagcagcacagcaaccagaccagcaactggagccccctgggcccccccagcagcccctacggggccgccttcaccgctgagaagcccaacagccccatgatgtacccccaggccttcaacaaccagaaccccatcgtgccccccatggccaacaacctgcagaagaccaccatgaacaactacctgccccagaaccacatgaacatgatcaaccagcagcccaacaacctgggcaccaacagcctgaacaagcagcacaacatcctgacctacggcaacaccaagcccctgacccacttcaatgctgacctgagccagaggatgaccccacctgtggccaaccccaacaagaaccccctgatgccctacatccagcagcagcagcagcagcagcagcagcagcagcagcagcagcagcagcagcagcccccaccaccccagctgcaggccccccgggcccacctgtctgaggaccagaagaggctgctgctgatgaagcagaagggcgtgatgaaccagcccatggcctatgctgccctgcccagccacggccaggagcagcaccctgtgggcctgcccaggaccaccggccccatgcagagctctgtgcccccaggcagcggcggcatggtgtctggggccagccctgctggccctggcttcctgggcagccagccccaggccgccatcatgaagcagatgctgattgaccagagggcccagctgattgagcagcagaagcagcagttcctgcgggagcagaggcagcagcagcagcagcagcagcagcagatcctggccgagcagcagctgcagcagagccacctgccccggcagcacctgcagccccagaggaacccctaccctgtgcagcaggtgaaccagttccagggcagcccccaggacattgctgctgtgcgcagccaggccgccctgcagagcatgaggaccagccggctgatggcccagaatgccggcatgatgggcatcggccccagccagaaccctggcaccatggccacagctgctgcccagagcgagatgggcctggccccctacagcaccacccccaccagccagcccggcatgtacaacatgagcacaggcatgacccagatgctgcagcaccccaaccagagcggcatgagcatcacccacaaccaggcccagggcccccggcagcctgccagcggccagggcgtgggcatggtgtctggcttcggccagagcatgctggtgaacagcgccatcacccagcagcacccccagatgaagggccctgtgggccaggccctgccccggccccaggccccaccccggctgcagagcctgatgggcaccgtgcagcagggcgcccagagctggcagcagaggagcctgcagggcatgcctggccgcaccagcggggagctgggccccttcaacaacggggccagctaccccctgcaggccggccagccccggctgaccaagcagcacttcccccagggcctgagccagagcgtggtggatgccaacacaggaacagtgaggaccctgaacccagctgccatgggccggcagatgatgcccagcctgcccggccagcagggcaccagccaggcccggcccatggtgatgagcggcctgagccagggcgtgcccggcatgcctgccttcagccagcccccagcccagcagcagatccccagcggcagctttgcccccagcagccagagccaggcctatgaaagaaatgccccccaggatgtgtcctacaactacagcggagatggagctgggggcagcttccctggcctgcctgatggagctgacctggtggacagcatcatcaagggcggccctggagatgagtggatgcaggagctggatgagctgtttggaaacccctag

SEQ ID NO: 199868 - DNA, 1338 bp, Artificial Sequence
  derived and/or modified sequence
gagcagcaccctgtgggcctgcccaggaccaccggccccatgcagagctctgtgcccccaggcagcggcggcatggtgtctggggccagccctgctggccctggcttcctgggcagccagccccaggccgccatcatgaagcagatgctgattgaccagagggcccagctgattgagcagcagaagcagcagttcctgcgggagcagaggcagcagcagcagcagcagcagcagcagatcctggccgagcagcagctgcagcagagccacctgccccggcagcacctgcagccccagaggaacccctaccctgtgcagcaggtgaaccagttccagggcagcccccaggacattgctgctgtgcgcagccaggccgccctgcagagcatgaggaccagccggctgatggcccagaatgccggcatgatgggcatcggccccagccagaaccctggcaccatggccacagctgctgcccagagcgagatgggcctggccccctacagcaccacccccaccagccagcccggcatgtacaacatgagcacaggcatgacccagatgctgcagcaccccaaccagagcggcatgagcatcacccacaaccaggcccagggcccccggcagcctgccagcggccagggcgtgggcatggtgtctggcttcggccagagcatgctggtgaacagcgccatcacccagcagcacccccagatgaagggccctgtgggccaggccctgccccggccccaggccccaccccggctgcagagcctgatgggcaccgtgcagcagggcgcccagagctggcagcagaggagcctgcagggcatgcctggccgcaccagcggggagctgggccccttcaacaatggagccagctaccccctgcaggccggccagccccggctgaccaagcagcacttcccccagggcctgagccagagcgtggtggatgccaacacaggcaccgtgaggaccctgaacccagctgccatgggccggcagatgatgcccagcctgcccggccagcagggcaccagccaggcccggcccatggtgatgagcggcctgagccagggcgtgcccggcatgcctgccttcagccagcccccagcccagcagcagatccccagcggcagctttgcccccagcagccagagccaggcctatgaaagaaatgccccccaggatgtgtcctacaactacagcggagatggagctgggggcagcttccctggcctgcctgatggagctgacctggtggacagcatcatcaagggcggccctggagatgagtggatgcaggagctggatgagctgtttggaaacccctag

SEQ ID NO: 199869 - DNA, 1629 bp, Artificial Sequence
  derived and/or modified sequence
ctacaagagactgtgaaaaggaagttggaaggagctcgatcaccacttaatggagaccagcagaatggtgcttgtgatgggaatttttctccgactagcaaacgaattcgaaaggacatttctgcggggatggaagccatcaacaatttgcccagtaacatgccactgccttcagcttctcctcttcaccaacttgacctgaaaccttctttgcccttgcagaacagtggaactcacactcctgggcttctagaagatctaagtaagaatggtaggctccctgagattaaacttcctgtcaacggttgcagtgacctggaggatagcttcaccatcttgcagagcaaagacctcaaacaagaacctctcgatgaccctacttgcatagacacatcagaaacatctctttcaaatcagaacaagctgttctcagacattaatctgaatgatcaggagtggcaagaattaatagatgaattggccaacacggttcctgaggatgacatacaggacctgttcaacgaagactttgaagagaagaaggagccagaattctcgcagccagcaactgagacccctctctcccaggagagtgcgagcgtgaagagcgacccctctcactctcccttcgcacatgtctccatgggatctccccaggcgaggccttcttcttctggtcctcccttttctactgtctccacggccactagtttaccttctgttgccagcactcccgcagctccaaaccctgcaagctcaccagcaaactgtgctgtccagtcccctcaaactccaaaccaagcccacactccaggccaagctccacctcggcctggaaatggttatctcctgaatccggcagcagtgacagtggccggttcagcgtcagggcctgtggctgtgcccagctctgacatgtctccagcagaacagctcaaacagatggctgcacagcagcaacaaagggccaaactcatgcagcagaaacagcaacagcaacagcagcagcagcagcagcagcagcagcagcagcagcagcagcagcagcagcagcagcaacagcactcaaatcagacttcaaattggtctcccttaggacctccctctagtccatatggagcagcttttactgcagaaaaaccaaatagcccaatgatgtacccccaagcctttaacaaccaaaaccctatagtgcctccaatggcaaacaacctgcagaagacaacaatgaataactacctccctcagaatcacatgaatatgatcaatcagcagccaaataacttgggtacaaactccttaaacaaacagcacaatattctgacttatggcaacactaaacccctgacccacttcaatgcagacctgagtcagaggatgacaccaccagtggccaaccccaacaaaaaccccttgatgccgtatatccagcagcagcaacagcagcagcaacagcaacagcagcagcagcagcagcagcagccgccacctccacagctccaggcccccagggcacacctgagcgaagaccagaaacgcctgcttctcatgaagcagaaaggagtgatgaatcagcccatggcttacgctgcacttccatcccacggtcaggagcagcaaccagtcggg

SEQ ID NO: 199870 - DNA, 831 bp, Artificial Sequence
  derived and/or modified sequence
atgtctccagcagaacagctcaaacagatggctgcacagcagcaacaaagggccaaactcatgcagcagaaacagcaacagcaacagcagcagcagcagcagcagcagcaacagcactcaaatcagacttcaaattggtctcccttaggacctccctctagtccatatggagcagcttttactgcagaaaaaccaaatagcccaatgatgtacccccaagcctttaacaaccaaaaccctatagtgcctccaatggcaaacaacctgcagaagacaacaatgaataactacctccctcagaatcacatgaatatgatcaatcagcagccaaataacttgggtacaaactccttaaacaaacagcacaatattctgacttatggcaacactaaacccctgacccacttcaatgcagacctgagtcagaggatgacaccaccagtggccaaccccaacaaaaaccccttgatgccgtatatccagcagcagcaacagcagcagcaacagcaacagcagcagcagcagcagcagcagccgccacctccacagctccaggcccccagggcacacctgagcgaagaccagaaacgcctgcttctcatgaagcagaaaggagtgatgaatcagcccatggcttacgctgcacttccatcccacggtcaggtaagtgtgaaagtgacacactcttcgagcagttcttgtggtgcatttgactgtcgatgtgtgatgttctacaagtccactgtagtggggtctaattgcctgcagaaaacctctttacatcctcaggtagtggccaggtttggagtgttctttttccatttctcctaa

SEQ ID NO: 199871 - DNA, 4332 bp, Artificial Sequence
  derived and/or modified sequence
actccgctggcatggaggaggaggaggaggtggaggagcgagaggaggaggaggaggcggcggcggcggcggcggcgagcagttgatcattgtgatggtggcaggagcagcggcggcagcggcagcccagccgagcgttaggtgctgctctctgcgcggcgttttgcaaaggacttcaccgatctacttttgcagtcgcctcggactgtccatgtgtttacttcccccagcccgaggattcgatatctaggttcctgtgaaatgcaactgagcagccaaagtactttgagaacacggggcggcataaacaccaaaacttttttgtggaaggaaaatgcaataagcaagcttgccgttttccgatgcggtgtggagtgagtgtgtgtcgcgcgtgtccgcactggaggcatatgcttgtgtgtgtacatggggtgtgtttttcggtatgtagggagaaaatgcttgccaaccaccggaaatctcctggaatttattagaaaataatggattataaaaagaaggcaagcaaggagcggatctccccttgagttgcaacccgatttgctgctggctcagtttgttgtgattctttttgttgataggtgtctgatggtattccgataacgttccccccttttcttccccttgagcttttacagtttaaaaaaaggaaacaaaaaccaccccaaaatctccccccccgtttttttcgccccgtcgggatcgccgtttccatccatgtgcttgcgtctcccccgcgttccacttaaactattttaatccttggacccaaggaggaggctgataggggggtggataaaaaaagttcttccaaaatagtgtgcccggggagcaggatgggggatttcgcagcccccgctgctgccgcgaatggcagtagtatttgcatcaacagtagcctgaacagcagcctcggcggggccgggatcggtgtgaataatactcccaatagtactcccgctgctccgagtagcaatcacccggcagccggtggatgcggcggctccgggggccccggcggcggttcggcggccgttcccaagcacagcaccgtggtggagcggctccgccagcgcatcgagggctgccgtcggcaccacgtcaactgcgagaacaggtaccagcaggctcaggtggagcagctggagctggagcgccgggacaccgtgagcctctaccagcggaccctggagcagagggccaagaaatcgggcgccggcaccggcaaacagcagcacccgagcaaaccccagcaagatgcggaggctgcctcggcggagcagaggaaccacacgctgatcatgctacaagagactgtgaaaaggaagttggaaggagctcgatcaccacttaatggagaccagcagaatggtgcttgtgatgggaatttttctccgactagcaaacgaattcgaaaggacatttctgcggggatggaagccatcaacaatttgcccagtaacatgccactgccttcagcttctcctcttcaccaacttgacctgaaaccttctttgcccttgcagaacagtggaactcacactcctgggcttctagaagatctaagtaagaatggtaggctccctgagattaaacttcctgtcaacggttgcagtgacctggaggatagcttcaccatcttgcagagcaaagacctcaaacaagaacctctcgatgaccctacttgcatagacacatcagaaacatctctttcaaatcagaacaagctgttctcagacattaatctgaatgatcaggagtggcaagaattaatagatgaattggccaacacggttcctgaggatgacatacaggacctgttcaacgaagactttgaagagaagaaggagccagaattctcgcagccagcaactgagacccctctctcccaggagagtgcgagcgtgaagagcgacccctctcactctcccttcgcacatgtctccatgggatctccccaggcgaggccttcttcttctggtcctcccttttctactgtctccacggccactagtttaccttctgttgccagcactcccgcagctccaaaccctgcaagctcaccagcaaactgtgctgtccagtcccctcaaactccaaaccaagcccacactccaggccaagctccacctcggcctggaaatggttatctcctgaatccggcagcagtgacagtggccggttcagcgtcagggcctgtggctgtgcccagctctgacatgtctccagcagaacagctcaaacagatggctgcacagcagcaacaaagggccaaactcatgcagcagaaacagcaacagcaacagcagcagcagcagcagcagcagcagcagcagcagcagcagcagcagcagcagcagcaacagcactcaaatcagacttcaaattggtctcccttaggacctccctctagtccatatggagcagcttttactgcagaaaaaccaaatagcccaatgatgtacccccaagcctttaacaaccaaaaccctatagtgcctccaatggcaaacaacctgcagaagacaacaatgaataactacctccctcagaatcacatgaatatgatcaatcagcagccaaataacttgggtacaaactccttaaacaaacagcacaatattctgacttatggcaacactaaacccctgacccacttcaatgcagacctgagtcagaggatgacaccaccagtggccaaccccaacaaaaaccccttgatgccgtatatccagcagcagcaacagcagcagcaacagcaacagcagcagcagcagcagcagcagccgccacctccacagctccaggcccccagggcacacctgagcgaagaccagaaacgcctgcttctcatgaagcagaaaggagtgatgaatcagcccatggcttacgctgcacttccatcccacggtcaggagcagcatccagttggacttccccgaaccacaggccccatgcagtcctccgtgcccccaggctcaggtggcatggtctcaggagccagtcccgcaggccccggcttcctgggcagccagccccaagcagccatcatgaagcagatgctcattgatcagcgggcccagttgatagagcagcagaagcaacagttcctgcgggagcaaaggcagcagcagcagcagcagcagcagcagattttggcggaacagcagttgcagcaatcacatctaccccggcagcacctccagccacagcggaatccatacccagtgcagcaggtcaatcagtttcaaggttctccccaggatatagcagccgtaagaagccaagcagccctccagagcatgcgaacgtcacggctgatggcacagaacgcaggcatgatgggaataggaccctcccagaaccctgggacgatggccaccgcagctgcgcagtcggagatgggactggccccttatagcaccacgcctaccagccaaccaggaatgtacaatatgagcacaggcatgacccaaatgttgcagcatccaaaccaaagtggcatgagcatcacacataaccaagcccagggaccgaggcaacctgcctctgggcagggggttggaatggtgagtggctttggtcagagcatgctggtgaactcagccattacccagcaacatccacagatgaaagggccagtaggccaggccttgcctaggccccaagcccctccaaggctgcagagccttatgggaacagtccagcaaggagcacaaagctggcaacagaggagcttgcagggcatgcctgggaggactagtggagaattgggaccattcaacaatggcgccagctaccctcttcaagctgggcagccgagactgaccaagcagcacttcccacagggactgagccagtcagtcgtggatgctaacacgggcacagtgaggaccctcaacccagctgccatgggtcggcagatgatgccatcgctcccggggcagcaaggcaccagccaggcgaggccaatggtcatgtctggcctgagccagggagtcccaggcatgccagcgttcagccagcccccagcacagcagcagatacccagtggcagctttgctccaagcagccagagccaagcctatgagcggaatgcccctcaggacgtgtcatacaattacagtggcgacggagctgggggttccttccctggcctcccggacggtgcagaccttgtggactccatcatcaaaggcgggccaggggacgagtggatgcaggagcttgatgaattgtttggtaacccctaatcaagagaggccccaagatccacaactcgagtggttaaagcttaaaaagtgaaaaaga

SEQ ID NO: 199872 - DNA, 1381 bp, Artificial Sequence
  derived and/or modified sequence
gagcagcatccagttggacttccccgaaccacaggccccatgcagtcctccgtgcccccaggctcaggtggcatggtctcaggagccagtcccgcaggccccggcttcctgggcagccagccccaagcagccatcatgaagcagatgctcattgatcagcgggcccagttgatagagcagcagaagcaacagttcctgcgggagcaaaggcagcagcagcagcagcagcagcagcagattttggcggaacagcagttgcagcaatcacatctaccccggcagcacctccagccacagcggaatccatacccagtgcagcaggtcaatcagtttcaaggttctccccaggatatagcagccgtaagaagccaagcagccctccagagcatgcgaacgtcacggctgatggcacagaacgcaggcatgatgggaataggaccctcccagaaccctgggacgatggccaccgcagctgcgcagtcggagatgggactggccccttatagcaccacgcctaccagccaaccaggaatgtacaatatgagcacaggcatgacccaaatgttgcagcatccaaaccaaagtggcatgagcatcacacataaccaagcccagggaccgaggcaacctgcctctgggcagggggttggaatggtgagtggctttggtcagagcatgctggtgaactcagccattacccagcaacatccacagatgaaagggccagtaggccaggccttgcctaggccccaagcccctccaaggctgcagagccttatgggaacagtccagcaaggagcacaaagctggcaacagaggagcttgcagggcatgcctgggaggactagtggagaattgggaccattcaacaatggcgccagctaccctcttcaagctgggcagccgagactgaccaagcagcacttcccacagggactgagccagtcagtcgtggatgctaacacgggcacagtgaggaccctcaacccagctgccatgggtcggcagatgatgccatcgctcccggggcagcaaggcaccagccaggcgaggccaatggtcatgtctggcctgagccagggagtcccaggcatgccagcgttcagccagcccccagcacagcagcagatacccagtggcagctttgctccaagcagccagagccaagcctatgagcggaatgcccctcaggacgtgtcatacaattacagtggcgacggagctgggggttccttccctggcctcccggacggtgcagaccttgtggactccatcatcaaaggcgggccaggggacgagtggatgcaggagcttgatgaattgtttggtaacccctaatcaagagaggccccaagatccacaactcgagtggttaaagctt

SEQ ID NO: 199873 - DNA, 1632 bp, Artificial Sequence
  derived and/or modified sequence
ctgcaggagaccgtgaagcggaagctggagggcgcccggagccccttgaatggagatcaacagaacggcgcttgcgacggcaacttctccccaacatcaaagcgcatcaggaaagacatttcagccgggatggaagctataaacaacctgcccagtaacatgcctctgccatccgcttcacctctgcaccagctagatctgaagcccagtctgcccctacaaaactcgggcacccacaccccaggattactggaggatctttctaagaacgggcgtttacctgagattaaactgccagtgaatggctgctctgacttggaggattcttttaccattctccagagcaaagatttgaagcaagagcctctggacgacccgacctgcatcgatacatctgagacatcactctcaaatcagaacaaactgttctccgacattaatctgaacgaccaggagtggcaggaattgatcgatgagttggcgaacacagtgcctgaggacgatatccaggacttgtttaacgaagattttgaagagaaaaaagaaccagagttctctcagcccgccactgagactccgttgagtcaggaaagcgcttctgtgaaaagcgaccccagtcactctccattcgcccatgtcagtatgggctccccccaggcccgaccctcctcatcaggtccccctttctctaccgtttcaactgccaccagtcttcccagcgtggcatctacacccgctgcacccaaccctgctagttctcccgcaaactgcgcggtacaatccccgcagacccccaatcaggcccacaccccagggcaggctcctccgaggcctggcaacgggtatctactcaacccagcagcagtgactgtcgctggatccgcatccggccccgttgccgttccctcctcggatatgagcccagctgagcagttgaagcagatggccgcacagcagcagcaacgcgccaagctgatgcaacaaaagcagcagcagcaacagcagcagcaacagcagcagcaacagcagcaacagcaacagcagcagcagcaacagcagcagcattccaaccaaacaagtaattggtcgccacttggccccccaagcagtccttatggagccgctttcacagcggaaaaacccaattccccaatgatgtacccccaagccttcaacaaccagaatcctatcgttccccccatggctaataatttgcagaaaactacaatgaataattatctaccccagaatcacatgaacatgattaaccagcagcctaataacctggggacaaactctctgaataagcagcacaatattttgacttatgggaacacaaagcccctgactcattttaacgccgacctgtctcagagaatgacaccaccagtcgcaaatcctaacaagaaccctttgatgccctatatccaacaacaacaacagcagcagcagcagcagcagcaacagcagcaacaacaacagcccccccccccccagctacaggccccccgcgcacacctcagtgaggaccagaagcgcttgcttttaatgaaacagaagggcgtgatgaaccagcctatggcttatgcggcactcccttctcacgggcaggaacagcagcccgttggttag

SEQ ID NO: 199874 - DNA, 831 bp, Artificial Sequence
  derived and/or modified sequence
atgagccccgccgagcagctgaagcagatggccgcccagcagcagcagcgcgcaaaactcatgcaacaaaagcagcaacagcaacagcagcagcagcaacagcagcaacaacagcatagcaaccaaaccagcaactggagccctctaggtcccccatcctctccctacggggccgcattcacagcagagaaaccaaactccccaatgatgtatccacaggccttcaataatcagaatccaattgtgcctcctatggccaacaacctgcagaagacaactatgaacaactacctaccacaaaatcatatgaacatgatcaatcagcagcctaacaacctgggcaccaattcacttaataaacagcacaatatcttgacttatggcaatactaaacctttgacccactttaacgccgatctaagccagcgcatgaccccgcccgtggcgaatccaaataaaaatccactgatgccgtatatacaacaacaacaacaacaacagcagcagcagcagcagcagcagcagcagcagcaacctccccccccacaactacaagctccaagagcccatttatccgaggatcagaaacgcctgctcctaatgaagcagaaaggagtcatgaatcagcctatggcatatgctgctctgccctcccacggccaggtcagcgtaaaggtcacgcacagctctagctcttcttgcggggcctttgactgccggtgtgttatgttttataagtctactgttgttggctccaactgccttcagaaaacctctctgcacccccaggtggtagccagattcggcgtgttcttttttcattttagttag

SEQ ID NO: 199875 - DNA, 3417 bp, Artificial Sequence
  derived and/or modified sequence
atgggcgacttcgccgcccccgccgccgccgccaacggcagcagcatatgcatcaacagtagtctgaattctagtctgggtggcgcagggatcggcgtcaacaatactcctaattctactcccgctgcccccagctctaatcacccggcagccggaggttgcgggggaagtggaggccctggtggcggaagcgctgccgtccctaagcatagtactgtcgtagaaagactgcgccaaaggatcgaaggttgtcgaaggcaccacgttaactgtgagaatagatatcagcaggcgcaggtagagcagctcgagctggagcgccgggataccgtctcgctctatcagagaactcttgagcaacgtgctaaaaagtctggcgctggtacgggcaagcagcagcatccgagcaaaccgcagcaggacgcagaggccgcatcagccgagcagaggaaccacacccttatcatgctgcaagaaaccgtgaagaggaagctggagggcgcccgcagtcccttgaacggagaccagcagaacggggcttgcgacggcaatttcagccccactagtaaacgtattaggaaagatatttccgccggcatggaagctattaataacctgccatctaacatgcccttaccaagtgcgtctcctctgcaccagctcgatttgaagccatctcttcccctgcagaattctgggacccacacgcccggtttgttagaggacctcagtaagaacggccggcttcctgagattaagttgcccgtaaatggatgttctgacctggaagactcatttactatcctgcagagtaaggacctgaagcaagaacctctggatgacccaacgtgtatcgacactagtgagaccagtctttcaaatcaaaacaaactgtttagcgacatcaatctgaatgatcaggaatggcaggaactcattgatgagctggcgaatactgtccctgaagatgatatccaggatttgtttaacgaagacttcgaagagaagaaggaaccagaattctcccagcccgccacagaaacaccactgagtcaggagagcgcttcagtgaaaagtgaccccagccatagcccgtttgcccacgtttcaatgggatctcctcaggcccggccctcaagttccggtccccccttcagcactgtgagcaccgcgacatcactgccaagcgtggccagcactcccgccgcacccaaccccgccagcagtccagccaactgcgcggtccagtcccctcagacccctaaccaggcccacactcctgggcaagcgccccctcgccccggaaacggctaccttctgaaccccgcagctgtaaccgtggcaggttccgcctcaggacctgtggcagttccatccagtgacatgagccctgctgagcagctgaaacagatggccgcccagcagcagcaacgtgccaagcttatgcagcagaagcagcagcaacagcaacagcagcagcagcagcagcagcaacagcagcaacagcagcaacagcaacagcagcagcagcactctaatcagactagcaactggtctcccttaggaccaccatccagtccatatggcgctgcttttacagcagagaaacctaactctcccatgatgtacccgcaggcatttaacaaccagaacccgatcgtgccaccgatggcaaacaacctgcaaaagaccacgatgaacaactacctaccacaaaatcacatgaatatgataaatcagcaacccaacaacctgggtacaaattcactcaacaagcagcataatattcttacctatgggaacactaagccactcactcatttcaacgcggacctgtcccagcgtatgacacctcctgtggccaacccgaataaaaaccccttaatgccttatattcagcagcagcagcaacagcagcagcagcagcagcagcagcaacaacagcagcagccaccccccccgcaactgcaggctcccagggcacacctcagcgaggatcagaagcgcctcctgctcatgaaacagaagggggtgatgaaccaaccgatggcatacgcagcgctgccgagccacggtcaagaacaacatcctgtcggactgccccggactacaggacctatgcagtcctccgttccaccaggttctggtggaatggtctctggagcatcccccgcgggcccagggtttcttggctcccaaccccaggcagccattatgaaacaaatgctgatcgatcagcgggcacagcttattgagcagcaaaagcagcaattcctccgcgaacagcgccagcagcagcagcagcagcagcagcagatcctggctgagcagcagcttcagcagtctcacttaccgcggcaacacttacagccccagcgtaatccataccccgttcaacaggtcaaccagttccagggttccccgcaggacattgccgccgtcaggtcacaggctgcgttgcagtcaatgagaacttcacgcctgatggcacaaaatgcgggcatgatgggcatcggcccgagccagaatcccggcacaatggccacagccgctgctcaatctgaaatgggactggcgccatattccacgacaccaacttcccagcccggaatgtacaacatgtcgactgggatgacacaaatgctacagcatcccaaccaatctgggatgtccattactcacaaccaggcccagggtcctcgacaaccggccagtggacagggagtcggaatggtttcggggttcggccagtcaatgctggtcaactctgccattacgcagcagcacccacagatgaagggcccagtcggccaggccctgcccagaccacaagccccaccgaggctgcaatcactgatgggcaccgtgcagcaaggagcccaatcatggcagcaacgctccctccaaggcatgcctggaagaacatccggggagctggggccttttaacaatggcgcttcgtatcctctgcaggccggccagccacgactgacaaagcagcattttcctcaaggcctgtctcagagcgtcgtggatgctaatacaggcactgtacgaacgcttaaccctgccgccatgggccgtcagatgatgccctctctgccaggccaacagggcacgtcccaggcccgcccaatggtgatgagcgggctctctcaaggcgtgcctgggatgcccgcattcagccagcctcctgcccaacaacagatcccctccggttctttcgccccgagttctcagtctcaggcatacgaacggaacgccccacaggacgtgtcttataattactctggcgatggagctggtgggtcatttcccggactgcccgatggtgctgacctggtagatagcattatcaaaggaggccccggggacgagtggatgcaagagctggacgaattgttcggcaacccatag

SEQ ID NO: 199876 - DNA, 1338 bp, Artificial Sequence
  derived and/or modified sequence
gagcagcaccccgtgggcctgccccggaccaccggccccatgcagtccagcgttcccccaggatccgggggcatggtctctggcgcctctccagcgggcccgggcttcctgggctcacagccccaggctgcaattatgaaacagatgctcatcgaccagagagctcaactgattgaacagcagaagcagcaatttttgcgcgaacaacggcagcagcagcagcagcaacagcagcagatcctggccgagcagcaattacagcagtctcatctgcctcgacagcacctgcagcctcagagaaatccttatcccgtgcaacaggtcaatcaattccagggatccccacaggatatcgccgctgtccgatcgcaggctgccctccagtcgatgcgcaccagccgcctcatggcacagaatgccggcatgatgggcatcggaccctctcagaatcctggcacaatggcaaccgccgccgcacagtcagagatgggattggctccgtacagcactacccccactagccagcctggcatgtataatatgtctacaggaatgactcagatgctacagcaccctaaccagtctggaatgagtatcacgcataaccaagcccaggggcctcgtcagcctgcttccggacagggtgttggaatggttagcggcttcggacagagtatgttagtgaacagcgccatcacacaacagcatccacagatgaagggcccagtgggacaagccctgccacgtcctcaggctcccccaagacttcagtcactcatgggcaccgtgcagcagggcgcccaatcttggcagcagagaagcctccagggaatgcccggcaggacttcgggcgagctggggccgtttaataatggggcatcctacccgcttcaagccgggcagccccgattgaccaagcagcattttccacagggcctaagccagagcgtagtggacgccaacactgggaccgtccggacgctcaacccagcagcaatgggaagacagatgatgccgagcctgccaggccagcagggaacgtctcaggcgagacctatggttatgagcggcctcagccagggggtccccggcatgcctgcgttttcgcagccccccgctcaacagcagatcccttcggggtctttcgcaccatcaagccagtctcaggcctatgagagaaatgcaccccaggatgtctcatataattactctggcgatggagccggagggtcgttccccgggctgccagatggggccgacctagtagatagcatcattaagggaggccccggggatgagtggatgcaagaactcgacgaactttttggaaatccgtag

SEQ ID NO: 199877 - DNA, 1632 bp, Artificial Sequence
  derived and/or modified sequence
ttgcaggaaacggtaaagagaaagctcgaaggcgcaagatcccctctgaatggggaccagcaaaatggggcatgcgacggcaacttcagtcccaccagcaaacggattcggaaggacattagcgcaggaatggaggccatcaacaatctaccaagcaacatgcctctgccatctgcgtccccactgcatcagttggacctgaaaccctccctacccctccagaacagtgggacgcacacacccggactgctcgaggatctgagcaaaaacgggcgactgcctgagattaagttgcccgtgaatgggtgctctgacctagaagactccttcaccatattgcaatctaaggacctcaaacaggagcctctagacgatcctacctgcattgataccagtgagacctccttatcaaaccagaataagctcttttccgacattaacctgaacgatcaagaatggcaggaattaattgatgagttagctaatacagtgccggaagatgatatccaggacttgtttaacgaggatttcgaggagaagaaggaacccgaattcagtcagcctgccactgagactccgctgagccaggaatccgcttcagtcaagagtgatccgagccatagcccgtttgcacacgtcagtatgggtagcccccaggctaggccatccagctccggtcccccattttctaccgtatcaacagccacctcgcttccttcagtggctagcacaccggctgcgcctaaccccgctagttcacccgctaattgcgccgtgcagtcaccacagacccccaatcaggcgcatactccaggccaagctccacctagacctggaaacggctacctgctcaatccagccgctgtgactgtggccggttccgccagtggaccagtagcggtcccaagcagtgatatgtcaccagccgagcagctaaaacagatggcagctcagcagcagcaacgggcaaagcttatgcagcaaaagcagcagcagcagcagcagcaacagcagcagcagcagcaacagcagcagcagcagcagcagcagcagcaacagcaacacagcaaccagacgtcaaattggtctccactgggacccccatcaagtccgtatggggctgcctttacagcagaaaaacctaatagccctatgatgtacccccaggcattcaacaatcagaacccaattgtgcctcctatggcaaataacctccagaaaactaccatgaacaactacctaccccaaaatcatatgaatatgataaatcagcagcctaacaacctgggaaccaattctctgaacaaacagcacaacattctgacttacggaaatacgaagccactgacccatttcaatgcagatctgagccagcggatgaccccccctgtagccaaccccaataaaaatcctctcatgccatacattcagcagcagcagcagcagcagcagcagcaacagcagcagcagcagcagcaacagccgcctccgccacaactgcaggcccctagggcacatctgagcgaagatcagaaaaggctgctcttgatgaagcagaagggcgtaatgaatcaaccgatggcctacgccgcacttccctcccatgggcaggagcagcagcccgtggggtag

SEQ ID NO: 199878 - DNA, 831 bp, Artificial Sequence
  derived and/or modified sequence
atgtcgccggcagaacagctgaaacagatggccgcacaacagcagcagcgggctaagctgatgcaacaaaagcaacagcagcagcagcaacagcagcagcaacagcagcagcagcactcgaaccagactagcaattggtcgccactcggccctccatcctctccgtacggcgcagcctttaccgccgaaaagccaaattccccaatgatgtacccccaggctttcaacaatcagaacccaatcgtccccccaatggccaataacctgcagaagaccacaatgaacaactatctgcctcaaaatcacatgaatatgattaaccagcaacctaataatctggggacaaattcgctgaacaaacaacacaacattttaacgtatggaaataccaagcctcttacccatttcaacgccgatctgtcccaacgtatgactccaccagtcgctaatccgaacaagaaccctctaatgccctatatccagcagcagcagcagcagcagcagcagcagcagcagcagcagcagcaacagcaaccgccacccccacaactgcaggcaccacgcgctcacttgtctgaggaccagaaacgcctcctgctgatgaagcagaagggagtgatgaaccagcccatggcctacgcggcactaccctctcacggtcaggtgtcagtgaaagtgacacattcctctagttcctcatgtggggcttttgactgcaggtgcgtaatgttctataagagcacagtcgttggctcaaactgcctccagaagacatctctgcaccctcaggtggtggcgagattcggcgtattcttttttcacttcagttag

SEQ ID NO: 199879 - DNA, 3417 bp, Artificial Sequence
  derived and/or modified sequence
atgggagattttgcagcccctgctgccgcagccaacggcagctccatatgtatcaactccagtcttaactcctctctcgggggagccggaataggagtcaataacacgcccaacagtactcccgcagctccctctagtaaccacccggctgcagggggttgcggcggttccggtggacccggaggcggaagtgcggctgtccccaaacacagcacagtggtggaacgactgaggcagcgcatcgaggggtgccggcgtcaccacgtcaattgtgagaatagatatcaacaggcccaagtggagcagttggaactggagcgcagggataccgtctcactttaccagagaacactcgagcagcgagctaaaaagtccggggcaggcacaggaaagcaacagcatccatcaaagccacagcaggacgccgaggcagcatctgctgagcagcgcaatcacaccctgataatgctgcaagagaccgtcaaaaggaaacttgaaggcgctcggagccctctcaacggagaccaacaaaacggcgcatgcgatgggaacttctcgccaactagcaaaagaatccgtaaggatatttccgccggtatggaggctataaataatctccctagcaacatgcccctccctagcgctagccctttgcatcaacttgacctaaagccaagtctacctttgcaaaacagcggcacccatacaccgggactcctggaggatctgtcaaaaaacggcagactgcccgaaattaagttacctgtgaacggatgctctgatctagaagattctttcacaattctgcaaagtaaggatctcaagcaggaacctctcgatgaccccacgtgcatagacactagcgagaccagtcttagtaatcagaataaattgttctcagatattaatcttaacgaccaggaatggcaggagctgattgacgaacttgctaatacagtgcccgaggacgacattcaggatctgtttaacgaagatttcgaggagaaaaaggagcctgaatttagtcagccagcaaccgagactcctcttagccaagagtccgcctccgtgaagtcagatccgtctcactccccgttcgcccacgtctcaatgggatcccctcaagcacgcccttctagtagcggccctccattctccactgtttccaccgccacctcgctgccctctgtagcatcaaccccggctgccccaaacccagcttcatctccagccaactgcgctgtacagtcgccacaaacacccaaccaagcacatacaccagggcaggctccgcctcgtcctggtaacggatacctgctgaatcctgccgctgtcacagtagccggttcggcctcaggccctgttgctgtccctagctcggatatgtccccagccgagcagctcaagcagatggccgctcagcagcaacagcgggctaagctgatgcagcagaagcagcagcagcagcagcagcagcagcaacaacagcagcaacagcagcagcagcagcagcaacagcaacaacaacagcactccaaccaaacgagtaactggtcccctctgggaccccctagttcaccttacggggcagccttcaccgcagagaagcccaatagtcccatgatgtatccacaagctttcaataaccagaatcccatcgtccccccaatggcgaataacctacaaaaaacaactatgaataattacctaccacagaaccatatgaacatgatcaatcagcagccaaataacctcggcactaacagcctgaacaaacagcataacatcctcacgtacggaaataccaaaccactgacccatttcaacgctgatttgtctcagagaatgactccacctgtcgctaatcctaacaagaatcctctcatgccatatatacagcagcagcagcagcaacagcaacagcagcagcagcagcagcaacagcaacaaccccctcctccacagctccaggccccacgggcacacctctccgaagaccaaaagagacttctgttgatgaaacagaaaggggtgatgaaccagcctatggcatacgctgccctccccagtcatggtcaggaacagcacccggtgggcctcccaaggactaccggtccgatgcagagcagtgtgcccccaggctctgggggtatggtctccggggcttctcccgctgggcctggtttcctggggagccaacctcaggcagccatcatgaaacaaatgctgatcgaccaacgtgcccaactcattgagcagcagaaacagcagttcctcagagagcaaagacagcagcaacaacagcaacagcagcagattctggctgaacagcaacttcaacagtctcacctcccgaggcagcatttacagccacagcgtaatccctatccagtacagcaggttaaccagttccaaggaagcccccaggatatcgccgctgtcaggtctcaggccgctttacaatccatgagaacatcgcgactgatggcacagaacgcgggaatgatgggtataggaccaagtcagaatcccggtacgatggcaactgccgctgcccagtctgaaatgggtttggccccttactcaactacgcctactagccagcctgggatgtacaacatgagtacaggcatgacccagatgttacaacatccaaaccagtccgggatgagcataacgcacaatcaggctcaggggccacgccagcctgccagcggacagggggtgggaatggtgtctgggtttgggcaatccatgctggtcaacagtgcaatcacacagcagcatccccagatgaaaggaccagtcggtcaggccctcccacgtccacaggcacctccaagattgcaatctttaatggggaccgtacagcagggagcccagtcttggcagcagcgcagtctgcagggtatgccgggaagaacctccggggagctggggccatttaacaatggggcatcctatcctctgcaagccggacaaccccgattgaccaaacagcacttcccccaggggctatcacaatcagtggttgatgctaacaccggaacagtgcggacgttaaaccccgctgccatgggacggcagatgatgccgtcgctccctgggcaacaggggacctcacaagcacggccaatggttatgagtggactctctcagggagtgccgggaatgccggcattctctcagcctcccgctcagcagcagattccctccggcagcttcgccccttcgtcacagtctcaagcgtacgagcggaacgcacctcaggacgtgtcctataactactccggagatggcgctggcggaagctttccaggactacctgatggtgcggatcttgtggattctatcattaaagggggacctggagatgaatggatgcaagagctagatgagttgtttggaaacccatag

SEQ ID NO: 199880 - DNA, 1338 bp, Artificial Sequence
  derived and/or modified sequence
gagcagcatcccgtaggtctgcccaggactacaggtcctatgcagagctccgtcccccctggatcaggaggcatggtgagcggagcatcaccggctggcccagggttcctcggctcgcagcctcaggcagctatcatgaagcaaatgctcattgaccagcgagcgcagctcatcgagcagcagaagcagcaatttctgagggagcagcgacaacaacagcagcagcagcagcagcagatcctggccgaacagcaactgcagcagtctcacctcccaaggcagcacctacaaccccagcgcaacccctatcccgtgcaacaggtaaaccaattccagggcagcccgcaagatatcgccgctgtgagatcacaagccgcactgcagagtatgcggacctcacgtctgatggcccaaaacgcgggtatgatgggtattgggccaagccagaatcctggaacgatggccacggcagccgctcagagcgagatgggtctagccccatattccactacccctacttctcaacctggcatgtataatatgtccactggcatgacccagatgcttcagcaccctaaccaaagtggcatgtccatcacccacaaccaggcacaaggaccaagacagccagcgagtggccagggcgtaggcatggtgtccggtttcgggcagagcatgctcgtgaacagcgccattacccagcagcatcctcaaatgaagggccctgtagggcaggctctgcctcgaccgcaggctcctcccaggctccaatccctgatggggaccgtacagcaaggggctcaatcttggcagcagcgcagcttacaggggatgccaggacggacctcaggcgagctcggccctttcaataacggcgcatcttacccacttcaggctggccagcctaggctcaccaagcagcattttccccagggcctgagtcagtccgtggtcgatgcaaacactggaaccgttaggactcttaacccagccgcaatgggtagacagatgatgcccagcctcccaggacaacagggcacttcccaagccagacccatggttatgtctggactttcccagggcgtgcccggaatgcctgccttcagccagccacctgcccagcagcagatcccctccggctcctttgcacccagctcccaaagtcaggcttacgagagaaatgctcctcaagatgttagttacaactattcgggggacggtgctggaggcagtttcccaggattgccagacggagccgacctggttgatagcatcatcaaaggtggtcccggagacgagtggatgcaggaactcgatgaacttttcggaaacccctag

SEQ ID NO: 199881 - DNA, 1632 bp, Artificial Sequence
  derived and/or modified sequence
ctgcaggagaccgtgaagagaaagctggagggcgccagaagccccctgaacggcgaccagcagaacggcgcctgcgacggcaacttcagccccaccagcaagagaatcagaaaggacatcagcgccggcatggaggccatcaacaacctgcccagcaacatgcccctgcccagcgccagccccctgcaccagctggacctgaagcccagcctgcccctgcagaacagcggcacccacacccccggcctgctggaggacctgagcaagaacggcagactgcccgagatcaagctgcccgtgaacggctgcagcgacctggaggacagcttcaccatcctgcagagcaaggacctgaagcaggagcccctggacgaccccacctgcatcgacaccagcgagaccagcctgagcaaccagaacaagctgttcagcgacatcaacctgaacgaccaggagtggcaggagctgatcgacgagctggccaacaccgtgcccgaggacgacatccaggacctgttcaacgaggacttcgaggagaagaaggagcccgagttcagccagcccgccaccgagacccccctgagccaggagagcgccagcgtgaagagcgaccccagccacagccccttcgcccacgtgagcatgggcagcccccaggccagacccagcagcagcggcccccccttcagcaccgtgagcaccgccaccagcctgcccagcgtggccagcacccccgccgcccccaaccccgccagcagccccgccaactgcgccgtgcagagcccccagacccccaaccaggcccacacccccggccaggccccccccagacccggcaacggctacctgctgaaccccgccgccgtgaccgtggccggcagcgccagcggccccgtggccgtgcccagcagcgacatgagccccgccgagcagctgaagcagatggccgcccagcagcagcagagagccaagctgatgcagcagaagcagcagcagcagcagcagcagcagcagcagcagcagcagcagcagcagcagcagcagcagcagcagcagcagcagcacagcaaccagaccagcaactggagccccctgggcccccccagcagcccctacggcgccgccttcaccgccgagaagcccaacagccccatgatgtacccccaggccttcaacaaccagaaccccatcgtgccccccatggccaacaacctgcagaagaccaccatgaacaactacctgccccagaaccacatgaacatgatcaaccagcagcccaacaacctgggcaccaacagcctgaacaagcagcacaacatcctgacctacggcaacaccaagcccctgacccacttcaacgccgacctgagccagagaatgaccccccccgtggccaaccccaacaagaaccccctgatgccctacatccagcagcagcagcagcagcagcagcagcagcagcagcagcagcagcagcagcagcccccccccccccagctgcaggcccccagagcccacctgagcgaggaccagaagagactgctgctgatgaagcagaagggcgtgatgaaccagcccatggcctacgccgccctgcccagccacggccaggagcagcagcccgtgggctag

SEQ ID NO: 199882 - DNA, 831 bp, Artificial Sequence
  derived and/or modified sequence
atgagccccgccgagcagctgaagcagatggccgcccagcagcagcagagagccaagctgatgcagcagaagcagcagcagcagcagcagcagcagcagcagcagcagcagcagcacagcaaccagaccagcaactggagccccctgggcccccccagcagcccctacggcgccgccttcaccgccgagaagcccaacagccccatgatgtacccccaggccttcaacaaccagaaccccatcgtgccccccatggccaacaacctgcagaagaccaccatgaacaactacctgccccagaaccacatgaacatgatcaaccagcagcccaacaacctgggcaccaacagcctgaacaagcagcacaacatcctgacctacggcaacaccaagcccctgacccacttcaacgccgacctgagccagagaatgaccccccccgtggccaaccccaacaagaaccccctgatgccctacatccagcagcagcagcagcagcagcagcagcagcagcagcagcagcagcagcagcagcccccccccccccagctgcaggcccccagagcccacctgagcgaggaccagaagagactgctgctgatgaagcagaagggcgtgatgaaccagcccatggcctacgccgccctgcccagccacggccaggtgagcgtgaaggtgacccacagcagcagcagcagctgcggcgccttcgactgcagatgcgtgatgttctacaagagcaccgtggtgggcagcaactgcctgcagaagaccagcctgcacccccaggtggtggccagattcggcgtgttcttcttccacttcagctag

SEQ ID NO: 199883 - DNA, 3417 bp, Artificial Sequence
  derived and/or modified sequence
atgggcgacttcgccgcccccgccgccgccgccaacggcagcagcatctgcatcaacagcagcctgaacagcagcctgggcggcgccggcatcggcgtgaacaacacccccaacagcacccccgccgcccccagcagcaaccaccccgccgccggcggctgcggcggcagcggcggccccggcggcggcagcgccgccgtgcccaagcacagcaccgtggtggagagactgagacagagaatcgagggctgcagaagacaccacgtgaactgcgagaacagataccagcaggcccaggtggagcagctggagctggagagaagagacaccgtgagcctgtaccagagaaccctggagcagagagccaagaagagcggcgccggcaccggcaagcagcagcaccccagcaagccccagcaggacgccgaggccgccagcgccgagcagagaaaccacaccctgatcatgctgcaggagaccgtgaagagaaagctggagggcgccagaagccccctgaacggcgaccagcagaacggcgcctgcgacggcaacttcagccccaccagcaagagaatcagaaaggacatcagcgccggcatggaggccatcaacaacctgcccagcaacatgcccctgcccagcgccagccccctgcaccagctggacctgaagcccagcctgcccctgcagaacagcggcacccacacccccggcctgctggaggacctgagcaagaacggcagactgcccgagatcaagctgcccgtgaacggctgcagcgacctggaggacagcttcaccatcctgcagagcaaggacctgaagcaggagcccctggacgaccccacctgcatcgacaccagcgagaccagcctgagcaaccagaacaagctgttcagcgacatcaacctgaacgaccaggagtggcaggagctgatcgacgagctggccaacaccgtgcccgaggacgacatccaggacctgttcaacgaggacttcgaggagaagaaggagcccgagttcagccagcccgccaccgagacccccctgagccaggagagcgccagcgtgaagagcgaccccagccacagccccttcgcccacgtgagcatgggcagcccccaggccagacccagcagcagcggcccccccttcagcaccgtgagcaccgccaccagcctgcccagcgtggccagcacccccgccgcccccaaccccgccagcagccccgccaactgcgccgtgcagagcccccagacccccaaccaggcccacacccccggccaggccccccccagacccggcaacggctacctgctgaaccccgccgccgtgaccgtggccggcagcgccagcggccccgtggccgtgcccagcagcgacatgagccccgccgagcagctgaagcagatggccgcccagcagcagcagagagccaagctgatgcagcagaagcagcagcagcagcagcagcagcagcagcagcagcagcagcagcagcagcagcagcagcagcagcagcagcagcagcacagcaaccagaccagcaactggagccccctgggcccccccagcagcccctacggcgccgccttcaccgccgagaagcccaacagccccatgatgtacccccaggccttcaacaaccagaaccccatcgtgccccccatggccaacaacctgcagaagaccaccatgaacaactacctgccccagaaccacatgaacatgatcaaccagcagcccaacaacctgggcaccaacagcctgaacaagcagcacaacatcctgacctacggcaacaccaagcccctgacccacttcaacgccgacctgagccagagaatgaccccccccgtggccaaccccaacaagaaccccctgatgccctacatccagcagcagcagcagcagcagcagcagcagcagcagcagcagcagcagcagcagcccccccccccccagctgcaggcccccagagcccacctgagcgaggaccagaagagactgctgctgatgaagcagaagggcgtgatgaaccagcccatggcctacgccgccctgcccagccacggccaggagcagcaccccgtgggcctgcccagaaccaccggccccatgcagagcagcgtgccccccggcagcggcggcatggtgagcggcgccagccccgccggccccggcttcctgggcagccagccccaggccgccatcatgaagcagatgctgatcgaccagagagcccagctgatcgagcagcagaagcagcagttcctgagagagcagagacagcagcagcagcagcagcagcagcagatcctggccgagcagcagctgcagcagagccacctgcccagacagcacctgcagccccagagaaacccctaccccgtgcagcaggtgaaccagttccagggcagcccccaggacatcgccgccgtgagaagccaggccgccctgcagagcatgagaaccagcagactgatggcccagaacgccggcatgatgggcatcggccccagccagaaccccggcaccatggccaccgccgccgcccagagcgagatgggcctggccccctacagcaccacccccaccagccagcccggcatgtacaacatgagcaccggcatgacccagatgctgcagcaccccaaccagagcggcatgagcatcacccacaaccaggcccagggccccagacagcccgccagcggccagggcgtgggcatggtgagcggcttcggccagagcatgctggtgaacagcgccatcacccagcagcacccccagatgaagggccccgtgggccaggccctgcccagaccccaggccccccccagactgcagagcctgatgggcaccgtgcagcagggcgcccagagctggcagcagagaagcctgcagggcatgcccggcagaaccagcggcgagctgggccccttcaacaacggcgccagctaccccctgcaggccggccagcccagactgaccaagcagcacttcccccagggcctgagccagagcgtggtggacgccaacaccggcaccgtgagaaccctgaaccccgccgccatgggcagacagatgatgcccagcctgcccggccagcagggcaccagccaggccagacccatggtgatgagcggcctgagccagggcgtgcccggcatgcccgccttcagccagccccccgcccagcagcagatccccagcggcagcttcgcccccagcagccagagccaggcctacgagagaaacgccccccaggacgtgagctacaactacagcggcgacggcgccggcggcagcttccccggcctgcccgacggcgccgacctggtggacagcatcatcaagggcggccccggcgacgagtggatgcaggagctggacgagctgttcggcaacccctag

SEQ ID NO: 199884 - DNA, 1338 bp, Artificial Sequence
  derived and/or modified sequence
gagcagcaccccgtgggcctgcccagaaccaccggccccatgcagagcagcgtgccccccggcagcggcggcatggtgagcggcgccagccccgccggccccggcttcctgggcagccagccccaggccgccatcatgaagcagatgctgatcgaccagagagcccagctgatcgagcagcagaagcagcagttcctgagagagcagagacagcagcagcagcagcagcagcagcagatcctggccgagcagcagctgcagcagagccacctgcccagacagcacctgcagccccagagaaacccctaccccgtgcagcaggtgaaccagttccagggcagcccccaggacatcgccgccgtgagaagccaggccgccctgcagagcatgagaaccagcagactgatggcccagaacgccggcatgatgggcatcggccccagccagaaccccggcaccatggccaccgccgccgcccagagcgagatgggcctggccccctacagcaccacccccaccagccagcccggcatgtacaacatgagcaccggcatgacccagatgctgcagcaccccaaccagagcggcatgagcatcacccacaaccaggcccagggccccagacagcccgccagcggccagggcgtgggcatggtgagcggcttcggccagagcatgctggtgaacagcgccatcacccagcagcacccccagatgaagggccccgtgggccaggccctgcccagaccccaggccccccccagactgcagagcctgatgggcaccgtgcagcagggcgcccagagctggcagcagagaagcctgcagggcatgcccggcagaaccagcggcgagctgggccccttcaacaacggcgccagctaccccctgcaggccggccagcccagactgaccaagcagcacttcccccagggcctgagccagagcgtggtggacgccaacaccggcaccgtgagaaccctgaaccccgccgccatgggcagacagatgatgcccagcctgcccggccagcagggcaccagccaggccagacccatggtgatgagcggcctgagccagggcgtgcccggcatgcccgccttcagccagccccccgcccagcagcagatccccagcggcagcttcgcccccagcagccagagccaggcctacgagagaaacgccccccaggacgtgagctacaactacagcggcgacggcgccggcggcagcttccccggcctgcccgacggcgccgacctggtggacagcatcatcaagggcggccccggcgacgagtggatgcaggagctggacgagctgttcggcaacccctag

SEQ ID NO: 199885 - protein, 373 aa, Artificial Sequence
  derived and/or modified sequence
MSLRRHIGNPEYLMKRIPQNPRYQHIKSRLDTGNSMTKYTEKLEEIKKNYRYKKDELFKRLKVTTFAQLIIQVASLSDQTLEVTAEEIQRLEDNDSAASDPDAETTARTNGKGNPGEQSPSPEQFINNAGAGDSSRSTLQSVISGVGELDLDKGPVKKAEPHTKDKPYPDCPFLLLDVRDRDSYQQCHIVGAYSYPIATLSRTMNPYSNDILEYKNAHGKIIILYDDDERLASQAATTMCERGFENLFMLSGGLKVLAQKFPEGLITGSLPASCQQALPPGSARKRSSPKGPPLPAENKWRFTPEDLKKIEYYLEEEQGPADHPSRLNQANSSGRESKVPGARSAQNLPGGGPASHSNPRSLSSGHLQGKPWK

SEQ ID NO: 199886 - DNA, 1122 bp, Artificial Sequence
  derived and/or modified sequence
atgagcctgagaagacacatcggcaaccccgagtacctgatgaagagaatcccccagaaccccagataccagcacatcaagagcagactggacaccggcaacagcatgaccaagtacaccgagaagctggaggagatcaagaagaactacagatacaagaaggacgagctgttcaagagactgaaggtgaccaccttcgcccagctgatcatccaggtggccagcctgagcgaccagaccctggaggtgaccgccgaggagatccagagactggaggacaacgacagcgccgccagcgaccccgacgccgagaccaccgccagaaccaacggcaagggcaaccccggcgagcagagccccagccccgagcagttcatcaacaacgccggcgccggcgacagcagcagaagcaccctgcagagcgtgatcagcggcgtgggcgagctggacctggacaagggccccgtgaagaaggccgagccccacaccaaggacaagccctaccccgactgccccttcctgctgctggacgtgagagacagagacagctaccagcagtgccacatcgtgggcgcctacagctaccccatcgccaccctgagcagaaccatgaacccctacagcaacgacatcctggagtacaagaacgcccacggcaagatcatcatcctgtacgacgacgacgagagactggccagccaggccgccaccaccatgtgcgagagaggcttcgagaacctgttcatgctgagcggcggcctgaaggtgctggcccagaagttccccgagggcctgatcaccggcagcctgcccgccagctgccagcaggccctgccccccggcagcgccagaaagagaagcagccccaagggcccccccctgcccgccgagaacaagtggagattcacccccgaggacctgaagaagatcgagtactacctggaggaggagcagggccccgccgaccaccccagcagactgaaccaggccaacagcagcggcagagagagcaaggtgcccggcgccagaagcgcccagaacctgcccggcggcggccccgccagccacagcaaccccagaagcctgagcagcggccacctgcagggcaagccctggaagtag

SEQ ID NO: 199887 - DNA, 1122 bp, Artificial Sequence
  derived and/or modified sequence
atgtctttacggaggcacattggaaatccagaatacctgatgaagcgcatcccccaaaaccctcgatatcaacatattaaatccagactcgatactggaaactccatgactaaatatactgaaaagttagaggagatcaagaagaactatcggtacaaaaaagatgagttgttcaagcggcttaaagtcacaacattcgcccagttgataatacaagtggcgtccctgagcgaccagacgttggaggtaactgccgaggagatccagcggttggaggataacgacagtgccgcttcggatcccgatgccgaaacgacagcacgcaccaacggtaagggtaatcctggtgagcagagtccctcccccgagcagtttataaataacgcgggagctggcgattctagtcgatctactttgcagagtgtcatcagcggagttggggagctagatttggacaaggggcccgtcaaaaaggcagagccacacacaaaggacaagccctaccctgactgccccttcctgctgctggatgtgagagatagggactcatatcagcagtgtcacatcgtgggggcatattcgtaccccattgccaccctgagtaggactatgaatccctacagcaatgatatactagagtataagaacgcccacggaaaaatcattatactgtacgatgacgacgagcggcttgcaagccaggcagctaccaccatgtgtgagcgggggtttgagaatctgtttatgctgtcaggtggccttaaggttttggctcaaaagtttcccgagggcctcattacagggtccttacccgcttcctgtcagcaagcacttccgccgggcagtgcgaggaagcggtcaagcccaaagggtcctcctttaccagccgaaaataaatggaggttcacccccgaggacttgaagaagattgagtactatctggaggaagaacagggtcctgcagatcatccatctcggttgaaccaggcaaattcctccgggcgcgagtccaaggtgccaggtgcaaggagcgcccaaaatttaccgggtggggggccagctagtcactcgaatccaaggtcccttagttcgggacatctacagggaaaaccctggaaatag

SEQ ID NO: 199888 - DNA, 1122 bp, Artificial Sequence
  derived and/or modified sequence
atgagcctgcggcggcacatcggcaaccctgagtacctgatgaagaggatcccccagaacccccgctaccagcacatcaagagccggctggacaccggcaacagcatgaccaagtacacagagaagctggaggagatcaagaagaactaccgctacaagaaggatgagctgttcaagaggctgaaggtgaccacctttgcccagctgatcatccaggtggccagcctgagtgaccagaccctggaggtgacagctgaggagatccagaggctggaggacaatgacagcgctgccagtgaccctgatgctgagaccacagcccggaccaacgggaagggcaaccctggagagcagagccccagccctgagcagttcatcaacaatgctggggccggggacagcagccgcagcaccctgcagagcgtcatcagcggcgtgggggagctggacctggacaagggccctgtgaagaaggccgagccccacaccaaggacaagccctacccagactgccccttcctgctgctggatgtgcgggaccgggacagctaccagcagtgccacatcgtgggcgcctacagctaccccatcgccaccctgagcaggaccatgaacccctacagcaatgacatcctggagtacaagaatgcccacggcaagatcatcatcctgtatgatgatgatgagcggctggccagccaggccgccaccaccatgtgtgagcggggctttgaaaatctcttcatgctgagcggcggcctgaaggtgctggcccagaagtttcctgagggcctcatcaccggcagcctgcctgccagctgccagcaggccctgcccccaggcagcgccaggaagaggagcagccccaagggcccccccctgcctgctgagaacaagtggaggttcaccccagaggacctgaagaagattgagtactacctggaggaggagcagggccctgctgaccaccccagccggctgaaccaggccaacagcagcggccgggagagcaaggtgcctggggcccggagcgcccagaacctgcccggcggcggccctgccagccacagcaaccccaggagcctgagcagcggccacctgcagggcaagccctggaagtag

SEQ ID NO: 199889 - DNA, 1122 bp, Artificial Sequence
  derived and/or modified sequence
atgagcctgcggcggcacatcggcaaccccgagtacctgatgaagcggatcccccagaatccccgctaccaacacatcaaatctaggttggatactggaaacagcatgaccaaatacactgagaaactggaggagatcaagaaaaattatcgctataagaaggatgagctttttaagagattaaaggtgaccacctttgcacagctgatcatccaggtggccagtttaagcgatcagactcttgaagtaaccgcagaggaaatccagcgcctggaggataatgacagcgccgctagcgatccagatgccgagacgaccgctagaactaatgggaagggaaaccccggtgaacaatcaccatctcctgaacagttcatcaataacgcgggagctggggacagctcaaggagcacactccagtcagtcatttctggggtcggcgaattagacctggacaagggtcccgtgaagaaagctgagcctcataccaaggacaagccataccccgactgccctttcctgcttctggatgttagggatcgcgactcctatcagcaatgccacattgtcggcgcttatagctaccctatcgcaaccctctcaagaaccatgaacccgtacagcaacgatattctggagtataagaatgcccacggcaaaatcatcattctctacgacgatgacgagcggctggcgagccaagctgcaacaactatgtgcgagagaggtttcgaaaacttatttatgctgtctggggggctgaaggtcctggcccaaaagtttcctgaaggactcatcactggatccctgccggcgtcctgtcagcaggcgcttcctccaggctcagccaggaagcggtcttcacccaagggccctccgcttcccgccgaaaacaagtggagattcactcccgaagacctgaaaaaaattgaatactatctggaagaggagcaggggcccgccgatcacccaagcaggttaaatcaggcaaactcttcgggccgggaaagcaaagtacccggggctcgaagcgcccagaatctgccgggcggcggcccagcctcccactccaatccaagatcgctgagttctggccatcttcagggtaagccgtggaaatag

SEQ ID NO: 199890 - DNA, 1122 bp, Artificial Sequence
  derived and/or modified sequence
atgtctcttagacggcacataggaaacccagaatatttaatgaagaggatcccccaaaacccgagataccagcatattaaatcaagactcgacaccggcaactctatgacgaagtacacggagaagctggaggagataaagaagaattaccggtacaagaaagatgagctcttcaaacgtttgaaggtgaccacttttgcacagctcatcatccaggttgctagtttgagcgatcagaccctcgaggttactgccgaagagattcagcgcctggaagacaacgattccgcagctagcgacccagacgcagaaaccacagccaggaccaacggtaaaggaaatcctggtgagcagtccccctcgccggaacaatttatcaacaacgcgggtgccggagattctagcagatcaactctgcagagcgtcatcagcggcgttggagagctggaccttgataaggggccagtaaagaaagctgaaccacacactaaagataaaccctatcccgactgtccattcttactccttgacgtgagagaccgggattcctatcagcagtgtcatatcgttggagcatacagctatccaatcgcgacactaagtaggacaatgaacccctactcaaacgacatacttgagtataagaacgcccatggcaagatcattattctctacgacgacgacgagcggttggcctcacaagcagccacgacaatgtgcgagcggggatttgagaatctgtttatgttgtctggaggtctgaaagtgctcgcccaaaaattccctgagggactaatcaccgggtctctgcccgcatcgtgccagcaggctctccctccaggaagcgcgaggaaaagatcctcacctaagggcccaccgctcccagccgagaacaagtggcgcttcacccctgaagatctgaaaaagatcgaatactacctggaggaagagcagggccctgcagaccaccctagtagactgaaccaagctaactctagcggacgcgaatctaaggtaccgggagccaggagtgcccagaatctgccaggtgggggacccgcatctcattccaacccgaggagcctgagctccggccacctacagggcaaaccatggaagtag

SEQ ID NO: 199891 - DNA, 3750 bp, Artificial Sequence
  derived and/or modified sequence
aaggctggagccggcgagccccagcccagagaacaaaaggcctcgctagccggcgtcccgcgttgcccttggcaaccattgagcggcgtcttgcccttctgcgaccctgagatgagagagtaaacggggcccccattggccggccggggaagacgggccaatcggagaagagggtatagggaggcggctgaacaaggttgtgggggtaggaagctagggttagaggcaacccgtgaggctagaaccccgaacgtggtcggttggagaaaatatgtccctccggaggcacattgggaaccctgagtatctgatgaaaaggataccacagaacccaagataccagcatatcaaatcaagactggacactggtaacagtatgactaaatatactgagaagctcgaagagattaagaaaaattatagatacaaaaaagatgagcttttcaagagactaaaagttacaacttttgcccagctgatcatccaagttgcttccctctctgatcaaacactggaagtgacagctgaggagattcaaaggctggaagacaatgattctgcagcttcagaccctgatgctgaaaccactgccaggaccaatgggaaaggaaatccaggtgagcagtcgccgagccctgagcagttcataaacaacgcaggagcaggggactccagccgctcaactcttcagagtgtcatcagtggtgttggggaactggatctagacaaagggccagtgaagaaagcagagccccataccaaagacaaaccttatcctgactgccccttcctgctgctagatgtgcgtgatagagattcttaccagcagtgccacattgttggagcttacagttacccaattgcaactctgtctagaacaatgaacccttattcaaatgatattcttgaatataaaaatgcccatggcaagatcatcattctgtatgacgatgatgaaaggctggccagtcaggcggccaccaccatgtgcgagcgtggatttgaaaacctcttcatgctttccggaggtctaaaagtcttagctcagaaattcccggaaggactgattactggttccctgccagcatcttgccagcaggcccttcctcctgggtctgcccggaaacgatccagccccaaagggccacccctaccagctgagaataaatggagatttaccccagaagacttaaaaaagatagaatattatctggaagaggagcaagggcctgcagatcatcctagccgactgaaccaagctaactcctccggaagagagtccaaggtgcctggtgcccgaagcgctcagaatctgccaggtggcggccccgccagccactcaaacccccgctccctcagcagtggtcacctgcaaggcaaaccctggaagtaaagactttgtctcacttaggcaaataaatgttcttcctcttttcagaacccctgagcatttcccaagttgggtcatttccagaaacttctgcagaggaaagaccatgacatatgtatgggataggcctcttccctgtccctgtctccagttcctctcccctcaggaggccacctcaggaaggattttgacaggtgaccataaaaaccagaggtgtgacaggctctagtctcctccctgttgtttacagcatatttaagtcttgtgaaactgtataggaaaaaagtatctacgtttttagtttttttgttttgtttttttttaataaggtccagcttgttgggtctctctgtgttgttttgtaaatacttcagtcacatctgcccgtgtgcctgtccctgccaccttttcattcactgttcttgacttcatgaaggcttctccgggcagtcttggtgtgagaagctgtttccaagggtgcagatgagccttaggttccagccgcctgcagaccccaccccagcaggctcactcagcaaggagctctctgcccagcatattgcaggccctgttttgagtatggaagccagtgcctgtgtactcactgaaattgaagatgaggaaagtagctgtacactcactgaatgctcccccttactagatatttcctggagccagaaaggtatgcatgtgggtgtcttcacaccggggaggagggcctctcatgggaaagccctggccaccacaccggcctgtgccccttgaagcccaccaaagcggccctcacttgtggtcagtatatcagttatgacgcccattgcccagcttcagtccatccatgttagatggacagaaattatggccagttgaaaataccagctttggttggacaactgtggacacacaaggtgaagaggactccgaagtcctttgtcagggctgacaacctcgtaagcccttgcttagaaatacagtattagtctaattgagtaattagtgcaatttcctgcttacttttcattctcatgactgaactgtgattaggaagttgtgattatagattctggttttggccggaattttgaatcagcattaattgaattgctaaatgactgacattcattccatttaattgggggaacaaaaggcctcaggtaaggatgaggaactctgaaatcagatggaaaagagcggtgttaatttttatggtctgtgatcgtagctgtgataagggactgaggaataaattgtgctctttgtcatggcaaccagcttctgaaaagcccactgaaaattgcctgtcctgctggtaactgctacggggtaagatttgccttaacagtactattttctcgccaccaaaaaaaaaaaaaaaaaaaaaaaaaaatgcaccacagtatttctagcatgggggctgtgtttgtatgagaaataaacgtaataaatatctcatagagacatatggaaaaataactttcagattcagcccagttctgttttagagtgtgtttattcttctctacttgatttccaaagtgcaacattttccgatgctttagaaatcaaacaaaccagggacattgttcagatgtcaagccatgcccaattttccacaagattcaagaatcttgtataaaattcagccaacgtacacatagctttaatgaggagcctgtcatgtttccccataaatttattgcctgagaacttagttcagcctttgctaatgccaaaatgctctggctttgtattttctttacagcatagatagaaaaatgcacatttttccacactcagctttcccctagcatggacaagattttcagccatttttgccacatatacatttttaaggaaaaaagatttttctctgtaagaaagttctggttatgctgttttaaaggtgacttgtcaggagttgagacttccctgccggattctattttgaaagtaaatggtcttccctccttgttccgattctgcgttcccatcgtcagacaactttggagtattagaaaccactgtatatatgtggaaagccaggtcagccagacctgttagaattggtgtgcactcacctgagagatctggcaggttggatatatttatgtgtatttctccacagtgcttgctttgccctgttggtaaggattttaaataaccatgctcaaaagagctgttctaatctgcgttttgcatgttaagtgttaatatcaaacattctttacgtgctcgaggtattgcttttaacattctactttgccagtttcttcattagattaattgacatgtattatttaaatgaccagtgatgctttgtgcaattatgaatgttgaagattaaagtacatagttactaa

SEQ ID NO: 199892 - protein, 454 aa, Artificial Sequence
  derived and/or modified sequence
MELATRYQIPKEVADIFNAPSDDEEFVGFRDDVPMETLSSEESCDSFDSLESGKQQDVRFHSKYFTEELRRIFIEDTDSETEDFAGFTQSDLNGKTNPEVMVVESDLSDDGKASLVSEEEEDEEEDKATPRRSRSRRSSIGLRVAFQFPTKKLANKPDKNSSSEQLFSSARLQNEKKTILERKKDCRQVIQREDSTSESEDDSRDESQESSDALLKRTMNIKENKAMLAQLLAELNSMPDFFPVRTPTSASRKKTVRRAFSEGQITRRMNPTRSARPPEKFALENFTVSAAKFAEEFYSFRRRKTIGGKCREYRRRHRISSFRPVEDITEEDLENVAITVRDKIYDKVLGNTCHQCRQKTIDTKTVCRNQGCCGVRGQFCGPCLRNRYGEDVRSALLDPDWVCPPCRGICNCSYCRKRDGRCATGILIHLAKFYGYDNVKEYLESLQKELVEDN

SEQ ID NO: 199893 - DNA, 1365 bp, Artificial Sequence
  derived and/or modified sequence
atggaactggcgacacggtatcagatccctaaggaggtcgccgacattttcaatgcaccatctgatgacgaggagttcgttggcttccgcgacgacgtgcctatggaaaccctctcttcagaggagagttgcgactctttcgattctctggagagcgggaagcagcaggatgtgaggtttcatagcaagtacttcactgaggagcttagacgcatatttatcgaggataccgattccgagacagaggatttcgctggttttacccagagcgacttgaatggcaagactaaccccgaagtgatggtggtggagtcagatctctctgacgatggtaaggctagcttggtctcagaggaagaggaggatgaagaagaggacaaggccacccctcggcggtcaaggtcccgcagatcttccattggcctgcgcgtggcatttcagttcccaactaaaaagcttgccaataagccggataaaaattccagctcggagcagttattttcatctgcgcggctgcagaatgaaaaaaaaaccattctggagcggaaaaaggactgcagacaggttatccagagggaagatagcacctctgaatcagaagatgattcacgcgacgaaagccaggagtctagcgacgcactgctgaaaaggaccatgaacataaaagaaaataaagcaatgttagctcagcttctggctgaattaaatagcatgcccgatttttttccagttcggactccaaccagcgcctcaagaaaaaagactgtcaggcgcgctttctccgagggtcagatcacccggcggatgaacccgacaagatcagcaagaccccctgaaaaattcgctctcgaaaactttacagtctccgcggctaaattcgcagaggagttttattcttttagacgcagaaagactatcggtggcaaatgccgcgaatacagacgaaggcaccgcatttcctcgttccggccagtggaagacattaccgaggaagatctcgaaaatgtagctatcaccgtgagggacaaaatctatgacaaggttctgggcaacacctgccaccagtgtagacaaaagacgattgacacaaaaaccgtgtgccgtaatcagggatgttgtggcgtgcgagggcagttctgcggcccatgtctaaggaatcggtatggcgaagacgttaggagtgcactgctggacccagactgggtttgccccccttgccgcgggatttgtaactgctcatattgccgaaaaagggacggaagatgcgctactgggatcctcatacacctcgctaagttttacgggtacgataacgtcaaggaatatcttgagagcctccagaaagagctggttgaggataattag

SEQ ID NO: 199894 - DNA, 1365 bp, Artificial Sequence
  derived and/or modified sequence
atggagctggccacccgctaccagatccccaaggaggtggccgacatcttcaatgcccccagtgatgatgaggagtttgtgggcttcagagatgatgtgcccatggagaccctgagcagcgaggagagctgtgacagctttgacagcctggagagcggcaagcagcaggatgtgcgcttccacagcaagtacttcacagaggagctgcggcgcatcttcatcgaggacacagattctgaaacagaggactttgctggcttcacccagagcgacctgaatggcaagaccaaccctgaggtgatggtggtggagagtgacctgagtgatgatggcaaggccagcctggtgtctgaggaggaggaggatgaggaggaggacaaggccaccccaagaagaagccgcagccgccgcagcagcatcggcctgcgggtggccttccagttccccaccaagaagctggccaacaagccagacaagaacagcagcagcgagcagctgttcagcagcgcccggctgcagaatgagaagaagaccatcctggagaggaagaaggactgccggcaggtgatccagcgggaggacagcaccagcgagagtgaagatgacagcagagatgagagccaggagagcagtgatgccctgctgaagaggaccatgaacatcaaggagaacaaggccatgctggcccagctgctggccgagctgaacagcatgccagacttcttccctgtgaggacccccaccagcgccagcaggaagaagacagtgagaagagccttcagcgagggccagatcaccaggaggatgaaccccaccaggtctgcccggcccccagagaagtttgccctggagaacttcaccgtgtctgctgccaagtttgctgaggagttctacagcttcagaagaaggaagaccatcggcggcaaatgtcgggagtacagaagaagacaccgcatcagcagcttccggcctgtggaggacatcacagaggaggacctggagaatgtggccatcaccgtgcgggacaagatctatgacaaggtgctgggcaacacctgccaccagtgccggcagaagaccatcgacaccaagacagtgtgcaggaaccagggctgctgcggcgtgcggggccagttctgtggcccctgcctgaggaaccgctacggggaggatgtgcgcagcgccctgctggaccctgactgggtgtgccccccctgccggggcatctgcaactgcagctactgcaggaagagagatggccgctgtgccaccggcatcctgatccacctggccaagttctacggctatgacaacgtgaaggagtacctggagagcctgcagaaggagctggtggaggacaactag

SEQ ID NO: 199895 - DNA, 1365 bp, Artificial Sequence
  derived and/or modified sequence
atggagctggccacccggtaccagatccccaaggaggtggccgacatcttcaacgcaccaagcgacgatgaagaattcgtgggtttcagagacgatgtgccgatggaaacgctgagctctgaggaatcttgcgattcattcgattcccttgaatcaggtaagcagcaggatgttagattccactcaaaatatttcaccgaagaactgaggcgcatattcatagaagacactgactctgagactgaggatttcgcaggcttcacccagagcgacctgaacggtaaaaccaatcctgaagtcatggtggtggaaagcgacttgtccgatgatggaaaggccagtctcgtctccgaagaggaggaggatgaggaggaggacaaggcaacacccaggcgctcccgtagtcggcgttcctccattgggctcagagtggcatttcagttcccgacaaaaaagcttgcgaacaaacctgacaagaatagtagtagcgaacagctgttttcaagtgctagattgcagaatgagaagaagaccattctggagaggaaaaaggattgccgacaggtcattcagcgggaggattccactagcgagtctgaggatgactccagagatgagtcacaggaaagctcagatgccctgctgaaacgcacaatgaacatcaaggaaaataaggccatgctggcacagctgctagccgaactgaactccatgcctgatttctttcccgttaggacccccacctctgcttctcgaaaaaagacagtccgccgcgcgttttccgagggacagatcacacgccgcatgaatccaacgagaagcgcgaggccccctgaaaagttcgcccttgagaatttcactgtctccgctgcaaagtttgccgaggagttttactcttttcgccgcaggaagactattggaggtaagtgccgggagtatcgcagaagacaccggatatcttctttccgacctgtcgaggacatcacagaagaggacttggaaaatgtggctatcactgtccgcgataaaatatatgataaggtgttgggcaacacctgccatcagtgccgacagaagacaatcgacaccaagacagtgtgtcggaaccagggctgttgtggggttcgcgggcagttttgcggaccgtgcctgcgcaacagatacggggaggacgtgaggtccgcccttctggatcccgattgggtgtgccccccgtgtaggggcatctgtaattgcagctactgtagaaagcgggatggtcgatgcgctactggtatcctgatccatctggccaagttctacggttatgacaatgtaaaagaatatctggaaagcctgcagaaggagctcgtcgaagataattag

SEQ ID NO: 199896 - DNA, 1365 bp, Artificial Sequence
  derived and/or modified sequence
atggagctggccacccgctatcagatccctaaagaggtggctgatatctttaatgcaccttccgacgatgaggaatttgtgggttttcgcgatgacgtgcccatggagaccttgtcctctgaagagtcctgcgacagtttcgacagcctcgaaagtggcaaacagcaagacgtgcgattccactccaagtatttcaccgaagaacttaggcggatttttattgaagacacagactccgagactgaagattttgcgggattcacccagagcgacctgaatggtaagaccaacccagaggtcatggtggtggaaagcgacctgagcgatgatgggaaggcatctttagtttctgaggaagaggaggacgaggaagaagataaagccacccctcgcaggagccgtagcagaagaagctccattggactccgagtggccttccagtttcctacaaagaaattggcaaacaaaccagataagaactcctcgtcagagcagctattctcatccgcaaggctgcagaacgaaaaaaagactattttggaaaggaaaaaggattgcagacaggtgattcagcgcgaagacagcacttcagagtctgaggatgactctagggacgagtcacaagaatccagtgatgcactcctcaaacgcacgatgaatattaaggaaaacaaagccatgttagcccagttgctggcagaactaaattcgatgcccgatttttttccagtgcgtacccctaccagcgcgagtaggaaaaaaactgtgcgtcgcgcattctccgagggacaaattactcgacggatgaatcctacaagaagtgctcggcctccggagaaattcgccctcgaaaactttactgtttccgccgctaagtttgctgaggagttctatagttttcgaagaaggaagactatagggggaaaatgccgcgagtatagaagacgccatcgtatcagcagctttcggccagtcgaagacattacagaggaggatttggagaatgtagccatcactgtccgagataagatttatgacaaggtcttaggaaatacctgccatcagtgtaggcagaagactatcgataccaaaactgtttgcagaaatcaggggtgctgcggggtgaggggccaattctgcgggccttgcctgcgcaacaggtacggggaggacgtaaggtcagcgctgctcgatcctgactgggtgtgccccccatgccgcggtatctgcaactgctcatactgccggaaaagagatggtaggtgtgccaccggaatccttatccacctggcaaaattttacgggtacgataatgtgaaggaatacctcgaatctctgcagaaagagctggtcgaggacaattag

SEQ ID NO: 199897 - DNA, 2915 bp, Artificial Sequence
  derived and/or modified sequence
ggtgcgccgggccgtggtgagtccgggctcccgtggccgcgtgctgggaggagactggagcccggttaggaagaatggagttggcgactcgctaccagagcacttcgcaggcatagtttggaagtcatcagggctggttcttttccttccagatccctaaagaagtggctgacatctttaacgcccccagtgatgatgaagagtttgttggcttccgagatgatgttcccatggaaaccctctcgtcagaggagagctgcgatagttttgactcactagagtcagggaaacagcaggatgtgcgctttcattccaaatacttcacagaagagctaagaagaatttttatagaggacactgactcagagactgaggattttgcaggatttacgcagagtgatctgaatggaaagactaacccagaagtaatggtcgtggagtcagatttgagtgatgatggcaaagcatctttggtgagcgaggaagaggaagatgaagaagaagataaggctacccctagaagaagcaggtctagaagaagtagtattggtcttcgagtagcctttcagttccccaccaagaagctggccaacaaaccagataaaaacagttcttccgagcagttgttttctagcgcacgcttacagaatgagaaaaaaacaattcttgaaagaaagaaagactgtagacaggtgatacaaagggaagattctacctctgagtctgaggatgactctcgggatgagagccaggagagttcagatgctttgctgaaaaggaccatgaacatcaaggagaacaaagccatgcttgcccagttattggcggaattgaactcgatgccagatttcttcccagtacgaaccccaacctcagcttctaggaagaagacagtgaggcgggccttctcggagggacagatcacgcggcgtatgaacccaacccggagtgcgcggcctcctgagaagtttgctctagagaacttcactgtctcagccgctaaatttgcggaagagttttacagcttccgaagaaggaagacaattggggggaaatgccgggagtacagacgacgtcaccgtatatcttcttttcggccagtggaggatatcaccgaagaggacttagaaaatgttgccataactgttcgagataaaatctatgataaagttctgggtaacacgtgccatcagtgtcgacaaaagaccatcgacaccaagacagtgtgtcggaaccagggttgctgtggtgtgcgaggacagttctgtggaccatgcctgcggaaccgctatggggaggatgtcagatcggcattgctggacccggattgggtgtgtcccccctgtcgtgggatctgcaattgcagctactgtcggaagcgtgacggccgctgtgccacaggaatcctcattcatctggccaagttttatggttatgacaatgttaaggaatatctggagagcttacaaaaggagctggtagaagacaattaagaggaaaacaaacagaaccagccacctcaccatagagtactccaacaagacatgcataccattggtgcctaagaaagatttttttacagttgtgtttttatacagaaattctttgtagaaattactattttttgttaaagattgtttatatgcttacaaagatttctcaggaagacagcagagcagaggaatctatatagatgtatgcacagacctgtctgtatgctgaactttgttaaaaatatctgccagttattaaaaagcacagtttaaatggggtggggttaaagttcaggtaagtaagttagagagaaaacattgtatgatcagctcctgcacttgatctatctatctttggcttcccaaacagtaactcactccaggccaagtgtgccttagcacgagtgaccacagtttaatagaccacacacatcgtttaacctgctcttggtcattggaaatttacactgaacaaagtgcaattaactgtagaacagttttatttttattaaaacttgactgaacaaaaggggaccatcaacattgtagacactggacactggaggccttacagagtgctagcctcttccttcaggactcacctggggcctgctgcttttatattttgaaagagtttaagggctaataatttaatttgttgtttgttaaaaattaaaatctccgttctttccggctgcattgcttttgcatgttcacatatgatgtacttttatgatgtacttttttttttttgagatggagtcttgttctgttgcccaggagggagtgcagtggtgcaacctcggctcactgcaacctttgcctcctaggttcaagtgattctcctacctcctgagtaactgggattacagtcgtgtgccaccacgctcagccctgagttagtttctagtatttttttctgactttcactctaaggatagcgttgaaaaaagaatgcacgtgtgagttactaaaaagttagaataatgtgcatgggaacagtgcagcaacatgctagaaaatcctcactgcactccagcagaggctagaggaatgccagtgttaccttacgcttctagaagcagagccactccagccagaacccattttgcagtcttctcttcgctcttcagcctgaaggtccagatgtagctggggcctctcagtttggttctatacacagggcactcgtaggtctgtttggtttcttgtctgtccacgggggtggcttttgcaaagatgaccggcatagggcatgccagctccttgagacgggcttcaacaatggttcctgcttgggtgtcccagcgggcgcctatggcaaaaacacagcggttgcaattgtgtggcagcttgctactaatgataatgatcaagtaagttgtttgatgcaataaacattcaacattctggttttgtcat

SEQ ID NO: 199898 - DNA, 3066 bp, Artificial Sequence
  derived and/or modified sequence
aactgcagccccctctcgcgccgcctgcgaagacaaggtcagtggccgcgaagttggaacgtgatcggagccacgaggcccagtgaggcggcaccgagggggcagcgcaacgcgctccccctgtccagggcgtcaagtgcgcccctcccggggcccgcctgtgctccgggcggagcgcgctagctgctcgggcgcggggcgttcttggtgcgccgggccgtggtgagtccgggctcccgtggccgcgtgctgggaggagactggagcccggttaggaagaatggagttggcgactcgctaccagatccctaaagaagtggctgacatctttaacgcccccagtgatgatgaagagtttgttggcttccgagatgatgttcccatggaaaccctctcgtcagaggagagctgcgatagttttgactcactagagtcagggaaacagcaggatgtgcgctttcattccaaatacttcacagaagagctaagaagaatttttatagaggacactgactcagagactgaggattttgcaggatttacgcagagtgatctgaatggaaagactaacccagaagtaatggtcgtggagtcagatttgagtgatgatggcaaagcatctttggtgagcgaggaagaggaagatgaagaagaagataaggctacccctagaagaagcaggtctagaagaagtagtattggtcttcgagtagcctttcagttccccaccaagaagctggccaacaaaccagataaaaacagttcttccgagcagttgttttctagcgcacgcttacagaatgagaaaaaaacaattcttgaaagaaagaaagactgtagacaggtgatacaaagggaagattctacctctgagtctgaggatgactctcgggatgagagccaggagagttcagatgctttgctgaaaaggaccatgaacatcaaggagaacaaagccatgcttgcccagttattggcggaattgaactcgatgccagatttcttcccagtacgaaccccaacctcagcttctaggaagaagacagtgaggcgggccttctcggagggacagatcacgcggcgtatgaacccaacccggagtgcgcggcctcctgagaagtttgctctagagaacttcactgtctcagccgctaaatttgcggaagagttttacagcttccgaagaaggaagacaattggggggaaatgccgggagtacagacgacgtcaccgtatatcttcttttcggccagtggaggatatcaccgaagaggacttagaaaatgttgccataactgttcgagataaaatctatgataaagttctgggtaacacgtgccatcagtgtcgacaaaagaccatcgacaccaagacagtgtgtcggaaccagggttgctgtggtgtgcgaggacagttctgtggaccatgcctgcggaaccgctatggggaggatgtcagatcggcattgctggacccggattgggtgtgtcccccctgtcgtgggatctgcaattgcagctactgtcggaagcgtgacggccgctgtgccacaggaatcctcattcatctggccaagttttatggttatgacaatgttaaggaatatctggagagcttacaaaaggagctggtagaagacaattaagaggaaaacaaacagaaccagccacctcaccatagagtactccaacaagacatgcataccattggtgcctaagaaagatttttttacagttgtgtttttatacagaaattctttgtagaaattactattttttgttaaagattgtttatatgcttacaaagatttctcaggaagacagcagagcagaggaatctatatagatgtatgcacagacctgtctgtatgctgaactttgttaaaaatatctgccagttattaaaaagcacagtttaaatggggtggggttaaagttcaggtaagtaagttagagagaaaacattgtatgatcagctcctgcacttgatctatctatctttggcttcccaaacagtaactcactccaggccaagtgtgccttagcacgagtgaccacagtttaatagaccacacacatcgtttaacctgctcttggtcattggaaatttacactgaacaaagtgcaattaactgtagaacagttttatttttattaaaacttgactgaacaaaaggggaccatcaacattgtagacactggacactggaggccttacagagtgctagcctcttccttcaggactcacctggggcctgctgcttttatattttgaaagagtttaagggctaataatttaatttgttgtttgttaaaaattaaaatctccgttctttccggctgcattgcttttgcatgttcacatatgatgtacttttatgatgtacttttttttttttgagatggagtcttgttctgttgcccaggagggagtgcagtggtgcaacctcggctcactgcaacctttgcctcctaggttcaagtgattctcctacctcctgagtaactgggattacagtcgtgtgccaccacgctcagccctgagttagtttctagtatttttttctgactttcactctaaggatagcgttgaaaaaagaatgcacgtgtgagttactaaaaagttagaataatgtgcatgggaacagtgcagcaacatgctagaaaatcctcactgcactccagcagaggctagaggaatgccagtgttaccttacgcttctagaagcagagccactccagccagaacccattttgcagtcttctcttcgctcttcagcctgaaggtccagatgtagctggggcctctcagtttggttctatacacagggcactcgtaggtctgtttggtttcttgtctgtccacgggggtggcttttgcaaagatgaccggcatagggcatgccagctccttgagacgggcttcaacaatggttcctgcttgggtgtcccagcgggcgcctatggcaaaaacacagcggttgcaattgtgtggcagcttgctactaatgataatgatcaagtaagttgtttgatgcaataaacattcaacattctggttttgtca

SEQ ID NO: 199899 - DNA, 563 bp, Artificial Sequence
  derived and/or modified sequence
acttgttttattgagagtcgcgagactcactgcttccaccttgcttccgactggtgtttactttcctccacctgcgtgcctggcccgggagaaggggaggcggggccgccagcgttggaaggcgcagagtgcccggcgcccgagcccaaaccgctgtcacctgcccgagtctggcggcaaagactgagccactaacgatccctaaagaagtggctgacatctttaacgcccccagtgatgatgaagagtttgttggcttccgagatgatgttcccatggaaaccctctcgtcagaggagagctgcgatagttttgactcactagagtcagggaaacagcaggatgtgcgctttcattccaaatacttcacagaagagctaagaagaatttttatagaggacactgactcagagactgaggattttgcaggatttacgcagagtgatctgaatggaaagactaacccagaagtaatggtcgtggagtcagatttgagtgatgatggcaaagcatctttggtgagcgaggaagaggaagatgaagaagaagataaggctacccct

SEQ ID NO: 199900 - DNA, 1365 bp, Artificial Sequence
  derived and/or modified sequence
atggagctggccaccagataccagatccccaaggaggtggccgacatcttcaacgcccccagcgacgacgaggagttcgtgggcttcagagacgacgtgcccatggagaccctgagcagcgaggagagctgcgacagcttcgacagcctggagagcggcaagcagcaggacgtgagattccacagcaagtacttcaccgaggagctgagaagaatcttcatcgaggacaccgacagcgagaccgaggacttcgccggcttcacccagagcgacctgaacggcaagaccaaccccgaggtgatggtggtggagagcgacctgagcgacgacggcaaggccagcctggtgagcgaggaggaggaggacgaggaggaggacaaggccacccccagaagaagcagaagcagaagaagcagcatcggcctgagagtggccttccagttccccaccaagaagctggccaacaagcccgacaagaacagcagcagcgagcagctgttcagcagcgccagactgcagaacgagaagaagaccatcctggagagaaagaaggactgcagacaggtgatccagagagaggacagcaccagcgagagcgaggacgacagcagagacgagagccaggagagcagcgacgccctgctgaagagaaccatgaacatcaaggagaacaaggccatgctggcccagctgctggccgagctgaacagcatgcccgacttcttccccgtgagaacccccaccagcgccagcagaaagaagaccgtgagaagagccttcagcgagggccagatcaccagaagaatgaaccccaccagaagcgccagaccccccgagaagttcgccctggagaacttcaccgtgagcgccgccaagttcgccgaggagttctacagcttcagaagaagaaagaccatcggcggcaagtgcagagagtacagaagaagacacagaatcagcagcttcagacccgtggaggacatcaccgaggaggacctggagaacgtggccatcaccgtgagagacaagatctacgacaaggtgctgggcaacacctgccaccagtgcagacagaagaccatcgacaccaagaccgtgtgcagaaaccagggctgctgcggcgtgagaggccagttctgcggcccctgcctgagaaacagatacggcgaggacgtgagaagcgccctgctggaccccgactgggtgtgccccccctgcagaggcatctgcaactgcagctactgcagaaagagagacggcagatgcgccaccggcatcctgatccacctggccaagttctacggctacgacaacgtgaaggagtacctggagagcctgcagaaggagctggtggaggacaactag

SEQ ID NO: 199901 - protein, 176 aa, Artificial Sequence
  derived and/or modified sequence
MKASSLAFSLLSAAFYLLWTPSTGLKTLNLGSCVIATNLQEIRNGFSEIRGSVQAKDGNIDIRILRRTESLQDTKPANRCCLLRHLLRLYLDRVFKNYQTPDHYTLRKISSLANSFLTIKKDLRLCHAHMTCHCGEEAMKKYSQILSHFEKLEPQAAVVKALGELDILLQWMEETE

SEQ ID NO: 199902 - protein, 151 aa, Artificial Sequence
  derived and/or modified sequence
MKASSLAFSLLSAAFYLLWTPSTGLKTLNLGSCVIATNLQEIRNGFSEIRGSVQAKDGNIDIRILRRTESLQDTKPANRCCLLRHLLRLYLDRVFKNYQTPDHYTLRKISSLANSFLTIKKDLRLCLEPQAAVVKALGELDILLQWMEETE

SEQ ID NO: 199903 - DNA, 531 bp, Artificial Sequence
  derived and/or modified sequence
atgaaggccagcagcctggccttcagcctgctgagcgccgccttctacctgctgtggacccccagcaccggcctgaagaccctgaacctgggcagctgcgtgatcgccaccaacctgcaggagatcagaaacggcttcagcgagatcagaggcagcgtgcaggccaaggacggcaacatcgacatcagaatcctgagaagaaccgagagcctgcaggacaccaagcccgccaacagatgctgcctgctgagacacctgctgagactgtacctggacagagtgttcaagaactaccagacccccgaccactacaccctgagaaagatcagcagcctggccaacagcttcctgaccatcaagaaggacctgagactgtgccacgcccacatgacctgccactgcggcgaggaggccatgaagaagtacagccagatcctgagccacttcgagaagctggagccccaggccgccgtggtgaaggccctgggcgagctggacatcctgctgcagtggatggaggagaccgagtag

SEQ ID NO: 199904 - DNA, 456 bp, Artificial Sequence
  derived and/or modified sequence
atgaaggccagcagcctggccttcagcctgctgagcgccgccttctacctgctgtggacccccagcaccggcctgaagaccctgaacctgggcagctgcgtgatcgccaccaacctgcaggagatcagaaacggcttcagcgagatcagaggcagcgtgcaggccaaggacggcaacatcgacatcagaatcctgagaagaaccgagagcctgcaggacaccaagcccgccaacagatgctgcctgctgagacacctgctgagactgtacctggacagagtgttcaagaactaccagacccccgaccactacaccctgagaaagatcagcagcctggccaacagcttcctgaccatcaagaaggacctgagactgtgcctggagccccaggccgccgtggtgaaggccctgggcgagctggacatcctgctgcagtggatggaggagaccgagtag

SEQ ID NO: 199905 - DNA, 531 bp, Artificial Sequence
  derived and/or modified sequence
atgaaggcatccagtctcgcctttagcctgctctcggcagcattctatctattgtggacgccctctacaggactcaagacattgaatttagggagctgcgtcatcgccactaacctgcaggagattcgcaatggattcagtgaaatccgcggctcggttcaggccaaagacggaaatattgacatccgtatccttcgccgcacagaaagcctgcaggacacaaaaccagcgaatcgctgctgcctcctccgtcacctgctgagactgtacctggacagagtgtttaagaactaccagacaccggatcactataccctgaggaagatttccagccttgccaactcattccttaccatcaagaaagacctacgcctctgccatgcccacatgacatgtcattgtggtgaagaagctatgaagaagtattcacaaatactgtcccatttcgaaaaactggaaccgcaagcggccgtggtaaaagctttgggagaactggacatcctgctgcagtggatggaggagacagagtag

SEQ ID NO: 199906 - DNA, 531 bp, Artificial Sequence
  derived and/or modified sequence
atgaaggcctccagcctggctttttcccttctttcagccgctttttatttactgtggacgcccagtaccggactgaagaccctgaacctgggcagctgcgtcatcgctacgaaccttcaagagattcggaacggctttagcgagataagagggtctgtccaggcaaaggatggtaatatcgacataagaattttgaggaggaccgagtctttgcaggatactaaacctgctaacaggtgctgcctgcttcgccatttactaaggctgtacctggaccgggtttttaagaattatcagaccccagatcattataccctccgcaagatttccagcttggccaattcattcttgactattaagaaagacctcagactgtgtcacgctcacatgacatgtcattgtggcgaagaggcaatgaaaaaatactcacagatattgagccactttgaaaagttggaaccacaggccgcagtagttaaagctctgggagaattggacattctgcttcagtggatggaggaaacggaatag

SEQ ID NO: 199907 - DNA, 456 bp, Artificial Sequence
  derived and/or modified sequence
atgaaggccagctcccttgccttcagcctgctttcggcggccttttacctcttgtggacaccaagtactggactgaagaccctgaacttgggctcatgtgtgatcgccactaacctgcaagagatcaggaacgggttcagcgaaattcggggttccgttcaggccaaagacgggaacatcgatatcaggatcctgaggagaacggaatccttacaggacacgaaaccagccaaccgctgttgcttactgcgccacctgcttagactttatctagaccgggtcttcaagaattaccaaaccccagaccattacacacttaggaaaatcagctcactggctaattcctttcttactatcaaaaaagatttgcgcctgtgcttggaaccccaagcagccgtggtgaaggctctgggcgaactggatatcctgctgcagtggatggaagagaccgaatag

SEQ ID NO: 199908 - DNA, 531 bp, Artificial Sequence
  derived and/or modified sequence
atgaaggccagcagcctggccttcagcctgctgtctgctgccttctacctgctgtggacccccagcacaggcctgaagaccctgaacctgggcagctgtgtgattgccaccaacctgcaggagatcagaaatggcttcagcgagatccggggctctgtgcaggccaaggatggcaacatcgacatccgcatcctgcggaggacagagagcctgcaggacaccaagccagccaaccgctgctgcctgctgcggcacctgctgcggctgtacctggacagagtcttcaagaactaccagaccccagaccactacaccctgaggaagatcagcagcctggccaacagcttcctgaccatcaagaaggacctgcggctgtgccacgcccacatgacctgccactgtggggaggaggccatgaagaagtacagccagatcctgagccactttgagaagctggagccccaggccgctgtggtgaaggccctgggggagctggacatcctgctgcagtggatggaggagacagaatag

SEQ ID NO: 199909 - DNA, 456 bp, Artificial Sequence
  derived and/or modified sequence
atgaaggccagcagcctggccttcagcctgctgtctgctgccttctacctgctgtggacccccagcacaggcctgaagaccctgaacctgggcagctgtgtgattgccaccaacctgcaggagatcagaaatggcttcagcgagatccggggctctgtgcaggccaaggatggcaacatcgacatccgcatcctgcggaggacagagagcctgcaggacaccaagccagccaaccgctgctgcctgctgcggcacctgctgcggctgtacctggacagagtcttcaagaactaccagaccccagaccactacaccctgaggaagatcagcagcctggccaacagcttcctgaccatcaagaaggacctgcggctgtgcctggagccccaggccgctgtggtgaaggccctgggggagctggacatcctgctgcagtggatggaggagacagaatag

SEQ ID NO: 199910 - DNA, 531 bp, Artificial Sequence
  derived and/or modified sequence
atgaaggccagcagcctggccttcagcctgctgagcgccgccttctatctgttgtggaccccatcaaccgggttgaaaaccctgaatctcggctcatgtgtcatcgcaacaaacctccaggagattcggaacggatttagcgagatccgtggatccgtgcaggctaaggacggcaacattgatattagaatccttaggcggactgagagtctgcaggatactaagcctgcaaatagatgttgtctgctgagacacctcctacggctttacttagacagggtctttaaaaattaccaaactccagatcattacacgctgaggaagatctcttccctggcaaattcctttttgacgatcaagaaggatctcagactgtgccacgcgcatatgacctgccattgcggagaggaagccatgaagaagtattcccagatactgtcacactttgagaagttggagcctcaagcagctgtcgttaaagctctcggagaattagatattcttttgcaatggatggaggagaccgagtag

SEQ ID NO: 199911 - DNA, 531 bp, Artificial Sequence
  derived and/or modified sequence
atgaaggccagcagcctggccttcagcctgctgagcgccgccttctatctgttgtggacaccttcaactggactgaaaacgctcaatctcgggagctgtgtgattgccaccaacctgcaagagatcaggaatggcttctcagagatcaggggttcggttcaggccaaagatgggaacatcgacattaggatcctgagaagaactgaaagcctgcaggatacgaagcctgcgaataggtgctgcctgctgcgccacctactgaggttgtacctggacagggtatttaaaaactatcaaacaccagatcattataccctgcggaagatctcatccctagccaacagtttcttgaccatcaagaaggatctgagactgtgccacgcccatatgacttgtcattgtggggaggaggctatgaagaaatattcccagatcctttctcatttcgagaaactggaaccacaagcggccgtggtgaaggcactcggtgagctggatatcctgctgcaatggatggaggagaccgagtag

SEQ ID NO: 199912 - DNA, 456 bp, Artificial Sequence
  derived and/or modified sequence
atgaaggccagcagcctggccttcagcctgctgagcgccgccttctatctcctgtggacacccagcacgggattaaaaacccttaacctcggatcatgtgtgattgccacaaatttgcaagagatccgaaacgggttcagcgaaattcgcggatctgtgcaagctaaggacggaaacatcgacatccgaattttacgtaggactgaatcccttcaagataccaagcccgcaaatcgatgctgcctccttcggcacctgctgcggctatacctggaccgtgtctttaagaattaccagacccccgaccattatacactgcgtaaaatttctagcctggcaaatagtttcctcacgattaagaaagatctccggttgtgccttgaaccccaggcggccgttgtgaaagccttgggtgagctggacatccttctgcaatggatggaggaaaccgagtag

SEQ ID NO: 199913 - DNA, 531 bp, Artificial Sequence
  derived and/or modified sequence
atgaaagctagcagcctggcattttctttgctatcggccgctttctacctgctttggaccccctccactggtctgaagacgttaaacttgggaagctgcgtaatcgccacaaatctccaggaaatcaggaacggcttcagtgaaattcgcggatccgtgcaggcaaaggatgggaacattgacattagaattttgagaaggacagaatcgctccaggatactaaaccggctaaccgctgttgtctgcttcgacacctgttgcggctgtatttggatcgcgtgttcaaaaattaccagacccccgaccactatactctaaggaagatatcctctctagcgaattctttccttacaataaaaaaagaccttcggctctgccacgcccatatgacctgccactgcggggaggaggccatgaaaaaatactcacagatactgagtcactttgaaaaattggagcctcaggcggctgtggttaaggccctgggggagctagatatcttgttgcagtggatggaggaaactgagtag

SEQ ID NO: 199914 - DNA, 531 bp, Artificial Sequence
  derived and/or modified sequence
atgaaagcaagtagtttggcattcagtctgttgagcgccgctttttatctgctgtggacacctagcaccggactcaaaactttgaacctcggaagttgtgtgatcgctacgaacctgcaggaaataagaaatggcttttccgagatcagaggatcagtgcaagccaaagacggcaacattgatatcaggattctccggagaacggaaagcctccaggacaccaagcctgctaaccgttgttgtttgctgagacatctcctcaggctttatctggaccgggttttcaagaattaccagacccctgatcattacacccttcgtaaaatttctagccttgcaaactccttcctgacaattaagaaggatttgaggctgtgccacgcccacatgacctgtcactgtggtgaggaggccatgaagaagtattcccagatacttagccatttcgaaaagctcgaaccacaggcagcagtcgttaaagcactcggcgaattagatattctgctgcagtggatggaggaaactgagtag

SEQ ID NO: 199915 - DNA, 456 bp, Artificial Sequence
  derived and/or modified sequence
atgaaggctagcagccttgctttttccctactgagtgctgcattctatctactgtggaccccttctaccgggctgaagaccttgaacctgggctcctgcgttattgccactaatcttcaggagattcggaacggattttccgagattaggggttcagttcaagccaaggacgggaacatcgatattcgcatccttcgcagaaccgaaagcctccaggacacaaaacccgcaaacagatgttgcctgctccgtcacctgctgaggctgtacctggatcgcgtgttcaagaactaccagactcccgatcactacacattgagaaagatcagctcactggccaacagctttctcacaatcaaaaaggacctccggctttgcctggaaccccaagccgcagtagtaaaggccctaggcgaactggacattctcctgcagtggatggaagaaactgagtag

SEQ ID NO: 199916 - DNA, 456 bp, Artificial Sequence
  derived and/or modified sequence
atgaaagcctctagtcttgccttcagccttctctctgctgcgttttatctcctatggactccttccactggactgaagacactcaatttgggaagctgtgtgatcgccacaaaccttcaggaaatacgaaatggattttctgagatacggggcagtgtgcaagccaaagatggaaacattgacatcagaatcttaaggaggactgagtctttgcaagacacaaagcctgcgaatcgatgctgcctcctgcgccatttgctaagactctatctggacagggtatttaaaaactaccagacccctgaccattatactctccggaagatcagcagcctcgccaattcctttcttaccatcaagaaggacctccggctctgtctggaacctcaggcagcagttgtgaaggctttgggggaactagacattcttctgcaatggatggaggagacagaatag

SEQ ID NO: 199917 - protein, 502 aa, Artificial Sequence
  derived and/or modified sequence
MSLVLLSLAALCRSAVPREPTVQCGSETGPSPEWMLQHDLIPGDLRDLRVEPVTTSVATGDYSILMNVSWVLRADASIRLLKATKICVTGKSNFQSYSCVRCNYTEAFQTQTRPSGGKWTFSYIGFPVELNTVYFIGAHNIPNANMNEDGPSMSVNFTSPGCLDHIMKYKKKCVKAGSLWDPNITACKKNEETVEVNFTTTPLGNRYMALIQHSTIIGFSQVFEPHQKKQTRASVVIPVTGDSEGATVQLTPYFPTCGSDCIRHKGTVVLCPQTGVPFPLDNNKSKPGGWLPLLLLSLLVATWVLVAGIYLMWRHERIKKTSFSTTTLLPPIKVLVVYPSEICFHHTICYFTEFLQNHCRSEVILEKWQKKKIAEMGPVQWLATQKKAADKVVFLLSNDVNSVCDGTCGKSEGSPSENSQDLFPLAFNLFCSDLRSQIHLHKYVVVYFREIDTKDDYNALSVCPKYHLMKDATAFCAELLHVKQQVSAGKRSQACHDGCCSL

SEQ ID NO: 199918 - DNA, 1509 bp, Artificial Sequence
  derived and/or modified sequence
atgtctcttgtgcttctctcactagccgccttgtgtcggagtgccgtgccacgggagcccaccgtgcagtgcggaagcgagaccgggccgtctcccgagtggatgcttcagcacgatctgatcccgggcgatttgcgcgatctgcgtgttgaaccggtgactacatcagtggctactggtgactatagcatcctgatgaatgtttcctgggtgctgagggctgacgccagcattcgtttgttgaaggccactaagatatgcgttaccggtaaaagcaattttcagagctacagctgcgttagatgcaactatacagaggctttccagacacagacaagacccagtgggggtaagtggaccttctcatacattggtttccctgtggagttgaacactgtctactttatcggcgctcacaacattccgaatgccaatatgaacgaagatggccccagcatgtcagtgaactttacatcgcctggctgcttagatcacataatgaaatataaaaagaagtgcgtgaaagccggctctctttgggaccccaacatcaccgcctgcaagaagaacgaagagaccgtggaggtgaatttcaccacaacacccctgggaaacagatatatggctcttatacagcacagtacgattatcggattttcacaagtgttcgagccacaccaaaaaaaacagacacgggcgtcggtagtgatccccgttaccggggattcagaaggtgcaacagtccaattgaccccctattttcctacttgcggttctgactgtatacggcataaaggcacagtcgtcctttgcccccaaaccggagtcccgttccctctcgataataataagtctaagccaggtgggtggttaccacttctgcttttgagtttactggtggcgacctgggtgttagtagcagggatttacttaatgtggcgccacgaacggatcaaaaaaacaagctttagtaccactacactcctgccacctatcaaggtgcttgtggtctatccttcagaaatctgttttcaccacaccatttgttattttactgagtttctgcagaaccactgccggtcagaagtaattctggagaaatggcagaagaagaagattgccgagatgggccccgtgcagtggcttgccactcagaagaaagcggcggacaaggttgtcttcctgttgtcaaacgacgtcaattccgtgtgtgatgggacgtgcggcaaatctgaagggtcaccctccgagaatagtcaggacctgtttcctctcgcgttcaacctgttttgcagcgacctccgctcccagatacatctccataaatatgtggtggtgtattttcgggagattgacactaaagatgattataatgctctctctgtctgcccaaagtatcatttgatgaaggacgccaccgcgttttgtgctgagctactacacgtaaaacagcaagtgtcagccgggaaacgcagccaggcttgccacgacggatgttgcagcctgtag

SEQ ID NO: 199919 - DNA, 2010 bp, Artificial Sequence
  derived and/or modified sequence
ggcccggcgatgtcgctcgtgctgctaagcctggccgcgctgtgcaggagcgccgtaccccgagagccgaccgttcaatgtggctctgaaactgggccatctccagagtggatgctacaacatgatctaatccccggagacttgagggacctccgagtagaacctgttacaactagtgttgcaacaggggactattcaattttgatgaatgtaagctgggtactccgggcagatgccagcatccgcttgttgaaggccaccaagatttgtgtgacgggcaaaagcaacttccagtcctacagctgtgtgaggtgcaattacacagaggccttccagactcagaccagaccctctggtggtaaatggacattttcctacatcggcttccctgtagagctgaacacagtctatttcattggggcccataatattcctaatgcaaatatgaatgaagatggcccttccatgtctgtgaatttcacctcaccaggctgcctagaccacataatgaaatataaaaaaaagtgtgtcaaggccggaagcctgtgggatccgaacatcactgcttgtaagaagaatgaggagacagtagaagtgaacttcacaaccactcccctgggaaacagatacatggctcttatccaacacagcactatcatcgggttttctcaggtgtttgagccacaccagaagaaacaaacgcgagcttcagtggtgattccagtgactggggatagtgaaggtgctacggtgcagctgactccatattttcctacttgtggcagcgactgcatccgacataaaggaacagttgtgctctgcccacaaacaggcgtccctttccctctggataacaacaaaagcaagccgggaggctggctgcctctcctcctgctgtctctgctggtggccacatgggtgctggtggcagggatctatctaatgtggaggcacgaaaggatcaagaagacttccttttctaccaccacactactgccccccattaaggttcttgtggtttacccatctgaaatatgtttccatcacacaatttgttacttcactgaatttcttcaaaaccattgcagaagtgaggtcatccttgaaaagtggcagaaaaagaaaatagcagagatgggtccagtgcagtggcttgccactcaaaagaaggcagcagacaaagtcgtcttccttctttccaatgacgtcaacagtgtgtgcgatggtacctgtggcaagagcgagggcagtcccagtgagaactctcaagacctcttcccccttgcctttaaccttttctgcagtgatctaagaagccagattcatctgcacaaatacgtggtggtctactttagagagattgatacaaaagacgattacaatgctctcagtgtctgccccaagtaccacctcatgaaggatgccactgctttctgtgcagaacttctccatgtcaagcagcaggtgtcagcaggaaaaagatcacaagcctgccacgatggctgctgctccttgtagcccacccatgagaagcaagagaccttaaaggcttcctatcccaccaattacagggaaaaaacgtgtgatgatcctgaagcttactatgcagcctacaaacagccttagtaattaaaacattttataccaataaaattttcaaatattgctaactaatgtagcattaactaacgattggaaactacatttacaacttcaaagctgttttatacatagaaatcaattacagttttaattgaaaactataaccattttgataatgcaacaataaagcatcttcagccaaacatctagtcttccatagaccatgcattgcagtgtacccagaactgtttagctaatattctatgtttaattaatgaatactaactctaagaacccctcactgattcactcaatagcatcttaagtgaaaaaccttctattacatgcaaaaaatcattgtttttaagataacaaaagtagggaataaacaagctgaacccactttta

SEQ ID NO: 199920 - DNA, 1509 bp, Artificial Sequence
  derived and/or modified sequence
atgagcctggtgctgctgagcctggccgccctgtgccgctctgctgtgccccgggagcccaccgtgcagtgtggcagcgagaccggccccagccctgagtggatgctgcagcacgacctgatccctggggacctgcgggacctgcgggtggagcctgtgaccacctctgtggccactggagactacagcatcctgatgaatgtgtcctgggtgctgcgggcagatgccagcatccggctgctgaaggccaccaagatctgtgtgacaggcaagagcaacttccagagctacagctgtgtgcgctgcaactacacagaggccttccagacccagacccggcccagcggcggcaagtggaccttctcctacatcggcttccctgtggagctgaacacagtgtacttcatcggggcccacaacatccccaatgccaacatgaatgaagatggccccagcatgtctgtgaacttcaccagccctggctgcctggaccacatcatgaagtacaagaagaagtgtgtgaaggccggcagcctgtgggaccccaacatcacagcctgcaagaagaatgaggagaccgtggaggtgaacttcaccaccacccccctgggcaaccgctacatggccctgatccagcacagcaccatcatcggcttcagccaggtgtttgagccccaccagaagaagcagacccgggcctctgtggtgattcctgtgactggagacagcgagggcgccaccgtgcagctgaccccctacttccccacctgtggcagtgactgcatccgccacaagggcaccgtggtgctgtgcccccagacaggagtgcccttccccctggacaacaacaagagcaagccaggcggctggctgcccctgctgctgctgagcctgctggtggccacctgggtgctggtggccggcatctacctgatgtggaggcatgagcgcatcaagaagaccagcttcagcaccaccaccctgctgccccccatcaaggtgctggtggtgtaccccagcgagatctgcttccaccacaccatctgctacttcacagagttcctgcagaaccactgccgctctgaggtgatcctggagaagtggcagaagaagaagattgctgagatgggccctgtgcagtggctggccacccagaagaaggctgctgacaaggtggtgttcctgctgagcaatgatgtgaacagcgtgtgtgatggcacctgtgggaagtctgagggcagccccagcgagaacagccaggacctcttccccctggccttcaacctcttctgcagcgacctgcggagccagatccacctgcacaagtatgtggtggtgtacttccgggagattgacaccaaggatgactacaatgccctgtctgtgtgccccaagtaccacctgatgaaggatgccacagccttctgtgccgagctgctgcacgtgaagcagcaggtgtctgctgggaagaggagccaggcctgccatgatggctgctgcagcctgtag

SEQ ID NO: 199921 - DNA, 1509 bp, Artificial Sequence
  derived and/or modified sequence
atgagcctggtgctgctgagcctggccgccctgtgccggagcgccgttcctagggagcccacggtgcagtgtggctctgagacaggcccatcaccggaatggatgctgcagcatgatttgatccccggggatctccgcgaccttagagttgaaccagtcacgacgtccgtggcaaccggtgattatagcatactaatgaacgtgtcctgggtattgagagccgatgcgagtattcgcctgctgaaggctaccaagatctgtgtaaccgggaagagtaattttcaatcctattcctgcgtgagatgcaattacaccgaggctttccagacacagactcgtcctagcggagggaagtggactttctcttatatcggtttccctgtcgagctgaacaccgtctatttcataggcgctcataatataccaaacgccaatatgaatgaggacggcccctctatgagcgtgaactttacttcacccgggtgcctggaccacattatgaagtataagaagaagtgtgtgaaagctggcagcttatgggatccgaatatcaccgcatgtaagaagaacgaagagaccgtggaagtgaactttaccacaacacctttaggcaacagatacatggccttgatccagcattccacaattattggtttttcccaggtctttgaacctcaccagaaaaaacagactagagccagtgtcgtcattcctgtcaccggtgattcggagggcgctacagttcaattaacaccctattttccgacttgcggcagcgactgtatccggcataagggcacagttgtgctgtgtccgcagacaggtgtgccgttccccttggataacaataaatccaaacccggcgggtggttgcctttgctgttactatcactacttgtggctacttgggtgctcgtggctgggatctatctgatgtggaggcatgagaggataaaaaaaacaagtttctcgaccacaacactcctcccacccataaaagtgttggtcgtataccccagcgaaatttgcttccatcatactatctgttattttacggaattcctccagaatcactgtcggtctgaggtcatcctggagaagtggcagaagaaaaagattgctgaaatggggcccgtacaatggctggcaacccagaaaaaagctgccgacaaggttgtgttccttctctccaatgatgtgaactccgtgtgcgacggcacttgtggaaaatctgaggggtcgccttccgagaactcacaggacctattcccactggcctttaatctgttttgcagcgatctgagaagtcagatccacttacacaagtatgtagtggtgtattttagagaaattgatactaaagacgattataacgcgttgtcagtgtgtcctaagtaccacctgatgaaagatgccaccgctttttgtgctgagttgctgcatgttaaacagcaggttagtgccggaaaacgctcacaggcgtgtcacgacgggtgctgttccctgtag

SEQ ID NO: 199922 - DNA, 1509 bp, Artificial Sequence
  derived and/or modified sequence
atgtcgctcgtccttctgagcctcgccgctctgtgccgctccgctgtgccacgagagcccacagttcagtgtggttccgaaaccgggccatcccctgagtggatgctgcagcacgatctgatccccggagatctgcgtgacctaagggtagaaccagtgaccaccagcgttgcgaccggtgattactctatactgatgaatgtctcctgggtcctgagagccgatgcgtcaatccgcctgctgaaggcgactaagatttgcgtgacaggcaaaagcaattttcagtcttattcttgtgttagatgtaattacaccgaggcatttcagacccaaacaagaccttccggaggtaaatggaccttcagctacatcggattcccagtggaactaaatacagtttattttattggagcccacaacattccaaatgcaaacatgaatgaggatgggccatccatgtccgtgaatttcactagtcctggatgcctcgaccatatcatgaagtacaagaaaaagtgcgtcaaagccggaagcttgtgggacccaaatatcactgcttgcaagaagaatgaagagaccgttgaggtgaattttaccacaaccccattgggcaaccgttacatggctttaattcaacacagtacaatcattggcttctctcaggtctttgaaccccaccagaagaaacaaactcgcgcaagtgtggtcattcccgtaaccggtgactcagagggtgccacagtgcagctgaccccgtactttccaacttgcggttccgattgtatccggcataaaggaaccgtcgtgttatgcccgcagacaggcgttcctttcccactagacaataacaagtctaagcctgggggatggctccctctgcttctcttgtctctcctcgtggctacctgggtgctcgtggccggtatctatttgatgtggcgccacgagaggattaagaaaacctccttttctactaccaccttgttacccccaatcaaggtgttggtcgtgtatccatcagaaatctgttttcatcataccatctgttatttcacggaatttctgcagaatcactgcaggtcagaagtgatccttgagaagtggcaaaaaaagaagatcgctgagatgggcccagtgcaatggctggccacacagaagaaagctgctgacaaggttgtttttctcctcagcaatgacgttaatagcgtgtgtgatggtacgtgcggtaagtccgaaggtagtcccagcgaaaacagccaggatctgttcccactcgcctttaatctgttctgcagtgatctccgcagccaaatccatttgcataagtatgtggttgtttactttcgggagatcgacaccaaagacgattacaacgccctgtcagtgtgtcctaaatatcacctgatgaaagacgctactgccttctgcgcggagctgctgcacgtcaagcagcaagtctcagccggtaagcgctcacaggcctgccatgacggctgttgtagcttatag

SEQ ID NO: 199923 - DNA, 1509 bp, Artificial Sequence
  derived and/or modified sequence
atgagcctggtgctgctgagcctggccgccctgtgcagaagcgccgtgcccagagagcccaccgtgcagtgcggcagcgagaccggccccagccccgagtggatgctgcagcacgacctgatccccggcgacctgagagacctgagagtggagcccgtgaccaccagcgtggccaccggcgactacagcatcctgatgaacgtgagctgggtgctgagagccgacgccagcatcagactgctgaaggccaccaagatctgcgtgaccggcaagagcaacttccagagctacagctgcgtgagatgcaactacaccgaggccttccagacccagaccagacccagcggcggcaagtggaccttcagctacatcggcttccccgtggagctgaacaccgtgtacttcatcggcgcccacaacatccccaacgccaacatgaacgaggacggccccagcatgagcgtgaacttcaccagccccggctgcctggaccacatcatgaagtacaagaagaagtgcgtgaaggccggcagcctgtgggaccccaacatcaccgcctgcaagaagaacgaggagaccgtggaggtgaacttcaccaccacccccctgggcaacagatacatggccctgatccagcacagcaccatcatcggcttcagccaggtgttcgagccccaccagaagaagcagaccagagccagcgtggtgatccccgtgaccggcgacagcgagggcgccaccgtgcagctgaccccctacttccccacctgcggcagcgactgcatcagacacaagggcaccgtggtgctgtgcccccagaccggcgtgcccttccccctggacaacaacaagagcaagcccggcggctggctgcccctgctgctgctgagcctgctggtggccacctgggtgctggtggccggcatctacctgatgtggagacacgagagaatcaagaagaccagcttcagcaccaccaccctgctgccccccatcaaggtgctggtggtgtaccccagcgagatctgcttccaccacaccatctgctacttcaccgagttcctgcagaaccactgcagaagcgaggtgatcctggagaagtggcagaagaagaagatcgccgagatgggccccgtgcagtggctggccacccagaagaaggccgccgacaaggtggtgttcctgctgagcaacgacgtgaacagcgtgtgcgacggcacctgcggcaagagcgagggcagccccagcgagaacagccaggacctgttccccctggccttcaacctgttctgcagcgacctgagaagccagatccacctgcacaagtacgtggtggtgtacttcagagagatcgacaccaaggacgactacaacgccctgagcgtgtgccccaagtaccacctgatgaaggacgccaccgccttctgcgccgagctgctgcacgtgaagcagcaggtgagcgccggcaagagaagccaggcctgccacgacggctgctgcagcctgtag

SEQ ID NO: 199924 - protein, 1742 aa, Artificial Sequence
  derived and/or modified sequence
MAVAELYTQYNRVWIPDPEEVWKSAEIAKDYRVGDKVLRLLLEDGTELDYSVNPESLPPLRNPDILVGENDLTALSYLHEPAVLHNLRIRFAESKLIYTYSGIILVAMNPYKQLPIYGDAIIHAYSGQNMGDMDPHIFAVAEEAYKQMARNNRNQSIIVSGESGAGKTVSARYAMRYFATVSKSGSNAHVEDKVLASNPITEAVGNAKTTRNDNSSRFGKYTEISFDEQNQIIGANMSTYLLEKSRVVFQSENERNYHIFYQLCASAQQSEFKHLKLGSAEEFNYTRMGGNTVIEGVNDRAEMVETQKTFTLLGFKEDFQMDVFKILAAILHLGNVQITAVGNERSSVSEDDSHLKVFCELLGLESGRVAQWLCNRKIVTSSETVVKPMTRPQAVNARDALAKKIYAHLFDFIVERINQALQFSGKQHTFIGVLDIYGFETFDVNSFEQFCINYANEKLQQQFNMHVFKLEQEEYMKEDIPWTLIDFYDNQPVIDLIEAKMGILELLDEECLLPHGTDENWLQKLYNNFVNRNPLFEKPRMSNTSFVIQHFADKVEYKCEGFLEKNRDTVYDMLVEILRASKFHLCANFFQENPTPPSPFGSMITVKSAKQVIKPNSKHFRTTVGSKFRSSLYLLMETLNATTPHYVRCIKPNDEKLPFEFDSKRIVQQLRACGVLETIRISAQSYPSRWTYIEFYSRYGILMTKQELSFSDKKEVCKVVLHRLIQDSNQYQFGKTKIFFRAGQVAYLEKLRLDKLRQSCVMVQKHMRGWLQRKKFLRERRAALIIQQYFRGQQTVRKAITAVALKEAWAAIIIQKHCRGYLVRSLYQLIRMATITMQAYSRGFLARRRYRKMLEEHKAVILQKYARAWLARRRFQSIRRFVLNIQLTYRVQRLQKKLEDQNKENHGLVEKLTSLAALRAGDVEKIQKLEAELEKAATHRRNYEEKGKRYRDAVEEKLAKLQKHNSELETQKEQIQLKLQEKTEELKEKMDNLTKQLFDDVQKEERQRMLLEKSFELKTQDYEKQIQSLKEEIKALKDEKMQLQHLVEGEHVTSDGLKAEVARLSKQVKTISEFEKEIELLQAQKIDVEKHVQSQKREMREKMSEITKQLLESYDIEDVRSRLSVEDLEHLNEDGELWFAYEGLKKATRVLESHFQSQKDCYEKEIEALNFKVVHLSQEINHLQKLFREENDINESIRHEVTRLTSENMMIPDFKQQISELEKQKQDLEIRLNEQAEKMKGKLEELSNQLHRSQEEEGTQRKALEAQNEIHTKEKEKLIDKIQEMQEASDHLKKQFETESEVKCNFRQEASRLTLENRDLEEELDMKDRVIKKLQDQVKTLSKTIGKANDVHSSSGPKEYLGMLQYKREDEAKLIQNLILDLKPRGVVVNMIPGLPAHILFMCVRYADSLNDANMLKSLMNSTINGIKQVVKEHLEDFEMLSFWLSNTCHFLNCLKQYSGEEEFMKHNSPQQNKNCLNNFDLSEYRQILSDVAIRIYHQFIIIMEKNIQPIIVPGMLEYESLQGISGLKPTGFRKRSSSIDDTDGYTMTSVLQQLSYFYTTMCQNGLDPELVRQAVKQLFFLIGAVTLNSLFLRKDMCSCRKGMQIRCNISYLEEWLKDKNLQNSLAKETLEPLSQAAWLLQVKKTTDSDAKEIYERCTSLSAVQIIKILNSYTPIDDFEKRVTPSFVRKVQALLNSREDSSQLMLDTKYLFQVTFPFTPSPHALEMIQIPSSFKLGFLNRL

SEQ ID NO: 199925 - protein, 106 aa, Artificial Sequence
  derived and/or modified sequence
MNPYKQLPIYGDAIIHAYSGQNMGDMDPHIFAVAEEAYKQMARNNRNQSIIVSGESGAGKTVSARYAMRYFATVSKSGSNAHVEDKVLASNPITEAVGNAKTTRND

SEQ ID NO: 199926 - DNA, 5229 bp, Artificial Sequence
  derived and/or modified sequence
atggccgttgcagagttgtatactcagtataatagggtctggattccagaccccgaggaagtttggaaatctgccgaaatcgcaaaagactacagggtgggggacaaggtcctgcggttgctgctggaagacgggacagaattggattactcagtgaatccagaatccctgccgccactcagaaatcctgacatcctcgtgggcgagaatgatctaacagccctttcttaccttcacgagcctgctgtactgcacaacctgcgaattcggtttgcagagagtaaactgatttacacctacagtggcatcattctggtggccatgaatccctacaaacaactgccaatatacggggacgccatcatccatgcctactccggtcagaatatgggcgacatggaccctcatattttcgctgtggctgaagaagcctacaagcagatggccagaaacaatcggaaccagtccattatcgtctctggcgagtccggcgctggaaagaccgtctctgcccggtatgcgatgcggtactttgccactgtgtccaaaagcggctcaaatgcccatgtagaagacaaggtcctggccagtaatccaatcaccgaggccgtcggtaacgccaagaccactcggaacgacaatagctcacgattcgggaaatatacagagatttctttcgacgaacagaaccaaatcattggggctaacatgagcacctatctgttagaaaaatcacgggtggtgttccagtccgagaacgaacgtaattaccacatcttctaccagctttgtgcatccgcacagcaatcagaattcaagcatcttaagctgggcagcgcggaagaatttaactacacacgcatgggaggcaacacagtgatcgagggtgtaaacgaccgtgccgagatggtggagacacaaaagacattcacgctgctaggatttaaagaagatttccagatggatgtctttaaaattttagccgccattctgcacctggggaatgtccaaatcactgcagtgggcaacgagcgctcctcggtcagcgaggatgacagtcacctgaaggtgttctgcgagttgcttggattggaaagcgggagagtagcacagtggttgtgcaatagaaagatagtgacatcaagtgagaccgtagtgaagcccatgactaggccccaggccgtgaatgctcgggatgcactcgctaaaaaaatatacgctcacctcttcgactttatcgttgaaagaattaatcaggctcttcaatttagcggaaagcagcacaccttcataggggtgctggacatctatggttttgaaacatttgatgtgaactctttcgaacagttctgtatcaattatgccaacgagaaactgcagcagcagttcaacatgcacgtttttaagcttgagcaggaagaatacatgaaggaggacatcccctggacgctcattgatttctacgataaccagcctgttatcgatctgatcgaggctaagatgggaattctggagcttctggacgaggaatgtctcctccctcacgggaccgatgaaaactggttgcaaaaattgtacaataatttcgtgaatcgaaacccattgtttgagaagccgaggatgagcaacacatccttcgtcatacagcacttcgccgataaggttgagtacaagtgcgaaggtttccttgaaaagaatagagacactgtttacgatatgttggtggagattcttagggcctccaagttccatctgtgtgctaatttcttccaggaaaaccctacccctccctccccatttggcagtatgatcacagtgaagagcgctaagcaggttattaagcccaacagtaaacacttcaggactactgtagggtccaagtttcgcagttccttatacctcctgatggaaactctgaatgcaactaccccccattatgttcggtgcatcaaacctaatgatgagaaattgccttttgagtttgacagcaagcgaatcgtgcaacagctccgcgcctgtggggtactcgaaactatccgtatctccgctcaaagctatccaagccgctggacgtatatcgagttttactctcgatacggcattcttatgactaaacaagagttgtcgtttagcgataagaaagaagtgtgcaaagtggttctgcatcgcctgattcaggattcgaatcaatatcagttcggaaaaactaagattttctttagagccggacaggtcgcctatcttgaaaaattgaggctggataaattgcgccagagttgcgtcatggtgcagaaacatatgagaggatggttacagcgcaaaaagttcctgagagaacgaagggcggctctgattattcagcagtactttcggggacaacagacggtgagaaaagctattaccgcagtggctctcaaagaggcttgggcagccattattatccagaagcactgccgcggatacctcgtccgctcactttaccagctgatcagaatggcaacgattaccatgcaggcctattcccgcggctttctggcccgaaggcgatatcgcaagatgctggaagaacataaggctgttattcttcagaaatatgcacgggcctggctggcgcgtagaagattccagagtattcgccgctttgtgcttaatattcagctcacatacagggtccagcgactgcagaaaaaactcgaagatcagaataaggagaatcacggcttggttgagaaactaaccagccttgccgcactccgagccggggacgtcgaaaagatccagaagctggaggcagagctcgagaaggcggccacccacagaaggaactatgaggaaaaaggcaagcgctaccgagacgccgttgaagaaaagcttgccaaactccagaaacacaacagcgagctagagacgcagaaagagcagatccagctaaagctgcaagaaaagacagaagaactaaaggaaaaaatggataacctgacgaagcagctctttgatgatgtgcagaaggaagagcgccagcggatgttattggagaaaagcttcgaactgaaaacacaagactacgagaaacagatccaatcactgaaggaggaaataaaggcgctgaaggacgaaaagatgcagttacaacacctggttgagggagaacatgtgactagtgacggccttaaggccgaagtagctagactcagtaaacaggtcaagaccatatctgagtttgagaaagaaatcgagctcctgcaggctcagaagatcgatgtcgagaaacacgtgcagtcacagaaacgggaaatgcgagagaagatgagcgaaataacaaaacagcttttggaatcctatgacattgaggacgtgaggtctagactctcggtggaggaccttgagcacctgaatgaggatggggaattatggttcgcttacgaaggactgaaaaaagcaactagagtccttgaatcccatttccagtcacagaaggactgttatgagaaggaaatcgaagcactcaacttcaaggtggtacatctcagtcaggagatcaaccacctccagaagctgttcagagaagagaacgatatcaatgagtctattcggcatgaggttacacgactgacatccgaaaatatgatgatccccgacttcaagcagcagatcagtgagctggagaagcagaagcaggatttggagataaggctgaatgagcaggcagagaagatgaagggaaaacttgaagagctgtccaatcaactgcacaggtcccaagaagaagagggcacccagcgaaaggccctggaagcgcagaatgaaattcacacaaaggaaaaggagaaattaattgacaagatccaggagatgcaggaggccagcgatcatcttaagaaacaatttgagaccgagagtgaggttaagtgtaactttaggcaggaagcctcacgtttgacactggaaaacagggatctagaggaggagttggacatgaaggacagggtgattaagaaactgcaggaccaggtgaaaaccctatcaaagacgatcggcaaagcgaacgacgtgcattcgtcctccgggccaaaggaatacctcggcatgcttcaatacaagagagaggacgaagccaaactcatccaaaatctcatcctagatcttaagccccgcggggttgtggttaatatgatacctggcttacctgctcatattttatttatgtgcgtcagatacgccgatagcttaaacgatgccaacatgttaaaatccctcatgaactccacgatcaacggtatcaaacaggtggtgaaagaacatctggaagattttgagatgcttagtttctggttaagcaacacatgtcacttcttgaactgtctgaagcagtactccggggaagaggaattcatgaaacacaattcacctcaacagaacaagaactgcctgaataacttcgacctgagcgaataccgccagattttgtcagatgtcgccatcagaatttaccaccaatttattataatcatggaaaagaacatccagcccattatcgtgcccggtatgctggagtatgagagcctgcaaggaatttccgggctgaaacccaccggctttcgcaagcgcagttcctccatcgatgacaccgacggctatactatgaccagtgtcctgcagcaactgtcctatttttacaccactatgtgtcagaacggcctcgatcccgaactcgtgaggcaggccgtgaaacagttattttttctcattggcgctgtgaccctgaactccctgttccttaggaaggatatgtgctcttgtcgaaaaggcatgcagatccggtgtaacatctcatacctggaggaatggctcaaagataagaacctgcagaattccttagccaaagagacattggagcctttgtcacaggcggcatggttgttgcaggtgaaaaaaaccacagatagtgatgccaaggagatatatgaacggtgtaccagcttgtctgcagttcagatcataaaaattctgaacagctatacgcccatcgatgacttcgagaagcgagtgacccccagcttcgtgcgcaaggtacaagccctgttaaattcacgggaagacagctcccagctaatgctagacacaaaatacttgttccaggtgacattccctttcaccccttctcctcacgcgttagagatgatccagatcccttccagctttaaactgggattcctgaatcgactctag

SEQ ID NO: 199927 - DNA, 321 bp, Artificial Sequence
  derived and/or modified sequence
atgaatccctataaacagctgccaatttatggcgacgcgataattcatgcttactccgggcagaacatgggagacatggacccacatatcttcgcggttgctgaagaggcttataagcaaatggcaagaaacaatcggaaccagtccatcatcgtgagcggcgagtccggggcaggcaagacagtctccgcgaggtacgccatgcgctacttcgcaactgttagcaagtccggatctaatgcccatgttgaggataaggtgttagctagcaacccaatcaccgaagccgtgggcaatgctaaaacaactagaaacgactag

SEQ ID NO: 199928 - DNA, 5229 bp, Artificial Sequence
  derived and/or modified sequence
atggctgtggccgagctgtacacccagtacaacagagtgtggatcccagaccctgaggaggtgtggaagtctgctgagatcgccaaggactacagagtgggggacaaggtgctgcggctgctgctggaggatggaacagagctggactacagcgtgaaccctgagagcctgccccccctgagaaatccagacatcctggtgggagaaaatgacctgacagccctgagctacctgcacgagcctgctgtgctgcacaacctgcgcatccgctttgctgagagcaagctgatctacacctacagcggcatcatcctggtggccatgaacccctacaagcagctgcccatctatggagatgccatcatccacgcctacagcggccagaacatgggagacatggacccccacatctttgctgtggccgaggaggcctacaagcagatggccaggaacaacagaaaccagagcatcatcgtgtctggagagagcggggccggcaagacagtgtctgcccgctatgccatgagatactttgccaccgtgtccaagagcggcagcaatgcccacgtggaggacaaggtgctggccagcaaccccatcacagaagctgtgggcaatgccaagaccaccagaaatgacaacagcagcagatttgggaagtacacagagatcagctttgatgagcagaaccagatcattggagccaacatgagcacctacctgctggagaagagccgggtggtgttccagagtgaaaatgaaagaaactaccacatcttctaccagctgtgtgccagcgcccagcagagcgagttcaagcacctgaagctgggcagcgctgaggagttcaactacaccaggatgggcggcaacacagtcatcgagggcgtgaatgacagagctgagatggtggagacccagaagaccttcaccctgctgggcttcaaggaggacttccagatggatgtgttcaagatcctggccgccatcctgcacctgggcaatgtgcagatcacagctgtgggcaatgaaagaagctctgtgtctgaagatgacagccacctgaaggtgttctgtgagctgctgggcctggagagcggccgggtggcccagtggctgtgcaacaggaagatcgtgaccagcagcgagaccgtggtgaagcccatgacccggccccaggccgtgaatgccagagatgccctggccaagaagatctatgcccacctgtttgacttcatcgtggagcgcatcaaccaggccctgcagttcagcggcaagcagcacaccttcatcggcgtgctggacatctacggctttgagacctttgatgtgaacagctttgagcagttctgcatcaactatgccaatgagaagctgcagcagcagttcaacatgcacgtgttcaagctggagcaggaggagtacatgaaggaggacatcccctggaccctgattgacttctatgacaaccagcccgtcatcgacctgattgaggccaagatgggcatcctggagctgctggatgaggagtgcctgctgccccatggaacagatgagaactggctgcagaagctgtacaacaactttgtgaacagaaaccccctgtttgagaagcccaggatgagcaacaccagctttgtgatccagcactttgctgacaaggtggagtacaagtgtgagggcttcctggagaagaacagagacacagtgtatgacatgctggtggagatcctgcgggccagcaagttccacctgtgtgccaacttcttccaggagaaccccaccccacccagccccttcggctccatgatcaccgtgaagagcgccaagcaggtgatcaagcccaacagcaagcacttccgcaccaccgtgggcagcaagttccgcagcagcctgtacctgctgatggagaccctgaatgccaccaccccccactacgtgcgctgcatcaagcccaatgatgagaagctgccctttgaatttgacagcaagagaattgtgcagcagctgcgggcctgtggggtgctggagaccatccgcatcagcgcccagagctaccccagccgctggacctacatcgagttctacagccgctatggcatcctgatgaccaagcaggagctgtccttcagtgacaagaaggaggtgtgcaaggtggtgctgcacaggctcatccaggacagcaaccagtaccagtttgggaagaccaagatcttcttccgggccggccaggtggcctacctggagaagctgcggctggacaagctgcggcagagctgtgtgatggtgcagaagcacatgaggggctggctgcagaggaagaagttcctgcgggagcggcgggccgccctgatcatccagcagtacttccggggccagcagacagtgaggaaggccatcacagctgtggccctgaaggaggcctgggccgccatcatcatccagaagcactgccggggctacctggtgcgcagcctgtaccagctgatccgcatggccaccatcaccatgcaggcctacagccggggcttcctggcccggcggcgctacaggaagatgctggaggagcacaaggctgtgatcctgcagaagtatgcccgggcctggctggcccggcggcgcttccagagcatcagaagatttgtgctgaacatccagctgacctacagagtgcagaggctgcagaagaagctggaggaccagaacaaggagaaccacggcctggtggagaagctgaccagcctggccgccctgcgggctggagatgtggagaagatccagaagctggaggccgagctggagaaggccgccacccacagaagaaattatgaggagaagggcaagcgctacagagatgctgtggaggagaagctggccaagctgcagaagcacaacagcgagctggagacccagaaggagcagatccagctgaagctgcaggagaagacagaggagctgaaggagaagatggacaacctgaccaagcagctgtttgatgatgtgcagaaggaggagcggcagaggatgctgctggagaagagctttgagctgaagacccaggactatgagaagcagatccagagcctgaaggaggagatcaaggccctgaaggatgagaagatgcagctgcagcacctggtggagggggagcacgtgaccagtgatggcctgaaggccgaggtggcccggctgagcaagcaggtgaagaccatcagcgagtttgagaaggagattgagctgctgcaggcccagaagattgatgtggagaagcacgtgcagagccagaagcgggagatgagggagaagatgtctgagatcaccaagcagctgctggagagctatgacattgaagatgtgcgcagccggctgtctgtggaggacctggagcacctgaatgaagatggagagctgtggtttgcctatgagggcctgaagaaggccaccagggtgctggagagccacttccagagccagaaggactgctatgagaaggagattgaggccctgaacttcaaggtggtgcacctgagccaggagatcaaccacctgcagaagctgttccgggaggagaatgacatcaatgaaagcatcagacatgaggtgacccggctgaccagcgagaacatgatgatcccagacttcaagcagcagatcagcgagctggagaagcagaagcaggacctggagatccggctgaatgagcaggccgagaagatgaagggcaagctggaggagctgagcaaccagctgcacaggagccaggaggaggagggcacccagaggaaggccctggaggcccagaatgagatccacaccaaggagaaggagaagctgattgacaagatccaggagatgcaggaggccagtgaccacctgaagaagcagtttgaaacagagagcgaggtgaagtgcaacttccggcaggaggccagccggctgaccctggagaacagagacctggaggaggagctggacatgaaggacagagtcatcaagaagctgcaggaccaggtgaagaccctgagcaagaccatcggcaaggccaatgatgtgcacagcagcagcggccccaaggagtacctgggcatgctgcagtacaagagagaagatgaggccaagctgatccagaacctgatcctggacctgaagccccggggcgtggtggtgaacatgatccctggcctgcctgcccacatcctcttcatgtgtgtgcgctatgctgacagcctgaatgatgccaacatgctgaagagcctgatgaacagcaccatcaatggcatcaagcaggtggtgaaggagcacctggaggactttgagatgctgtccttctggctgagcaacacctgccacttcctgaactgcctgaagcagtacagcggggaggaggagttcatgaagcacaacagcccccagcagaacaagaactgcctgaacaactttgacctgtctgagtaccggcagatcctgagtgatgtggccatccgcatctaccaccagttcatcatcatcatggagaagaacatccagcccatcatcgtgcccggcatgctggagtatgagagcctgcagggcatcagcggcctgaagcccaccggcttcaggaagaggagcagcagcattgatgacacagatggctacaccatgacctctgtgctgcagcagctgagctacttctacaccaccatgtgccagaatggcctggaccctgagctggtgcggcaggccgtgaagcagctgttcttcctgattggagctgtgaccctgaacagcctcttcctgaggaaggacatgtgcagctgcaggaagggcatgcagatccgctgcaacatctcctacctggaggagtggctgaaggacaagaacctgcagaacagcctggccaaggagaccctggagcccctgagccaggccgcctggctgctgcaggtgaagaagaccacagacagtgatgccaaggagatctatgagcgctgcaccagcctgtctgctgtgcagatcatcaagatcctgaacagctacacccccattgatgactttgagaagagggtgacccccagctttgtgaggaaggtgcaggccctgctgaacagccgggaggacagcagccagctgatgctggacaccaagtacctgttccaggtgaccttccccttcacccccagcccccacgccctggagatgatccagatccccagcagcttcaagctgggcttcctgaaccggctgtag

SEQ ID NO: 199929 - DNA, 321 bp, Artificial Sequence
  derived and/or modified sequence
atgaacccctacaagcagctgcccatctatggagatgccatcatccacgcctacagcggccagaacatgggagacatggacccccacatctttgctgtggccgaggaggcctacaagcagatggccaggaacaacagaaaccagagcatcatcgtgtctggagagagcggggccggcaagacagtgtctgcccgctatgccatgagatactttgccaccgtgtccaagagcggcagcaatgcccacgtggaggacaaggtgctggccagcaaccccatcacagaggccgtgggcaatgccaagaccaccagaaatgactag

SEQ ID NO: 199930 - DNA, 6971 bp, Artificial Sequence
  derived and/or modified sequence
aactcgggaacgggaacaggaggccgttggaaaactttgggcaagatggcccggcggtgatttccgcggcggtctctcctgcgcccggcctctgcggcgcaggcccagcccccgagcctcgcacgttcggcagccccggcctggccccggcccctcctgcccatggcggtggccgagctgtacacgcagtacaacagggtctggattcccgatcctgaagaagtttggaagtctgctgaaatagccaaggactacagagttggtgacaaggtcctgcgactcctgctggaggatggaacggagctggattattctgtcaatccagaatctctgcctccacttcggaatcctgacatcctcgtgggcgagaatgacctcacggctctcagctatcttcacgagcccgcggtgctccacaacctcagaatccgctttgcagaatccaaactcatttacacctacagtggaatcattttggtggccatgaatccttacaagcagttgccaatatacggagatgccatcatccacgcctacagcgggcagaacatgggcgatatggacccacacatatttgccgtggcagaagaggcatacaagcagatggccagaaacaacagaaaccagtccataattgtaagtggggagtcaggtgctggaaagacagtgtcggctcgctatgccatgaggtactttgccaccgtcagcaaatcgggcagcaacgctcacgtggaagacaaggtcctggcatccaatcccatcaccgaggccgttggaaatgccaagaccacccgcaatgacaatagtagtcggtttgggaaatacacagaaatcagttttgatgaacaaaatcaaattataggagccaacatgagcacttacctcctggagaaatccagagttgtctttcaatcggaaaatgaacgaaattaccacattttctatcagctttgtgcatctgcacagcagtcggaatttaaacatcttaaattggggagtgccgaagaatttaattatacaagaatgggaggcaatactgtcattgagggtgtgaatgatcgagctgaaatggtagagactcaaaagaccttcacgcttctgggtttcaaggaggattttcagatggacgtttttaaaatcctggcagccatcctacatctgggcaatgtgcagatcaccgcggtgggcaacgagaggtcctcagttagtgaggatgacagtcacctgaaggtgttctgtgagctcctgggcctggagagtggcagagttgctcagtggctgtgcaatcgcaaaatcgtcacaagctctgagacggtggtaaaacccatgaccaggcctcaggctgtcaacgccagggatgcactggccaaaaagatctatgctcacctgttcgacttcattgtggagagaattaaccaagcgttgcagttttcaggcaagcagcacacttttattggtgttttggacatttatggttttgaaacctttgatgtgaacagctttgaacaattttgcatcaattacgctaatgaaaaactgcaacaacagtttaacatgcatgtcttcaaactggaacaagaagaatacatgaaggaagatataccttggacgctgatagatttttatgacaatcaaccagttattgacctgattgaagcaaaaatgggaattctggagttactggatgaagaatgtttgttaccacatggaactgatgaaaactggcttcaaaagctgtataataattttgtcaacaggaaccctttgtttgaaaagcctagaatgtcaaacacatcctttgtcatccagcactttgctgataaggtagagtataaatgtgaaggtttcctggagaaaaacagagacaccgtctatgacatgctggttgaaatcctgagagcaagcaagtttcatctctgtgccaacttttttcaagaaaatccaactcctccttctccttttggttcaatgattacagttaaatctgcaaagcaagtcatcaagccaaacagcaagcatttccggaccacagttgggagcaagttccgcagctctctgtacttgctcatggagaccctcaatgcgacgacgccccactacgttcgatgcatcaagccaaatgatgagaagttaccctttgaatttgactccaaaagaattgttcagcagctgcgagcctgcggcgttttagaaacgattcgcattagtgcacagagctacccttccaggtggacatacatcgagttctacagtcgctacggcattctcatgaccaagcaagagctttccttcagcgataaaaaggaggtgtgcaaggtggttttacacagactcatccaggattctaatcagtaccagtttggtaaaaccaaaattttcttcagagcaggacaagtggcttatttagagaaacttcgattggataaactgaggcagagttgtgttatggtacaaaagcacatgcgtggctggctccagaggaaaaaattcctccgagagagacgagccgccctgataatccagcagtacttccggggtcagcaaactgtgaggaaagctattactgcagtggccttaaaagaagcttgggcagccataatcattcagaagcactgccgcgggtatcttgttcgcagcctgtatcagttgattcgcatggccaccatcacaatgcaggcctacagccgaggattcctggcaaggaggaggtatcgaaagatgctggaggaacataaggctgtgatcctacagaaatacgcacgggcgtggctggccagacgcagattccagagtatccgacgattcgtgcttaatattcagcttacttacagggtccagcgtttgcagaaaaagttggaagatcagaacaaagaaaaccatgggctggtggagaagctgactagcctggctgctcttcgagctggggatgtggaaaagattcagaagctggaagcagaactagaaaaagcagccactcacaggcgaaattacgaggagaaggggaagagatacagggatgctgtggaagagaaattggcaaagcttcagaagcataattcagaactggaaacacagaaagaacaaatacagctgaagcttcaagagaagactgaagagttaaaagaaaaaatggacaacctcaccaagcagctctttgatgatgtacaaaaggaagaacggcaaagaatgcttcttgaaaaaagttttgaactgaaaacacaagactatgagaagcagattcagtctttgaaagaagaaattaaagctctcaaggatgagaagatgcaactccaacacctggtggagggggagcacgtcacttctgatggcttgaaggcggaagtggcccgcctgagcaagcaggtcaagacaatctctgagttcgaaaaagagatagaactacttcaggcacagaagatagatgtggagaaacatgtgcagtcacaaaaacgggaaatgagagaaaagatgtcagagatcaccaaacaacttctcgaaagctatgacattgaagatgtaagaagcaggctctctgtggaagatctggaacatttaaatgaggatggagaactttggtttgcttatgaaggactaaagaaagcaacacgtgttttggagagccatttccagtctcagaaggattgctatgaaaaggagattgaagctttgaacttcaaagtggtgcatctcagtcaagaaatcaaccacctgcagaagttattcagagaagaaaatgacatcaatgaaagcatccgtcatgaagttaccaggctaacatcagagaacatgatgatcccagactttaaacagcaaatttcagaattggagaaacagaagcaagatcttgaaatccgcctgaatgaacaagctgagaaaatgaaaggaaaactagaagaattgtctaatcagttacatcgcagtcaagaggaggaaggaacacaaagaaaggccttggaagcccaaaatgaaatacataccaaagagaaggagaagctgattgataagattcaagaaatgcaggaggccagtgaccacttgaagaaacaatttgaaactgaaagtgaagtcaagtgtaacttccggcaggaagcatcccggctcactttggaaaacagggatcttgaagaagaattagacatgaaagacagagtgattaaaaagctacaagatcaagtcaagacactaagcaagacaattggaaaagccaatgatgtgcactcgtcctcaggacccaaggagtaccttggaatgctgcaatacaagagagaagacgaggccaagctcattcagaacctcattcttgacttgaagccccgtggcgtggtggtgaacatgatccccgggctgccggctcatatcctgttcatgtgtgtgcgctacgcagactctctgaatgatgccaacatgctgaagtccctcatgaacagcaccattaatggcatcaagcaggtggttaaggaacatttagaagactttgaaatgctgtccttttggctttccaacacttgtcattttctcaattgcctgaagcagtacagcggagaagaggaattcatgaagcataatagtccacagcagaataagaattgcttgaacaattttgacctttcagaatacagacagattctcagtgatgtggctatacgaatatatcatcaatttattatcataatggaaaagaatatccaaccgataatagttccgggaatgctggagtatgagagcctgcagggcatttccggcctgaagcccacaggcttccggaagcgctcctctagcatagacgacacggacggctacaccatgacctccgtcctgcaacagctgagctacttttacaccaccatgtgccagaacggcctggaccccgagcttgtgaggcaggcggtgaagcagctcttcttcttgatcggggcggtcacgctgaacagcctcttcctgcgcaaggacatgtgctcctgcagaaaagggatgcagatcaggtgcaatatcagctacttagaagaatggcttaaagataagaacttgcagaacagcttagcaaaggaaactttggagcccctctctcaggcagcctggttgcttcaggtcaagaagaccacagacagtgatgccaaggagatctacgaacgctgcacctcactgtctgctgtgcagatcataaagatccttaattcatacacacctatagatgactttgagaagagagtgactccatcctttgttcgcaaagtacaggctctcctaaatagccgggaggattcatcacagctgatgttggataccaaatatctctttcaagtcacatttccttttaccccctctccacatgctctggaaatgattcagatccccagcagtttcaagctaggctttctgaataggttatagcaggagaaaaagtcaatgcactttttcttcaaaagctaagtgaaggttcaatatgagggatgtgttttattaattggcagtggaaattggaatgtgatttaaggaagaaaacagacttttctcaaatggaccacatcatctctcactcacagtgacaatgctgctcctgtaattttgtaagaattcacacacaccagctgtatttggaaaagccatgtctcactctcgaatctcagctggttttcactgaaattcctggagggctcatattttcttccacgtgcctcttgatctgttctgtcttgtggcagggctctaccaggagggagtgagatctggggacacagtggcttccaagttttctaaggttcatgtgaaacctgagtacatttacaaagctgcaagtggattctagtgctgagtcttccaggaaaaaatcccgtttggccaccgtgacctgccaaaagttctcttgccccatgcctgctggggacagaaggttttcatgaactctttttactgaaaatgccctgcatttaaaaatgtttattttagacccttctaaatttttttttttttttttttttgagactccggagtctcgctctatcgccaggctggagtgtagtggcatgatctcggcttattgcaacctccgcttcctgggttcaaacaattctcctgcctcagcctcctgagtagctgggactacaggcacctgccaccacgcccagctaatttttgtatttttagtggagacaggtttcaccatgttggccaggatggcctcgatctcttgacctcgtgatccgcccacctcagcctcccaaagtgctaggattacaggcgtgtgccaccgcgcccggctgacccttttaatttttaagagtgttcaatccgagatgaatcatttgaagtatttttatatgtatatctatttaaaactaatatattattaaagcttaattgccatgccgtttatcttctctgaaagaacttcaaatcttacctgccaacatattcaccataatttttttattttttaatacctttcatacaataacttttttaaaacaacctcagattgaaaaagcaacctaaattactttcgctctctaatcagcatttcaatgtatttatttttaaattttctcaaaaagtaactaaaaaattgtgtcggaccctacttttgagaaatctacgtttcccaagttttatgggaactggctattccttgtcccggcacaccttctcattccttcctttcagagcctaaaacctcatttgataagcactcctagtctctggcctgtggatccagtgctattctgtcaccaacctaagaatcccaattgcaccttctgtttctgacagtcacaggtgacagctgtgattctataatacagactggtgtcttagaggtaggaataatacatgattatgaagcatcaccctgctaatacataataatgtctttttatattataagtgattgagtttagttcatttcaatacattgtacatgaaaaaatgaaaagtagaactttgtaatactttaatcaataaaattaattaccaaa

SEQ ID NO: 199931 - DNA, 3074 bp, Artificial Sequence
  derived and/or modified sequence
gaaaactttgggcaagatggcccggcggtgatttccgcggcggtctctcctgcgcccggcctctgcggcgcaggcccagcccccgagcctcgcacgttcggcagccccggcctggccccggcccctcctgcccatggcggtggccgagctgtacacgcagtacaacagggtctggattcccgatcctgaagaagtttggaagtctgctgaaatagccaaggactacagagttggtgacaaggtcctgcgactcctgctggaggatggaacggagctggattattctgtcaatccagaatctctgcctccacttcggaatcctgacatcctcgtgggcgagaatgacctcacggctctcagctatcttcacgagcccgcggtgctccacaacctcagaatccgctttgcagaatccaaactcatttacacctacagtggaatcattttggtggccatgaatccttacaagcagttgccaatatacggagatgccatcatccacgcctacagcgggcagaacatgggcgatatggacccacacatatttgccgtggcagaagaggcatacaagcagatggccagatgggaaatctgaggcacaggacctggacctgctgactctttacctaaatctttactgcataaccccagccgcagctcctgagctccctccgctttatgtcttcgtctgtgagctggactctcagagggcacccattcctggttctgatgcttataatgagggagcaggtggtgcttacatgagaaacaacagaaaccagtccataattgtaagtggggagtcaggtgctggaaagacagtgtcggctcgctatgccatgaggtactttgccaccgtcagcaaatcgggcagcaacgctcacgtggaagacaaggtcctggcatccaatcccatcaccgaggccgttggaaatgccaagaccacccgcaatgacaatagtagtcggtttgggaaatacacagaaatcagttttgatgaacaaaatcaaattataggagccaacatgagcacttacctcctggagaaatccagagttgtctttcaatcggaaaatgaacgaaattaccacattttctatcagctttgtgcatctgcacagcagtcggaatttaaacatcttaaattggggagtgccgaagaatttaattatacaagaatgggaggcaatactgtcattgagggtgtgaatgatcgagctgaaatggtagagactcaaaagaccttcacgcttctgggtttcaaggaggattttcagatggacgtttttaaaatcctggcagccatcctacatctgggcaatgtgcagatcaccgcggtgggcaacgagaggtcctcagttagtgaggatgacagtcacctgaaggtgttctgtgagctcctgggcctggagagtggcagagttgctcagtggctgtgcaatcgcaaaatcgtcacaagctctgagacggtggtaaaacccatgaccaggcctcaggctgtcaacgccagggatgcactggccaaaaagatctatgctcacctgttcgacttcattgtggagagaattaaccaagcgttgcagttttcagttttgaaacctttgatgtgaacagctttgaacaattttgcatcaattacgctaatgaaaaactgcaacaacagtttaacatgcatgtcttcaaactggaacaagaagaatacatgaaggaagatataccttggacgctgatagatttttatgacaatcaaccagttattgacctgattgaagcaaaaatgggaattctggagttactggatgaagaatgtttgttaccacatggaactgatgaaaactggcttcaaaagctgtataataattttgtcaacaggaaccctttgtttgaaaagcctagaatgtcaaacacatcctttgtcatccagcactttgctgataaggtagagtataaatgtgaaggtttcctggagaaaaacagagacaccgtctatgacatgctggttgaaatcctgagagcaagcaagtttcatctctgtgccaacttttttcaagaaaatccaactcctccttctccttttggttcaatgattacagttaaatctgcaaagcaagtcatcaagccaaacagcaagcatttccggaccacagttgggagcaagttccgcagctctctgtacttgctcatggagaccctcaatgcgacgacgccccactacgttcgatgcatcaagccaaatgatgagaagttaccctttgaatttgactccaaaagaattgttcagcagctgcgagcctgcggcgttttagaaacgattcgcattagtgcacagagctacccttccaggtggacatacatcgagttctacagtcgctacggcattctcatgaccaagcaagagctttccttcagcgataaaaaggaggtgtgcaaggtggttttacacagactcatccaggattctaatcagtaccagtttggtaaaaccaaaattttcttcagagcaggacaagtggcttatttagagaaacttcgattggataaactgaggcagagttgtgttatggtacaaaagcacatgcgtggctggctccagaggaaaaaattcctccgagagagacgagccgccctgataatccagcagtacttccggggtcagcaaactgtgagaacaaagaaaaccatgggctggtggagaagctgactagcctggctgctcttcgagctggggatgtggaaaagattcagaagctggaagcagaactagaaaaagcagccactcacaggcgaaattacgaggagaaggggaagagatacagggatgctgtggaagagaaattggcaaagcttcagaagcataattcagaactggaaacacagaaagaacaaatacagctgaagcttcaagagaagactgaagagttaaaagaaaaaatggacaacctcaccaagcagctctttgatgatgtacaaaaggaagaacggcaaagaatgcttcttgaaaaaagttttgaactgaaaacacaagactatgagaagcagattcagtctttgaaagaagaaattaaagctctcaa

SEQ ID NO: 199932 - DNA, 2129 bp, Artificial Sequence
  derived and/or modified sequence
cggtgatttccgcggcggtctctcctgcgcccggcctctgcggcgcaggcccagcccccgagcctcgcacgttcggcagccccggcctggccccggcccctcctgcccatggcggtggccgagctgtacacgcagtacaacagggtctggattcccgatcctgaagaagtttggaagtctgctgaaatagccaaggactacagagttggtgacaaggtcctgcgactcctgctggaggatggaacggagctggattattctgtcaatccagaatctctgcctccacttcggaatcctgacatcctcgtgggcgagaatgacctcacggctctcagctatcttcacgagcccgcggtgctccacaacctcagaatccgctttgcagaatccaaactcatttacacctacagtggaatcattttggtggccatgaatccttacaagcagttgccaatatacggagatgccatcatccacgcctacagcgggcagaacatgggcgatatggacccacacatatttgccgtggcagaagaggcatacaagcagatggccagaaacaacagaaaccagtccataattgtaagtggggagtcaggtgctggaaagacagtgtcggctcgctatgccatgaggtactttgccaccgtcagcaaatcgggcagcaacgctcacgtggaagacaaggtcctggcatccaatcccatcaccgaggccgttggaaatgccaagaccacccgcaatgacaatagtagtcggtttgggaaatacacagaaatcagttttgatgaacaaaatcaaattataggagccaacatgagcacttacctcctggagaaatccagagttgtctttcaatcggaaaatgaacgaaattaccacattttctatcagctttgtgcatctgcacagcagtcggaatttaaacatcttaaattggggagtgccgaagaatttaattatacaagaatgggaggcaatactgtcattgagggtgtgaatgatcgagctgaaatggtagagactcaaaagaccttcacgcttctgggtttcaaggaggattttcagatggacgtttttaaaatcctggcagccatcctacatctgggcaatgtgcagatcaccgcggtgggcaacgagaggtcctcagttagtgaggatgacagtcacctgaaggtgttctgtgagctcctgggcctggagagtggcagagttgctcagtggctgtgcaatcgcaaaatcgtcacaagctctgagacggtggtaaaacccatgaccaggcctcaggctgtcaacgccagggatgcactggccaaaaagatctatgctcacctgttcgacttcattgtggagagaattaaccaagcgttgcagttttcagttttgaaacctttgatgtgaacagctttgaacaattttgcatcaattacgctaatgaaaaactgcaacaacagtttaacatgcatgtcttcaaactggaacaagaagaatacatgaaggaagatataccttggacgctgatagatttttatgacaatcaaccagttattgacctgattgaagcaaaaatgggaattctggagttactggatgaagaatgtttgttaccacatggaactgatgaaaactggcttcaaaagctgtataataattttgtcaacaggaaccctttgtttgaaaagcctagaatgtcaaacacatcctttgtcatccagcactttgctgataaggtaccgtgaaggtctccatcaatgctgtcaaccccggaacctgtacagcctccagaaggagtaggcaggccaggaatgtttctgatcagattcaagtcatacttaacatgtagctttgatgagtgtgtgtttaacagttccttatttgtttttgtggcgagatacatgagttccaactgtactactttaaagacgaatgtgttgttagaagaccacacttctgattttggatgtactgaagttactgaatttcattaacctcttatcagtttattttctatatgaaattgtgataatcaagacagcataattcttccttatgatgaaagctatatttttttctgaagttctatttgattaaactggactatattacagtggcaacataggttaactcaa

SEQ ID NO: 199933 - DNA, 6076 bp, Artificial Sequence
  derived and/or modified sequence
ggccccggcccctcctgcccatggcggtggccgagctgtacacgcagtacaacagggtctggattcccgatcctgaagaagtttggaagtctgctgaaatagccaaggactacagagttggtgacaaggtcctgcgactcctgctggaggatggaacggagctggattattctgtcaatccagaatctctgcctccacttcggaatcctgacatcctcgtgggcgagaatgacctcacggctctcagctatcttcacgagcccgcggtgctccacaacctcagaatccgctttgcagaatccaaactcatttacacctacagtggaatcattttggtggccatgaatccttacaagcagttgccaatatacggagatgccatcatccacgcctacagcgggcagaacatgggcgatatggacccacacatatttgccgtggcagaagaggcatacaagcagatggccagaaacaacagaaaccagtccataattgtaagtggggagtcaggtgctggaaagacagtgtcggctcgctatgccatgaggtactttgccaccgtcagcaaatcgggcagcaacgctcacgtggaagacaaggtcctggcatccaatcccatcaccgaggccgttggaaatgccaagaccacccgcaatgacaatagtagtcggtttgggaaatacacagaaatcagttttgatgaacaaaatcaaattataggagccaacatgagcacttacctcctggagaaatccagagttgtctttcaaggagtgccgaagaatttaattatacaagaatgggaggcaatactgtcattgagggtgtgaatgatcgagctgaaatggtagagactcaaaagaccttcacgcttctgggaaatgtgctaatcccctcacggtgactgaatatggtttcaaggaggattttcagatggacgtttttaaaatcctggcagccatcctacatctgggcaatgtgcagatcaccgcggtgggcaacgagaggtcctcagttagtgaggatgacagtcacctgaaggtgttctgtgagctcctgggcctggagagtggcagagttgctcagtggctgtgcaatcgcaaaatcgtcacaagctctgagacggtggtaaaacccatgaccaggcctcaggctgtcaacgccagggatgcactggccaaaaagatctatgctcacctgttcgacttcattgtggagagaattaaccaagcgttgcagttttcagttttgaaacctttgatgtgaacagctttgaacaattttgcatcaattacgctaatgaaaaactgcaacaacagtttaacatgcatgtcttcaaactggaacaagaagaatacatgaaggaagatataccttggacgctgatagatttttatgacaatcaaccagttattgacctgattgaagcaaaaatgggaattctggagttactggatgaagaatgtttgttaccacatggaactgatgaaaactggcttcaaaagctgtataataattttgtcaacaggaaccctttgtttgaaaagcctagaatgtcaaacacatcctttgtcatccagcactttgctgataaggtagagtataaatgtgaaggtttcctggagaaaaacagagacaccgtctatgacatgctggttgaaatcctgagagcaagcaagtttcatctctgtgccaacttttttcaagaaaatccaactcctccttctccttttggttcaatgattacagttaaatctgcaaagcaagtcatcaagccaaacagcaagcatttccggaccacagttgggagcaagttccgcagctctctgtacttgctcatggagaccctcaatgcgacgacgccccactacgttcgatgcatcaagccaaatgatgagaagttaccctttgaatttgactccaaaagaattgttcagcagctgcgagcctgcggcgttttagaaacgattcgcattagtgcacagagctacccttccaggtggacatacatcgagttctacagtcgctacggcattctcatgaccaagcaagagctttccttcagcgataaaaaggaggtgtgcaaggtggttttacacagactcatccaggattctaatcagtaccagtttggtaaaaccaaaattttcttcagagcaggacaagtggcttatttagagaaacttcgattggataaactgaggcagagttgtgttatggtacaaaagcacatgcgtggctggctccagaggaaaaaattcctccgagagagacgagccgccctgataatccagcagtacttccggggtcagcaaactgtgagatgctggaggaacataaggctgtgatcctacagaaatacgcacgggcgtggctggccagacgcagattccagagtatccgacgattcgtgcttaatattcagcttacttacagggtccagcgtttgcagaaaaagttggaagatcagaacaaagaaaaccatgggctggtggagaagctgactagcctggctgctcttcgagctggggatgtggaaaagattcagaagctggaagcagaactagaaaaagcagccactcacaggcgaaattacgaggagaaggggaagagatacagggatgctgtggaagagaaattggcaaagcttcagaagcataattcagaactggaaacacagaaagaacaaatacagctgaagcttcaagagaagactgaagagttaaaaggcttcttgaaaaaagttttgaactgaaaacacaagactatgagaagcagattcagtctttgaaagaagaaattaaagctctcaaggatgagaagatgcaactccaacacctggtggagggggagcacgtcacttctgatggcttgaaggcggaagtggcccgcctgagcaagcaggtcaagacaatctctgagttcgaaaaagagatagaactacttcaggcacagaagatagatgtggagaaacatgtgcagtcacaaaaacgggaaatgagagaaaagatgtcagagatcaccaaacaacttctcgaaagctatgacattgaagatgtaagaagcaggctctctgtggaagatctggaacatttaaatgaggatggagaactttggtttgcttatgaaggactaaagaaagcaacacgtgttttggagagccatttccagtctcagaaggattgctatgaaaaggagattgaagctttgaacttcaaagtggtgcatctcagtcaagaaatcaaccacctgcagaagttattcagagaagaaaatgacatcaatgaaagcatccgtcatgaagttaccaggctaacatcagagaacatgatgatcccagactttaaacagcaaatttcagaattggagaaacagaagcaagatcttgaaatccgcctgaatgaacaagctgagaaaatgaaaggaaaactagaagaattgtctaatcagttacatcgcagtcaagaggaggaaggaacacaaagaaaggccttggaagcccaaaatgaaatacataccaaagagaaggagaagctgattgataagattcaagaaatgcaggaggccagtgaccacttgaagaaacaatttgaaactgaaagtgaagtcaagtgtaacttccggcaggaagcatcccggctcactttggaaaacagggatcttgaagaagaattagacatgaaagacagagtgattaaaaagctacaagatcaagtcaagacactaagcaagacaattggaaaagacttgaagccccgtggcgtggtggtgaacatgatccccgggctgccggctcatatcctgttcatgtgtgtgcgctacgcagactctctgaatgatgccaacatgctgaagtccctcatgaacagcaccattaatggcatcaagcaggtggttaaggaacatttagaagactttgaaatgctgtccttttggctttccaacacttgtcattttctcaattgcctgaagcagtacagcggagaagaggaattcatgaagcataatagtccacagcagaataagaattgcttgaacaattttgacctttcagaatacagacagattctcagtgatgtggctatacgaatatatcatcaatttattatcataatggaaaagaatatccaaccgataatagttccgggaatgctggagtatgagagcctgcagggcatttccggcctgaagcccacaggcttccggaagcgctcctctagcatagacgacacggacggctacaccatgacctccgtcctgcaacagctgagctacttttacaccaccatgtgccagaacggcctggaccccgagcttgtgaggcaggcggtgaagcagctcttcttcttgatcggggcggtcacgctgaacagcctcttcctgcgcaaggacatgtgctcctgcagaaaagggatgcagatcaggtgcaatatcagctacttagaagaatggcttaaagataagaacttgcagaacagcttagcaaaggaaactttggagcccctctctcaggcagcctggttgcttcaggtcaagaagaccacagacagtgatgccaaggagatctacgaacgctgcacctcactgtctgctgtgcagatcataaagatccttaattcatacacacctatagatgactttgagaagagagtgactccatcctttgttcgcaaagtacaggctctcctaaatagccgggaggattcatcacagctgatgttggataccaaatatctctttcaagtcacatttccttttaccccctctccacatgctctggaaatgattcagatccccagcagtttcaagctaggctttctgaataggttatagcaggagaaaaagtcaatgcactttttcttcaaaagctaagtgaaggttcaatatgagggatgtgttttattaattggcagtggaaattggaatgtgatttaaggaagaaaacagacttttctcaaatggaccacatcatctctcactcacagtgacaatgctgctcctgtaattttgtaagaattcacacacaccagctgtatttggaaaagccatgtctcactctcgaatctcagctggttttcactgaaattcctggagggctcatattttcttccacgtgcctcttgatctgttctgtcttgtggcagggctctaccaggagggagtgagatctggggacacagtggcttccaagttttctaaggttcatgtgaaacctgagtacatttacaaagctgcaagtggattctagtgctgagtcttccaggaaaaaatcccgtttggccaccgtgacctgccaaaagttctcttgccccatgcctgctggggacagaaggttttcatgaactctttttactgaaaatgccctgcatttaaaaatgtttattttagacccttctaaatttttttttttttttttttttgagactccggagtctcgctctatcgccaggctggagtgtagtggcatgatctcggcttattgcaacctccgcttcctgggttcaaacaattctcctgcctcagcctcctgagtagctgggactacaggcacctgccaccacgcccagctaatttttgtatttttagtggagacaggtttcaccatgttggccaggatggcctcgatctcttgacctcgtgatccgcccacctcagcctcccaaagtgctaggattacaggcgtgtgccaccgcgcccggctgacccttttaatttttaagagtgttcaatccgagatgaatcatttgaagtatttttatatgtatatctatttaaaactaatatattattaaagcttaattgccatgccgtttatcttctctgaaagaacttcaaatcttacctgccaacatattcaccataatttttttattttttaatacctttcatacaataacttttttaaaacaacctcagattgaaaaagcaacctaaattactttcgctctctaatcagcatttcaatgtatttatttttaaattttctcaaaaagtaactaaaaaattgtgtcggaccctacttttgagaaatctacgtttcccaagttttatgggaactggctattccttgtcccgg

SEQ ID NO: 199934 - DNA, 5229 bp, Artificial Sequence
  derived and/or modified sequence
atggccgtggccgagctgtacacccagtacaaccgggtgtggatcccagatcccgaggaagtctggaaaagcgctgaaatcgctaaggattacagggtaggggacaaagtgctccgcctgctgcttgaagacggcaccgagcttgactacagcgtaaatccagagtccctcccaccacttcggaatcccgatattctagttggtgagaatgaccttacagcacttagttacctgcacgaacctgcagttcttcataacctgcgtatccggttcgcggagagtaagttgatctacacttactccggcattatcctcgtagcaatgaatccctacaaacagctgcccatctatggtgatgcaatcattcatgcatacagcggtcaaaacatgggtgacatggacccccacattttcgccgttgcggaggaggcctacaagcaaatggcgcgtaataaccgcaaccaaagtataatcgtgtccggcgaatcaggggccggtaagactgtcagtgctaggtacgcaatgagatacttcgccacagtgagtaagtcggggtctaatgcccatgttgaggacaaagtgctggcctctaatcccattacagaggctgtaggcaatgctaagactacccgtaatgataactccagccgctttggcaaatacactgagatctcatttgatgagcagaatcaaattatcggagctaatatgtccacctatctgctagagaaatctagggtagtcttccagagcgaaaatgagaggaattatcacattttctatcagctctgcgcgtccgcccaacagtcagaatttaagcacctcaagctggggagtgccgaagagtttaattatactaggatggggggcaacacggtgatcgaaggtgtgaatgatagggctgagatggtggagacgcagaaaacatttacgcttcttggcttcaaggaggatttccagatggacgtgtttaagatcctcgctgccattctacatttgggcaatgtccagataaccgccgtggggaacgaaagatccagtgtgtccgaggacgactcccatttaaaggtgttttgtgaactgctggggctggaatcaggccgcgtagcccagtggctctgcaacagaaaaattgtgacatcctccgagaccgtggttaagcccatgacccggccccaggccgttaatgctcgcgacgcacttgccaagaaaatatatgcccatctgtttgacttcattgtagaacgcatcaatcaagctttacaattttccggcaaacagcataccttcatcggggtcctggacatctacggatttgagacctttgatgtgaacagttttgagcagttctgcattaactatgccaacgaaaaactccagcagcagttcaatatgcatgtgttcaagcttgaacaggaggagtacatgaaggaggacattccatggaccctgattgatttctatgataaccagccagttatcgacctcattgaggccaaaatgggaatcctagaactcctggacgaggagtgcctactgccccatggcaccgacgaaaattggctgcagaaactgtacaataatttcgtgaacaggaatccattgtttgaaaaaccaagaatgagcaatactagttttgtcatccagcatttcgccgataaggtggagtataaatgcgaaggctttttggaaaagaacagagataccgtgtacgacatgcttgttgaaattctccgggctagtaagttccacctgtgcgctaatttttttcaagagaaccccaccccacctagcccttttggatctatgattacagttaagtcggctaagcaggtcatcaagccgaactcaaaacattttcgcacaactgtggggtccaagttccggtcatccttatatctattgatggagactcttaacgccactaccccacactacgtgcggtgcataaagcctaatgacgaaaaattaccatttgagttcgattccaagcgtatcgtgcagcagctcagggcatgcggcgtcctcgagacgattagaatcagcgctcaatcatacccaagccgttggacctacattgaattctactcacgatacggtattttgatgacaaagcaagagcttagcttttcagacaagaaagaggtttgcaaggtagttctgcacagactgatccaagatagtaatcagtatcaattcggtaaaaccaagatcttctttcgtgcaggccaagttgcctatctggagaagttaagactggacaaactccggcagtcgtgcgtgatggttcagaagcacatgcgtggctggttgcagcggaagaagttcctgcgggagaggagggccgccctcattattcaacagtacttccgaggccagcagactgtccgcaaggccattacggccgtcgccctgaaggaggcttgggccgctattatcatccagaaacattgtagaggctacctggttcgctctctctatcagctgatacggatggctacaatcaccatgcaggcctatagccgagggttcctggcacgcaggcggtaccggaaaatgcttgaagagcacaaagcagtgatacttcaaaagtacgctagagcctggctggcccgccggagatttcagtcaatacggagattcgtgttgaatattcagttgacgtacagggtgcagaggctgcaaaaaaaactcgaggaccaaaataaggaaaaccatggcctggtggaaaagctcacaagcctcgctgccttgcgcgcgggtgatgtcgagaagatccagaagctcgaagccgaacttgagaaagccgccactcatagacgcaactacgaggagaaggggaagcgataccgtgatgccgtagaagaaaaactggccaaactgcagaaacacaacagcgagctggagacccagaaggagcagattcagctaaaactgcaggagaagacagaagagctaaaagaaaagatggacaacctgaccaagcaactgtttgacgatgttcagaaggaggagcgccaaaggatgctcttggaaaagagctttgaactcaaaacacaagactatgagaaacagatacagagcctaaaggaagagataaaggccttaaaggatgaaaagatgcagctgcagcaccttgtggaaggcgagcacgtcacttctgatggacttaaggcagaagtggctcggttgtcaaaacaggtcaagaccatcagtgaatttgaaaaggagatcgaattgctgcaggcgcaaaagatcgatgtcgagaaacacgtgcagagccagaagcgtgagatgagagagaaaatgagtgaaatcaccaaacagctgctggagtcttacgacatagaagacgtgagatcgcgtttgtctgtggaggatctggagcatttgaatgaagacggcgaactctggttcgcttacgaaggactgaagaaagcaacacgggtgctggagagtcactttcagagtcagaaagactgctacgaaaaagaaatcgaggctctcaatttcaaggtcgtccacctctctcaagagataaaccatctccaaaagctcttccgggaagagaacgacatcaatgaatccatccgtcacgaggtgactaggttaactagtgagaatatgatgattcccgactttaaacaacagatctccgagctggagaaacagaagcaagatctcgaaatccggctgaatgagcaggccgaaaagatgaaaggtaaattggaagagctttctaatcagttgcacagatcacaggaagaggagggcactcagcgcaaagccttagaggctcagaatgaaatacacaccaaagagaaagagaaactaattgacaagatccaggagatgcaggaggcttccgatcacctgaagaaacagtttgaaacagagtcagaggtcaaatgcaatttcagacaggaagctagccgcttaactcttgagaacagagatctcgaagaggagctggatatgaaggaccgcgtcattaaaaagctacaggatcaggtgaaaactctttctaagacaattggaaaggctaatgacgtgcatagtagctctggaccaaaggaataccttgggatgctgcaatacaaaagggaggacgaggctaaactgattcagaatctgattctggatttgaagccaagaggagtcgtggtgaacatgattcccggattacccgcccacattctgttcatgtgtgtgagatacgccgactctctgaatgatgctaatatgcttaaatcacttatgaattccactatcaacgggatcaaacaagttgtgaaagagcatctggaagattttgagatgctatctttttggctatccaacacatgtcattttctgaactgtctgaagcaatattccggcgaagaagaattcatgaaacacaactccccacagcagaataagaattgtttgaataattttgacctcagcgaatatcggcaaatcctctccgacgttgctataagaatctaccaccaattcatcatcattatggaaaaaaatatccagccaattattgtgcccggtatgctggagtacgaaagccttcagggcatcagcggtctgaagccaacggggttccggaagcgctcctccagcatcgacgacactgacggctacacaatgacatctgtcttacagcaacttagctatttctacactactatgtgtcagaatggactggatcccgagcttgtgcgacaggctgtcaaacagcttttctttttaattggggcagtgacccttaatagtctgttcctgcgaaaagacatgtgcagctgtcgcaagggcatgcagattaggtgtaacatctcctatctcgaggagtggcttaaggacaagaatctgcaaaattcactggcaaaagaaaccctagagcccttgagtcaagccgcatggcttctgcaggtcaagaagactacagactcagacgccaaagagatctatgaaagatgtacttcactgtccgctgtgcaaatcattaaaattctgaacagttataccccaattgacgattttgaaaaacgggtgacgccctcattcgttagaaaagtccaggccctgttaaattcccgagaggactcatcccagctcatgcttgatacaaagtacctatttcaggtgacattccctttcaccccctctccacatgccctggagatgatccagatccccagctcgtttaaactgggatttcttaataggctatag

SEQ ID NO: 199935 - DNA, 321 bp, Artificial Sequence
  derived and/or modified sequence
atgaacccctacaagcagctgcccatctacggcgacgccatcatccacgcttacagtggtcagaatatgggagacatggacccgcatatctttgctgtcgcagaggaagcttacaagcaaatggcacgcaataataggaaccagtcaatcatcgtttctggagagtctggcgcagggaagaccgtgtcagcaaggtacgccatgagatatttcgctacggtgagcaaatcggggtccaatgcccacgtcgaagacaaagtgctggccagcaacccaatcactgaggcagtgggtaacgctaaaacaacacgcaatgactag

SEQ ID NO: 199936 - DNA, 5229 bp, Artificial Sequence
  derived and/or modified sequence
atggctgtggccgagctctacactcagtataacagggtttggatcccggaccccgaagaagtctggaaatccgcagagattgctaaggattatcgtgtcggagataaggtgcttaggcttttgttagaggatggcaccgaacttgattactccgtcaaccccgagtccctcccccctctgcgcaaccctgacattctggtcggcgagaacgatttaactgctctctcatatctgcacgaacccgctgtcctccacaacttgcgtatacggttcgccgaaagcaaactcatctacacatacagcgggatcattctcgtggcaatgaacccctataagcagctgcctatatacggcgatgcaataatacacgcctatagtggacaaaatatgggtgacatggatcctcatatattcgcagttgccgaagaggcttataagcagatggccaggaataatagaaatcaatctattatcgtctcaggggaatccggcgcaggtaagacagtctccgctcgttacgcaatgcgttatttcgccacagtttcaaagtccggaagcaatgcacatgtggaggacaaggtgcttgcctctaaccccattactgaggcagtcggtaatgcgaaaactacacgcaatgacaattcttcgcgcttcggcaagtacactgagatttcgtttgatgagcagaatcagatcatcggggctaacatgagtacatatcttttggaaaaaagccgggtcgtgtttcaatccgagaatgagcgcaactaccatatattttatcagctctgcgcctctgcgcagcagtcagaatttaaacatcttaagctaggttctgcagaggaattcaactacactcgaatggggggaaacacagtgatcgagggagtaaatgatagagcagaaatggtggagactcagaaaaccttcaccttgctcggctttaaggaggactttcagatggacgtgttcaaaatcctggccgcaatcctgcaccttggtaatgtgcagataacggccgtggggaacgaacgttcctctgtgagcgaagacgacagtcacctgaaggtgttttgcgagctgttaggactagagtccggcagggtcgctcagtggctgtgcaatcggaaaatcgtgacctcatcagaaaccgtggttaagccaatgacccgcccacaggcagtcaacgctcgggacgctctcgccaagaaaatctacgcacacctgttcgacttcatcgtggaacggatcaatcaggcactgcagttcagtggcaagcagcacaccttcattggggtcctcgacatctacggatttgaaacttttgatgtgaattccttcgaacagttctgcatcaactacgccaacgaaaaactacagcagcaattcaacatgcatgtttttaagctcgagcaggaggagtatatgaaagaggacatcccctggacactgatcgacttctacgacaaccaacccgtaatagatctgatagaggcaaagatgggaattctcgagctcttagacgaagaatgtctgctgccacatggcaccgatgagaactggctgcagaagctgtataacaattttgtcaatagaaacccactgttcgaaaaacctcgtatgtccaacacctcctttgtcatacagcattttgcagataaggttgaatacaagtgtgaaggctttctggaaaaaaaccgggacaccgtatatgacatgctggttgaaatactgcgggctagtaaattccatctctgtgccaacttctttcaagaaaaccctacacctccatcacccttcgggagcatgatcacagtgaaatcagcaaagcaggttatcaaacccaattctaagcactttcggaccaccgtgggatcaaagttcaggtcttcgctctatctgctgatggaaaccctgaatgcaacaactccacattatgtgcgctgtatcaagcccaacgacgaaaagctgcccttcgagtttgattccaagcggatcgttcagcagctgcgtgcatgcggagtgctggagacgattcgaatctccgctcaatcttatccttctaggtggacatacatagaattctacagccgctatggtattctcatgaccaagcaagaattaagtttctcagataagaaagaggtgtgtaaagtcgttcttcaccggcttatccaggattctaatcagtaccagttcggcaagactaagatattttttagggcaggtcaggtggcatacctagagaaactgcgactggacaaactgcggcagagttgcgtgatggtacaaaaacatatgagggggtggctacagcggaaaaagtttctgagagaacgcagagcggctctcatcattcagcagtatttccgaggccagcagactgtccggaaggctattacggctgtcgcactgaaggaggcctgggctgccatcattattcagaagcattgtcgcggataccttgtgcgaagtttgtatcagctgatccggatggcaacgattaccatgcaggcctacagcaggggattccttgccagaaggaggtatcgcaagatgctggaggaacataaagctgttatcttacagaagtacgcacgggcttggctggctcggaggagattccaaagcatcagacggttcgttttgaacatccagctgacttacagggtgcagagattacagaaaaaattggaagatcagaacaaagaaaaccatggcctagttgagaaattgacctcgctcgctgccctccgagcaggagacgtggagaagatacagaagcttgaggctgaactggaaaaagcagccacccaccggaggaattacgaggagaaaggtaagcgctatcgcgacgccgttgaagagaaattggctaaactgcaaaagcacaattcggaactcgaaactcaaaaggagcagatacagctcaagctgcaagaaaagaccgaggagctcaaggaaaaaatggacaatcttacgaaacaactgttcgacgacgtgcaaaaagaggagcggcagaggatgctccttgaaaaatcattcgagctgaaaacccaggactatgaaaaacagattcaatccctgaaagaggagattaaggctctgaaggacgagaagatgcagctgcagcacttggtggaaggagagcacgttacgagtgatggcctcaaggctgaggtggccagactgagcaaacaggtcaagactatatccgaattcgaaaaagagattgagttattgcaggcgcagaagatcgatgtggagaaacacgttcagtctcagaaacgggaaatgagagaaaaaatgagcgagatcaccaaacagcttctggaatcctacgatatcgaagacgtgcggtcacgcctgagcgtagaagacctggagcacctcaacgaagatggagaactgtggttcgcgtatgaaggcctgaagaaggctactcgggtccttgaaagtcacttccagagccagaaggactgttacgaaaaggaaatcgaggccctcaatttcaaggtggttcatctgagccaggagatcaaccatctgcaaaagctgttcagagaagagaatgatattaacgaaagcatcagacatgaagtcacgcggctgaccagcgaaaacatgatgatccccgatttcaagcagcagatttcggaattggagaaacagaaacaggatttggagatccgactgaacgagcaggcagaaaagatgaagggaaaactggaagagctgtccaatcagcttcaccggtcccaggaagaagagggtacccagaggaaagctctggaagcacagaatgagattcacacaaaagagaaagagaaattgattgacaagatacaggagatgcaggaagcatccgatcacctgaagaagcagttcgagactgagtccgaggtaaaatgcaacttcaggcaggaagctagccggttgaccctagagaaccgcgatctcgaagaggaattagatatgaaggacagggtgatcaaaaaactccaggaccaggttaagacactgtcaaagaccatcggtaaggccaacgatgtacacagctccagcggacccaaagaatatctgggcatgctgcaatacaaacgggaggacgaagcaaagctaattcaaaatttgatactcgacctcaaaccaaggggggtcgttgtgaatatgatcccaggattacccgcacacatcctctttatgtgtgtcagatacgccgacagcctgaatgatgccaatatgctgaaaagtctgatgaactccaccataaacggaattaagcaagtggtgaaagagcatttggaagacttcgagatgctcagcttctggcttagcaacacttgtcatttcctgaattgtctgaagcaatactccggcgaagaggagtttatgaaacataactctccacagcagaacaagaactgtttgaacaactttgatctgtcagagtaccggcagattttgtccgatgtcgctatccgcatctatcaccagttcattattattatggaaaagaatattcagccgatcatagtgccaggcatgctggaatacgagagtctgcagggaatatccggcctgaaacccaccggctttcggaagcgcagctctagtattgacgatacagatgggtacactatgacctccgttcttcagcagctgtcctacttttatacgacaatgtgccagaatggactggacccagaactggtgcggcaggcggtgaaacaactcttcttcttgattggcgcagtcaccttgaatagcctgtttctcaggaaagatatgtgttcatgtcggaaagggatgcaaatccgctgtaatataagctacctagaggaatggttgaaagataagaacctccagaactccttagcaaaggagactcttgaacctctgtcccaagcggcttggcttctccaggtgaagaaaaccacggactccgacgccaaggagatctatgaaagatgcacttctctgtctgcggtgcagattattaaaattctaaatagctacacacccatcgacgacttcgagaagcgggtcacacccagctttgtccgtaaggttcaggctctgttgaatagtagagaggactcatcacagctaatgctcgacacgaagtacctgtttcaggtcactttcccctttactcccagtcctcacgcgcttgaaatgatccagataccgtctagctttaaactaggctttttgaaccgcctttag

SEQ ID NO: 199937 - DNA, 321 bp, Artificial Sequence
  derived and/or modified sequence
atgaatccatataaacagctaccaatctacggcgacgccattatccatgcgtattccggacagaacatgggcgatatggatccccacatcttcgccgtcgccgaagaggcttacaaacagatggccaggaataacaggaaccaatccattatcgtgtccggggagtccggagctggtaagactgtgtctgctcgttatgccatgcgctacttcgcaacagtatcaaaatcaggcagcaacgctcatgtcgaagacaaggtgctcgcctccaatcctataaccgaggcagtgggaaatgctaaaacaactaggaatgactag

SEQ ID NO: 199938 - DNA, 5229 bp, Artificial Sequence
  derived and/or modified sequence
atggccgtggccgagctgtacacccagtacaacagagtgtggatccccgaccccgaggaggtgtggaagagcgccgagatcgccaaggactacagagtgggcgacaaggtgctgagactgctgctggaggacggcaccgagctggactacagcgtgaaccccgagagcctgccccccctgagaaaccccgacatcctggtgggcgagaacgacctgaccgccctgagctacctgcacgagcccgccgtgctgcacaacctgagaatcagattcgccgagagcaagctgatctacacctacagcggcatcatcctggtggccatgaacccctacaagcagctgcccatctacggcgacgccatcatccacgcctacagcggccagaacatgggcgacatggacccccacatcttcgccgtggccgaggaggcctacaagcagatggccagaaacaacagaaaccagagcatcatcgtgagcggcgagagcggcgccggcaagaccgtgagcgccagatacgccatgagatacttcgccaccgtgagcaagagcggcagcaacgcccacgtggaggacaaggtgctggccagcaaccccatcaccgaggccgtgggcaacgccaagaccaccagaaacgacaacagcagcagattcggcaagtacaccgagatcagcttcgacgagcagaaccagatcatcggcgccaacatgagcacctacctgctggagaagagcagagtggtgttccagagcgagaacgagagaaactaccacatcttctaccagctgtgcgccagcgcccagcagagcgagttcaagcacctgaagctgggcagcgccgaggagttcaactacaccagaatgggcggcaacaccgtgatcgagggcgtgaacgacagagccgagatggtggagacccagaagaccttcaccctgctgggcttcaaggaggacttccagatggacgtgttcaagatcctggccgccatcctgcacctgggcaacgtgcagatcaccgccgtgggcaacgagagaagcagcgtgagcgaggacgacagccacctgaaggtgttctgcgagctgctgggcctggagagcggcagagtggcccagtggctgtgcaacagaaagatcgtgaccagcagcgagaccgtggtgaagcccatgaccagaccccaggccgtgaacgccagagacgccctggccaagaagatctacgcccacctgttcgacttcatcgtggagagaatcaaccaggccctgcagttcagcggcaagcagcacaccttcatcggcgtgctggacatctacggcttcgagaccttcgacgtgaacagcttcgagcagttctgcatcaactacgccaacgagaagctgcagcagcagttcaacatgcacgtgttcaagctggagcaggaggagtacatgaaggaggacatcccctggaccctgatcgacttctacgacaaccagcccgtgatcgacctgatcgaggccaagatgggcatcctggagctgctggacgaggagtgcctgctgccccacggcaccgacgagaactggctgcagaagctgtacaacaacttcgtgaacagaaaccccctgttcgagaagcccagaatgagcaacaccagcttcgtgatccagcacttcgccgacaaggtggagtacaagtgcgagggcttcctggagaagaacagagacaccgtgtacgacatgctggtggagatcctgagagccagcaagttccacctgtgcgccaacttcttccaggagaaccccaccccccccagccccttcggcagcatgatcaccgtgaagagcgccaagcaggtgatcaagcccaacagcaagcacttcagaaccaccgtgggcagcaagttcagaagcagcctgtacctgctgatggagaccctgaacgccaccaccccccactacgtgagatgcatcaagcccaacgacgagaagctgcccttcgagttcgacagcaagagaatcgtgcagcagctgagagcctgcggcgtgctggagaccatcagaatcagcgcccagagctaccccagcagatggacctacatcgagttctacagcagatacggcatcctgatgaccaagcaggagctgagcttcagcgacaagaaggaggtgtgcaaggtggtgctgcacagactgatccaggacagcaaccagtaccagttcggcaagaccaagatcttcttcagagccggccaggtggcctacctggagaagctgagactggacaagctgagacagagctgcgtgatggtgcagaagcacatgagaggctggctgcagagaaagaagttcctgagagagagaagagccgccctgatcatccagcagtacttcagaggccagcagaccgtgagaaaggccatcaccgccgtggccctgaaggaggcctgggccgccatcatcatccagaagcactgcagaggctacctggtgagaagcctgtaccagctgatcagaatggccaccatcaccatgcaggcctacagcagaggcttcctggccagaagaagatacagaaagatgctggaggagcacaaggccgtgatcctgcagaagtacgccagagcctggctggccagaagaagattccagagcatcagaagattcgtgctgaacatccagctgacctacagagtgcagagactgcagaagaagctggaggaccagaacaaggagaaccacggcctggtggagaagctgaccagcctggccgccctgagagccggcgacgtggagaagatccagaagctggaggccgagctggagaaggccgccacccacagaagaaactacgaggagaagggcaagagatacagagacgccgtggaggagaagctggccaagctgcagaagcacaacagcgagctggagacccagaaggagcagatccagctgaagctgcaggagaagaccgaggagctgaaggagaagatggacaacctgaccaagcagctgttcgacgacgtgcagaaggaggagagacagagaatgctgctggagaagagcttcgagctgaagacccaggactacgagaagcagatccagagcctgaaggaggagatcaaggccctgaaggacgagaagatgcagctgcagcacctggtggagggcgagcacgtgaccagcgacggcctgaaggccgaggtggccagactgagcaagcaggtgaagaccatcagcgagttcgagaaggagatcgagctgctgcaggcccagaagatcgacgtggagaagcacgtgcagagccagaagagagagatgagagagaagatgagcgagatcaccaagcagctgctggagagctacgacatcgaggacgtgagaagcagactgagcgtggaggacctggagcacctgaacgaggacggcgagctgtggttcgcctacgagggcctgaagaaggccaccagagtgctggagagccacttccagagccagaaggactgctacgagaaggagatcgaggccctgaacttcaaggtggtgcacctgagccaggagatcaaccacctgcagaagctgttcagagaggagaacgacatcaacgagagcatcagacacgaggtgaccagactgaccagcgagaacatgatgatccccgacttcaagcagcagatcagcgagctggagaagcagaagcaggacctggagatcagactgaacgagcaggccgagaagatgaagggcaagctggaggagctgagcaaccagctgcacagaagccaggaggaggagggcacccagagaaaggccctggaggcccagaacgagatccacaccaaggagaaggagaagctgatcgacaagatccaggagatgcaggaggccagcgaccacctgaagaagcagttcgagaccgagagcgaggtgaagtgcaacttcagacaggaggccagcagactgaccctggagaacagagacctggaggaggagctggacatgaaggacagagtgatcaagaagctgcaggaccaggtgaagaccctgagcaagaccatcggcaaggccaacgacgtgcacagcagcagcggccccaaggagtacctgggcatgctgcagtacaagagagaggacgaggccaagctgatccagaacctgatcctggacctgaagcccagaggcgtggtggtgaacatgatccccggcctgcccgcccacatcctgttcatgtgcgtgagatacgccgacagcctgaacgacgccaacatgctgaagagcctgatgaacagcaccatcaacggcatcaagcaggtggtgaaggagcacctggaggacttcgagatgctgagcttctggctgagcaacacctgccacttcctgaactgcctgaagcagtacagcggcgaggaggagttcatgaagcacaacagcccccagcagaacaagaactgcctgaacaacttcgacctgagcgagtacagacagatcctgagcgacgtggccatcagaatctaccaccagttcatcatcatcatggagaagaacatccagcccatcatcgtgcccggcatgctggagtacgagagcctgcagggcatcagcggcctgaagcccaccggcttcagaaagagaagcagcagcatcgacgacaccgacggctacaccatgaccagcgtgctgcagcagctgagctacttctacaccaccatgtgccagaacggcctggaccccgagctggtgagacaggccgtgaagcagctgttcttcctgatcggcgccgtgaccctgaacagcctgttcctgagaaaggacatgtgcagctgcagaaagggcatgcagatcagatgcaacatcagctacctggaggagtggctgaaggacaagaacctgcagaacagcctggccaaggagaccctggagcccctgagccaggccgcctggctgctgcaggtgaagaagaccaccgacagcgacgccaaggagatctacgagagatgcaccagcctgagcgccgtgcagatcatcaagatcctgaacagctacacccccatcgacgacttcgagaagagagtgacccccagcttcgtgagaaaggtgcaggccctgctgaacagcagagaggacagcagccagctgatgctggacaccaagtacctgttccaggtgaccttccccttcacccccagcccccacgccctggagatgatccagatccccagcagcttcaagctgggcttcctgaacagactgtag

SEQ ID NO: 199939 - DNA, 321 bp, Artificial Sequence
  derived and/or modified sequence
atgaacccctacaagcagctgcccatctacggcgacgccatcatccacgcctacagcggccagaacatgggcgacatggacccccacatcttcgccgtggccgaggaggcctacaagcagatggccagaaacaacagaaaccagagcatcatcgtgagcggcgagagcggcgccggcaagaccgtgagcgccagatacgccatgagatacttcgccaccgtgagcaagagcggcagcaacgcccacgtggaggacaaggtgctggccagcaaccccatcaccgaggccgtgggcaacgccaagaccaccagaaacgactag

SEQ ID NO: 199940 - protein, 843 aa, Artificial Sequence
  derived and/or modified sequence
MRLPDLRPWTSLLLVDAALLWLLQGPLGTLLPQGLPGLWLEGTLRLGGLWGLLKLRGLLGFVGTLLLPLCLATPLTVSLRALVAGASRAPPARVASAPWSWLLVGYGAAGLSWSLWAVLSPPGAQEKEQDQVNNKVLMWRLLKLSRPDLPLLVAAFFFLVLAVLGETLIPHYSGRVIDILGGDFDPHAFASAIFFMCLFSFGSSLSAGCRGGCFTYTMSRINLRIREQLFSSLLRQDLGFFQETKTGELNSRLSSDTTLMSNWLPLNANVLLRSLVKVVGLYGFMLSISPRLTLLSLLHMPFTIAAEKVYNTRHQEVLREIQDAVARAGQVVREAVGGLQTVRSFGAEEHEVCRYKEALEQCRQLYWRRDLERALYLLVRRVLHLGVQMLMLSCGLQQMQDGELTQGSLLSFMIYQESVGSYVQTLVYIYGDMLSNVGAAEKVFSYMDRQPNLPSPGTLAPTTLQGVVKFQDVSFAYPNRPDRPVLKGLTFTLRPGEVTALVGPNGSGKSTVAALLQNLYQPTGGQVLLDEKPISQYEHCYLHSQVVSVGQEPVLFSGSVRNNIAYGLQSCEDDKVMAAAQAAHADDFIQEMEHGIYTDVGEKGSQLAAGQKQRLAIARALVRDPRVLILDEATSALDVQCEQANGFWVGPLGGGSASESDPTGFLHDSRHRLSSDVGMFVALTKLGQPDAEQWNSRLDLLERSRQAVDGVCRHNYRLGAPFTVGRKVQPEVTVYPERTPLLHQHNLLHCSVTGFYPGDIKIKWFLNGQEERAGVMSTGPIRNGDWTFQTVVMLEMTPELGHVYTCLVDHSSLLSPVSVEWRAQSEYSWRKMLSGIAAFLLGL

SEQ ID NO: 199941 - protein, 653 aa, Artificial Sequence
  derived and/or modified sequence
MRLPDLRPWTSLLLVDAALLWLLQGPLGTLLPQGLPGLWLEGTLRLGGLWGLLKLRGLLGFVGTLLLPLCLATPLTVSLRALVAGASRAPPARVASAPWSWLLVGYGAAGLSWSLWAVLSPPGAQEKEQDQVNNKVLMWRLLKLSRPDLPLLVAAFFFLVLAVLGETLIPHYSGRVIDILGGDFDPHAFASAIFFMCLFSFGSSLSAGCRGGCFTYTMSRINLRIREQLFSSLLRQDLGFFQETKTGELNSRLSSDTTLMSNWLPLNANVLLRSLVKVVGLYGFMLSISPRLTLLSLLHMPFTIAAEKVYNTRHQEVLREIQDAVARAGQVVREAVGGLQTVRSFGAEEHEVCRYKEALEQCRQLYWRRDLERALYLLVRRVLHLGVQMLMLSCGLQQMQDGELTQGSLLSFMIYQESVGSYVQTLVYIYGDMLSNVGAAEKVFSYMDRQPNLPSPGTLAPTTLQGVVKFQDVSFAYPNRPDRPVLKGLTFTLRPGEVTALVGPNGSGKSTVAALLQNLYQPTGGQVLLDEKPISQYEHCYLHSQVVSVGQEPVLFSGSVRNNIAYGLQSCEDDKVMAAAQAAHADDFIQEMEHGIYTDVGEKGSQLAAGQKQRLAIARALVRDPRVLILDEATSALDVQCEQAKTLWKFMIF

SEQ ID NO: 199942 - protein, 653 aa, Artificial Sequence
  derived and/or modified sequence
MRLPDLRPWTSLLLVDAALLWLLQGPLGTLLPQGLPGLWLEGTLRLGGLWGLLKLRGLLGFVGTLLLPLCLATPLTVSLRALVAGASRAPPARVASAPWSWLLVGYGAAGLSWSLWAVLSPPGAQEKEQDQVNNKVLMWRLLKLSRPDLPLLVAAFFFLVLAVLGETLIPHYSGRVIDILGGDFDPHAFASAIFFMCLFSFGSSLSAGCRGGCFTYTMSRINLRIREQLFSSLLRQDLGFFQETKTGELNSRLSSDTTLMSNWLPLNANVLLRSLVKVVGLYGFMLSISPRLTLLSLLHMPFTIAAEKVYNTRHQEVLREIQDAVARAGQVVREAVGGLQTVRSFGAEEHEVCRYKEALEQCRQLYWRRDLERALYLLIRRVLHLGVQMLMLSCGLQQMQDGELTQGSLLSFMIYQESVGSYVQTLVYIYGDMLSNVGAAEKVFSYMDRQPNLPSPGTLAPTTLQGVVKFQDVSFAYPNRPDRPVLKGLTFTLRPGEVTALVGPNGSGKSTVAALLQNLYQPTGGQVLLDEKPISQYEHCYLHSQVVSVGQEPVLFSGSVRNNITYGLQSCEDDKVMAAAQAAHADDFIQEMEHGIYTDVGEKGSQLAAGQKQRLAIARALVRDPRVLILDEATSALDVQCEQAKTLWKFMIF

SEQ ID NO: 199943 - protein, 769 aa, Artificial Sequence
  derived and/or modified sequence
MRLPDLRPWTSLLLVDAALLWLLQGPLGTLLPQGLPGLWLEGTLRLGGLWGLLKLRGLLGFVGTLLLPLCLATPLTVSLRALVAGASRAPPARVASAPWSWLLVGYGAAGLSWSLWAVLSPPGAQEKEQDQVNNKVLMWRLLKLSRPDLPLLVAAFFFLVLAVLGETLIPHYSGRVIDILGGDFDPHAFASAIFFMCLFSFGSSLSAGCRGGCFTYTMSRINLRIREQLFSSLLRQDLGFFQETKTGELNSRLSSDTTLMSNWLPLNANVLLRSLVKVVGLYGFMLSISPRLTLLSLLHMPFTIAAEKVYNTRHQEVLREIQDAVARAGQVVREAVGGLQTVRSFGAEEHEVCRYKEALEQCRQLYWRRDLERALYLLVRRVLHLGVQMLMLSCGLQQMQDGELTQGSLLSFMIYQESVGSYVQTLVYIYGDMLSNVGAAEKVFSYMDRQPNLPSPGTLAPTTLQGVVKFQDVSFAYPNRPDRPVLKGLTFTLRPGEVTALVGPNGSGKSTVAALLQNLYQPTGGQVLLDEKPISQYEHCYLHSQVVSVGQEPVLFSGSVRNNIAYGLQSCEDDKVMAAAQAAHADDFIQEMEHGIYTDVGEKGSQLAAGQKQRLAIARALVRDPRVLILDEATSALDVQCEQANGFWVGPLGGGSASESDPTGFLHDSRHRLSSDVGMFVALTKLGQPDAEQWNSRLDLLERSRQAVDGVCRHNYRLGAPFTVGRKVQPEVTVYPERTPLLHQHNLLHCSVTGFYPGDIKIKWFLNGQ

SEQ ID NO: 199944 - protein, 769 aa, Artificial Sequence
  derived and/or modified sequence
MRLPDLRPWTSLLLVDAALLWLLQGPLGTLLPQGLPGLWLEGTLRLGGLWGLLKLRGLLGFVGTLLLPLCLATPLTVSLRALVAGASRAPPARVASAPWSWLLVGYGAAGLSWSLWAVLSPPGAQEKEQDQVNNKVLMWRLLKLSRPDLPLLVAAFFFLVLAVLGETLIPHYSGRVIDILGGDFDPHAFASAIFFMCLFSFGSSLSAGCRGGCFTYTMSRINLRIREQLFSSLLRQDLGFFQETKTGELNSRLSSDTTLMSNWLPLNANVLLRSLVKVVGLYGFMLSISPRLTLLSLLHMPFTIAAEKVYNTRHQEVLREIQDAVARAGQVVREAVGGLQTVRSFGAEEHEVCRYKEALEQCRQLYWRRDLERALYLLIRRVLHLGVQMLMLSCGLQQMQDGELTQGSLLSFMIYQESVGSYVQTLVYIYGDMLSNVGAAEKVFSYMDRQPNLPSPGTLAPTTLQGVVKFQDVSFAYPNRPDRPVLKGLTFTLRPGEVTALVGPNGSGKSTVAALLQNLYQPTGGQVLLDEKPISQYEHCYLHSQVVSVGQEPVLFSGSVRNNITYGLQSCEDDKVMAAAQAAHADDFIQEMEHGIYTDVGEKGSQLAAGQKQRLAIARALVRDPRVLILDEATSALDVQCEQANGFWVGPLGGGSASESDPTGFLHDSRHRLSSDVGMFVALTKLGQPDAEQWNSRLDLLERSRQAVDGVCRHNYRLGAPFTVGRKVQPEVTVYPERTPLLHQHNLLHCSVTGFYPGDIKIKWFLNGQ

SEQ ID NO: 199945 - DNA, 2532 bp, Artificial Sequence
  derived and/or modified sequence
atgagactgcccgacctgagaccctggaccagcctgctgctggtggacgccgccctgctgtggctgctgcagggccccctgggcaccctgctgccccagggcctgcccggcctgtggctggagggcaccctgagactgggcggcctgtggggcctgctgaagctgagaggcctgctgggcttcgtgggcaccctgctgctgcccctgtgcctggccacccccctgaccgtgagcctgagagccctggtggccggcgccagcagagccccccccgccagagtggccagcgccccctggagctggctgctggtgggctacggcgccgccggcctgagctggagcctgtgggccgtgctgagcccccccggcgcccaggagaaggagcaggaccaggtgaacaacaaggtgctgatgtggagactgctgaagctgagcagacccgacctgcccctgctggtggccgccttcttcttcctggtgctggccgtgctgggcgagaccctgatcccccactacagcggcagagtgatcgacatcctgggcggcgacttcgacccccacgccttcgccagcgccatcttcttcatgtgcctgttcagcttcggcagcagcctgagcgccggctgcagaggcggctgcttcacctacaccatgagcagaatcaacctgagaatcagagagcagctgttcagcagcctgctgagacaggacctgggcttcttccaggagaccaagaccggcgagctgaacagcagactgagcagcgacaccaccctgatgagcaactggctgcccctgaacgccaacgtgctgctgagaagcctggtgaaggtggtgggcctgtacggcttcatgctgagcatcagccccagactgaccctgctgagcctgctgcacatgcccttcaccatcgccgccgagaaggtgtacaacaccagacaccaggaggtgctgagagagatccaggacgccgtggccagagccggccaggtggtgagagaggccgtgggcggcctgcagaccgtgagaagcttcggcgccgaggagcacgaggtgtgcagatacaaggaggccctggagcagtgcagacagctgtactggagaagagacctggagagagccctgtacctgctggtgagaagagtgctgcacctgggcgtgcagatgctgatgctgagctgcggcctgcagcagatgcaggacggcgagctgacccagggcagcctgctgagcttcatgatctaccaggagagcgtgggcagctacgtgcagaccctggtgtacatctacggcgacatgctgagcaacgtgggcgccgccgagaaggtgttcagctacatggacagacagcccaacctgcccagccccggcaccctggcccccaccaccctgcagggcgtggtgaagttccaggacgtgagcttcgcctaccccaacagacccgacagacccgtgctgaagggcctgaccttcaccctgagacccggcgaggtgaccgccctggtgggccccaacggcagcggcaagagcaccgtggccgccctgctgcagaacctgtaccagcccaccggcggccaggtgctgctggacgagaagcccatcagccagtacgagcactgctacctgcacagccaggtggtgagcgtgggccaggagcccgtgctgttcagcggcagcgtgagaaacaacatcgcctacggcctgcagagctgcgaggacgacaaggtgatggccgccgcccaggccgcccacgccgacgacttcatccaggagatggagcacggcatctacaccgacgtgggcgagaagggcagccagctggccgccggccagaagcagagactggccatcgccagagccctggtgagagaccccagagtgctgatcctggacgaggccaccagcgccctggacgtgcagtgcgagcaggccaacggcttctgggtgggccccctgggcggcggcagcgccagcgagagcgaccccaccggcttcctgcacgacagcagacacagactgagcagcgacgtgggcatgttcgtggccctgaccaagctgggccagcccgacgccgagcagtggaacagcagactggacctgctggagagaagcagacaggccgtggacggcgtgtgcagacacaactacagactgggcgcccccttcaccgtgggcagaaaggtgcagcccgaggtgaccgtgtaccccgagagaacccccctgctgcaccagcacaacctgctgcactgcagcgtgaccggcttctaccccggcgacatcaagatcaagtggttcctgaacggccaggaggagagagccggcgtgatgagcaccggccccatcagaaacggcgactggaccttccagaccgtggtgatgctggagatgacccccgagctgggccacgtgtacacctgcctggtggaccacagcagcctgctgagccccgtgagcgtggagtggagagcccagagcgagtacagctggagaaagatgctgagcggcatcgccgccttcctgctgggcctgtag

SEQ ID NO: 199946 - DNA, 2532 bp, Artificial Sequence
  derived and/or modified sequence
atgcggctgcccgacctgagaccttggacctccctgctgctcgtagacgcggccttactctggctattgcaggggccactcggaaccctgctcccgcaggggttgcccggtctctggctggagggaacgcttagactgggtggactctggggattgcttaagctgaggggccttttgggcttcgtagggacactgctgctgcctttgtgcctggccacaccgctgacagtatccttacgtgccctagtcgctggggctagcagggctcctccagctcgggtagcgagcgccccctggagctggctgctcgtcggttacggagcagctggcctaagctggagtctgtgggctgtgctgtcgccccccggcgctcaagagaaggaacaggatcaggtgaacaataaggtcctgatgtggagactgttgaagctcagtcgtccagatctgccattactggtggctgctttcttctttctcgtgctcgccgtcctgggcgagacgctcataccccactacagtggaagagtgatcgatatcctgggaggggacttcgacccccacgctttcgcttctgcaatcttttttatgtgtctcttcagctttggttccagcctgtctgctggatgtcgcgggggatgctttacctacaccatgagcaggatcaacctcaggatccgtgagcaactgtttagttcactccttcggcaggacctaggcttctttcaagaaactaagaccggcgagctgaattcccggctgtccagcgacactacccttatgtcgaactggcttccactgaatgcgaacgtgcttctccggtcgctggtcaaggttgtcggactttatggattcatgttgtctatcagtccccgtctcacactgctgtccctacttcacatgccgtttactatcgccgccgagaaagtgtataatacccggcaccaggaggtccttcgcgaaatccaggatgctgtcgcaagagctggtcaagtggtgagggaggctgtggggggccttcaaacagtgagatcattcggggcagaagaacacgaagtctgccgatacaaggaggctctcgagcagtgtagacagctttattggcgcagggacctggaacgggcattgtacctattggttagaagggtgttacacttgggtgtgcagatgctgatgctgtcttgcgggctccagcagatgcaggatggggagctaacccagggctctttattgtcgtttatgatataccaagagtctgtgggctcgtacgtgcagacattggtttacatctacggcgacatgctgagcaacgtgggcgcagccgaaaaggtattttcttatatggatcggcaacccaacctgccaagccccgggactctggccccaactacgctgcagggggttgtgaagtttcaggatgtgtccttcgcataccctaaccgtccagaccggcccgtcttgaaagggctgacctttactctacgccccggtgaagtgactgccctggtgggacccaatggctcgggcaagtcaaccgtggctgcactgcttcaaaatctttaccagccaacagggggccaggtgctgttagatgaaaagcccatcagccagtacgagcactgctatcttcactcccaagtcgtgtctgtggggcaggaaccagtgctcttctctggcagtgttaggaataatatcgcatatggactccaatcctgtgaagacgacaaggttatggccgccgcgcaggccgcccacgctgacgatttcatacaggagatggagcatggtatatacaccgacgtgggggaaaaggggtcccaactggctgccggccaaaagcaacgattagcaattgctcgagccctggtgcgggatccccgcgtgctgatacttgatgaggccaccagcgctctggatgtgcagtgcgagcaggccaacggcttctgggtcgggcccctcggtgggggcagcgctagcgagtccgatcccactgggtttctccacgactcgcggcacaggctgagctccgacgtagggatgttcgtggccctcaccaagctcggccaacctgatgcggagcagtggaactcgcgtcttgatctcttagaacgatcccgccaggcagttgacggcgtgtgtcgccacaactatcgtctcggagccccattcactgtggggcggaaagtgcagcccgaagtcactgtttaccctgaaaggacccccttattgcaccagcataatctgctccattgctcagtgacaggcttctacccaggggacattaaaattaagtggtttcttaacggccaggaggagagagctggcgtcatgtctacagggcctattaggaatggggactggacctttcagaccgtggtgatgcttgagatgacacctgagctaggccatgtgtatacctgcctcgttgaccatagttctctccttagccccgtgagcgtggagtggcgggcgcagtctgaatatagctggcgtaagatgctatcaggcatcgccgcctttctcctagggctctag

SEQ ID NO: 199947 - DNA, 2532 bp, Artificial Sequence
  derived and/or modified sequence
atgaggctgcctgacctgcggccctggaccagcctgctgctggtggatgctgccctgctgtggctgctgcagggccccctgggcaccctgctgccccagggcctgcccggcctgtggctggagggcaccctgcggctgggcggcctgtggggcctgctgaagctgcggggcctgctgggctttgtgggcaccctgctgctgcccctgtgcctggccacccccctgactgtgtccctgcgggccctggtggccggggccagccgggcccccccagcccgggtggccagcgccccctggagctggctgctggtgggctacggggctgctggcctgtcctggagcctgtgggccgtgctgagccccccaggggcccaggagaaggagcaggaccaggtgaacaacaaggtgctgatgtggaggctgctgaagctgagcaggccagacctgcccctgctggtggccgccttcttcttcctggtgctggccgtgctgggggagaccctcatcccccactacagcggccgggtgattgacatcctgggcggggactttgacccccacgcctttgccagcgccatcttcttcatgtgcctcttctcctttggcagcagcctgtctgctggctgccggggcggctgcttcacctacaccatgagccgcatcaacctgcgcatccgggagcagctgttcagcagcctgctgcggcaggacctgggcttcttccaggagaccaagacaggagagctgaacagccggctgagcagtgacaccaccctgatgagcaactggctgcccctgaatgccaacgtgctgctgcggagcctggtgaaggtggtgggcctgtatggcttcatgctgagcatcagcccccggctgaccctgctgagcctgctgcacatgcccttcaccatcgctgctgagaaggtgtacaacaccaggcaccaggaggtgctgcgggagatccaggatgctgtggcccgggccggccaggtggtgcgggaggccgtgggcggcctgcagacagtgcgcagctttggagctgaggagcacgaggtgtgccgctacaaggaggccctggagcagtgccggcagctgtactggaggcgggacctggagcgggccctgtacctgctggtgcggcgggtgctgcacctgggcgtgcagatgctgatgctgagctgtggcctgcagcagatgcaggatggagagctgacccagggcagcctgctgtccttcatgatctaccaggagagcgtgggcagctatgtgcagaccctggtgtacatctacggggacatgctgagcaatgtgggcgctgctgagaaggtgttctcctacatggaccggcagcccaacctgcccagccctggcaccctggcccccaccaccctgcagggcgtggtgaagttccaggatgtgtcctttgcctaccccaacagaccagacaggcctgtgctgaagggcctgaccttcaccctgcggcctggagaggtgacagccctggtgggccccaatggaagtggcaagagcacagtggccgccctgctgcagaacctgtaccagcccactggaggccaggtgctgctggatgagaagcccatcagccagtatgagcactgctacctgcacagccaggtggtgtctgtgggccaggagcctgtgctcttcagcggctctgtgaggaacaacatcgcctacggcctgcagagctgtgaagatgacaaggtgatggctgctgcccaggccgcccatgctgatgacttcatccaggagatggagcacggcatctacacagatgtgggggagaagggcagccagctggccgccggccagaagcagaggctggccatcgcccgggccctggtgcgggacccccgggtgctgatcctggatgaggccaccagcgccctggatgtgcagtgtgagcaggccaacggcttctgggtgggccccctgggcggcggcagcgccagcgagagtgaccccaccggcttcctgcatgacagccgccaccggctgagcagtgatgtgggcatgtttgtggccctgaccaagctgggccagccagatgctgagcagtggaacagccggctggacctgctggagaggagccggcaggccgtggatggagtgtgccgccacaactaccgcctgggcgcccccttcaccgtgggcaggaaggtgcagcctgaggtgacagtgtacccagagaggacccccctgctgcaccagcacaacctgctgcactgcagcgtgacaggcttctacccaggggacatcaagatcaagtggttcctgaatggccaggaggagagagctggggtgatgagcacaggccccatcagaaatggagactggaccttccagacagtggtgatgctggagatgaccccagagctgggccacgtgtacacctgcctggtggaccacagcagcctgctgagccctgtgtctgtggagtggagggcccagagcgagtacagctggaggaagatgctgagcggcattgctgccttcctgctgggcctgtag

SEQ ID NO: 199948 - DNA, 2532 bp, Artificial Sequence
  derived and/or modified sequence
atgcggctgcccgacctgcggccctggaccagcctgctgctggtggatgctgcactattatggctattacagggccccctcggcacactgttaccacaagggctgccaggcctttggctagagggtaccctcagactgggtgggctgtgggggctgttaaaactgaggggactcctgggttttgtcgggaccctcctcttaccactttgtctcgcgacccccttgacagtgtctctgcgggccctcgtcgctggcgccagccgggccccccccgcccgggtcgctagcgctccttggtcatggctcttggtggggtatggcgccgctgggctgtcgtggtccctgtgggcagtgctttcaccgcccggggctcaggaaaaggaacaagatcaggtgaacaataaggtgttgatgtggcggctgttaaaactttcaaggccggatctaccactgctggttgcagccttcttcttcttagttctcgctgtgctcggagagacgctgataccccattatagcgggcgcgtgatcgatatcctgggaggggactttgaccctcacgcattcgcgagcgcgattttttttatgtgtctgttttcctttggctccagtctgagtgccggttgtagaggaggctgtttcacttataccatgagccgaataaatttgaggattcgggagcagctgtttagtagtctcctccggcaggacctggggttctttcaggagactaagacaggagagctcaactcgagactgtctagcgataccaccctcatgagcaactggttaccccttaatgctaacgttctcctgcggagccttgttaaggttgttggcctgtacggcttcatgttgtccatatccccaagacttacattgctcagtttattgcatatgccatttactatagctgcggaaaaagtgtataacacaaggcaccaggaggtgttacgcgagattcaggacgcggtggccagagctggtcaggtcgtacgggaggccgtcggtggtttgcagacagtgcgatcattcggcgcggaggagcacgaggtttgccggtacaaggaagccctcgaacaatgccgccagttgtactggcggcgggatttggaacgtgccttatacctgttggtgaggcgtgtgctgcatctaggtgttcaaatgctcatgctgtcatgtggactccagcagatgcaggatggcgagctgacccagggtagcctgcttagtttcatgatctaccaggaaagcgtcggttcttatgtacagaccctcgtgtacatttatggggacatgctgagcaacgttggggccgcagagaaggtcttctcatacatggaccgccagcccaacttaccgtctccaggcaccctggctcccacaacgctgcaaggtgtggttaagttccaggatgtgtcctttgcataccccaaccggcctgataggcccgtgctgaagggcctcacattcactctgaggcctggcgaagtgacagctttagtaggtccaaacggaagtgggaagtccaccgtggccgccttgctgcagaatctgtatcagcccactggcggccaagtgctgttggatgaaaagcctatttctcagtatgagcactgctatctacactcccaggttgtgagcgttggacaagaacctgtgctcttcagcgggagcgtgcgtaacaacatcgcctacggtctgcagagctgcgaggacgataaggtgatggcagctgctcaggccgcgcatgctgatgactttatacaggaaatggaacacggcatttataccgacgttggggaaaagggctcacagctggctgccggccagaaacaacggctggctatcgcccgcgccctggtccgggatcctcgagtgctcattctagacgaggctacatctgctctcgacgtgcagtgtgagcaggcaaacgggttctgggttggtccgttaggcggaggttccgcgtccgagtcggacccaacaggcttcctccacgacagccgccatagactctcttctgacgtagggatgttcgtcgccttgaccaagcttggccaacctgatgctgagcagtggaactcacggctggatctgctggagaggtctcgccaggcagtcgacggggtgtgcagacacaattacaggttgggtgcacccttcaccgtgggtcggaaagtgcagcctgaggtgactgtgtaccccgagcgtacccctctgctgcatcagcacaacctgctgcactgtagcgtgaccgggttttatccaggtgatattaaaattaaatggttccttaacgggcaggaagagagggcgggcgtcatgagcacggggcctattaggaacggcgactggactttccagaccgtggtcatgcttgagatgacacccgagctgggacatgtatacacatgtctggtggaccactcaagcctcctgagtcctgtgtctgttgagtggagagcgcagagcgagtactcttggaggaagatgttgtcaggtattgcagctttcctattgggcctctag

SEQ ID NO: 199949 - DNA, 2532 bp, Artificial Sequence
  derived and/or modified sequence
atgcggcttcccgaccttaggccatggacatctctgttgctggtcgatgccgcactgctctggctgctccagggccctctcggaaccctgctgccccagggactgcccggtttatggctcgaaggcaccttgcgcttaggtgggctctggggcctgctgaaactccggggacttctggggtttgttgggacactgctgctcccactctgtttggctacccctcttaccgtgtcccttcgcgctctggtggcaggtgcttcaagggctcctcctgcccgagtcgcctccgccccttggtcttggcttcttgtcggctacggagctgctggactatcttggagtttgtgggccgtgttgtcccctccaggcgcacaggagaaagagcaggaccaagtgaataacaaagtgcttatgtggcgtctcctgaagctgagccgaccagacctgcccctgttagtcgccgcattctttttcctggtgttggcagtgttgggggagacactgatcccgcattactctggcagagtgatcgatattctgggtggcgactttgacccccatgcctttgccagcgcgattttttttatgtgcctgttttcgttcgggtccagcctgagcgccggatgtcgcggtggctgttttacctataccatgagtagaatcaatcttaggattcgggaacaactgtttagctctcttcttaggcaagatctcggttttttccaggagactaaaactggggagttaaacagcagacttagctccgacacaacattgatgtcaaactggctgccactaaacgccaacgttctcctgaggtccctggttaaggtggtcggactgtacggtttcatgctgtccatctccccaagacttacattgctcagcctgctgcacatgcccttcaccatagcggctgagaaggtgtacaacacacgccatcaggaggttctgagagagattcaggacgccgtggccagggctggtcaggtcgttcgggaagccgtgggcggactgcagaccgttagatcatttggcgcagaagaacatgaagtctgcagatacaaggaggctctcgaacaatgtaggcaactatattggcggcgagatctggaacgggcactctatcttctcgttcggagggtgctgcacctgggtgtccaaatgctgatgctttcttgtggtcttcagcagatgcaagatggcgagttaacacaaggctctctcctgtcatttatgatctaccaggagagcgtgggaagttatgtgcagacccttgtgtacatatatggtgacatgctgtccaatgttggtgccgcagaaaaggtgttctcatacatggatagacaaccaaatctgccatctcctggtactctagcacccaccaccctgcagggcgtggtgaaatttcaggatgtgagcttcgcatatcctaataggccggatagacctgtgctcaagggactcactttcactttgcgtcctggggaagtgaccgctctggtgggcccaaacggaagtgggaagtccacggttgccgcacttctccagaatttgtaccagcccaccggtggtcaggtgctgctcgatgagaagcccatcagccagtatgaacactgctacctgcattcccaggtcgtgagcgtcggccaggagccagtgctgttttctggcagcgtccgaaacaacattgcgtatggcctccagagctgcgaggatgataaagtgatggccgctgcgcaggccgctcacgccgatgactttatccaagagatggagcacggcatatatactgatgttggtgaaaagggatcacagttggccgcagggcagaagcaacgactggctatagccagggccttagtgcgagatccccgtgtgttaatcctggacgaggcaaccagcgcgctggatgtgcaatgtgaacaggccaatggcttttgggttgggccactaggagggggaagcgcaagcgagagcgatccaacaggattcttacacgattctcgacatcgattatccagtgatgtagggatgtttgtggccttgacaaagctcggccagccagatgcagaacagtggaacagccgactcgacctcctggagaggagcaggcaggctgtcgacggcgtttgtaggcacaattatcggctgggagcccctttcaccgtgggacggaaggtccaacccgaggtgaccgtgtaccctgagcgtacaccattactacaccagcataacctgttgcattgctctgtgactggattttatcccggtgacatcaagataaagtggttcctaaatggccaggaggaacgggcaggggtgatgtcgactggccctatacgaaacggggattggacgtttcaaaccgtggttatgcttgagatgacgcctgaactggggcatgtgtatacatgcctggttgatcacagttctctgctctcgccggtcagtgtcgagtggcgggctcagtctgagtacagctggcgcaagatgctgtcagggattgctgccttcttgttgggcttatag

SEQ ID NO: 199950 - DNA, 2705 bp, Artificial Sequence
  derived and/or modified sequence
gaatgaaggccttggctggggaagcgaaagcgaaagctgcccgagccctgacgcccgccctggccgagcgtagctggcggaccagagccggtagcgaggttgggagagacggagcggacctcagcgctgaagcagaagtccccggagctgcggtctccccgccgcggctgagccatgcggctccctgacctgagaccctggacctccctgctgctggtggacgcggctttactgtggctgcttcagggccctctggggactttgcttcctcaagggctgccaggactatggctggaggggaccctgcggctgggagggctgtgggggctgctaaagctaagagggctgctgggatttgtggggacactgctgctcccgctctgtctggccacccccctgactgtctccctgagagccctggtcgcgggggcctcacgtgctcccccagccagagtcgcttcagccccttggagctggctgctggtggggtacggggctgcggggctcagctggtcactgtgggctgttctgagccctcctggagcccaggagaaggagcaggaccaggtgaacaacaaagtcttgatgtggaggctgctgaagctctccaggccggacctgcctctcctcgttgccgccttcttcttccttgtccttgctgttttgggtgagacattaatccctcactattctggtcgtgtgattgacatcctgggaggtgattttgacccccatgcctttgccagtgccatcttcttcatgtgcctcttctcctttggcagctcactgtctgcaggctgccgaggaggctgcttcacctacaccatgtctcgaatcaacttgcggatccgggagcagcttttctcctccctgctgcgccaggacctcggtttcttccaggagactaagacaggggagctgaactcacggctgagctcggataccaccctgatgagtaactggcttcctttaaatgccaatgtgctcttgcgaagcctggtgaaagtggtggggctgtatggcttcatgctcagcatatcgcctcgactcaccctcctttctctgctgcacatgcccttcacaatagcagcggagaaggtgtacaacacccgccatcaggaagtgcttcgggagatccaggatgcagtggccagggcggggcaggtggtgcgggaagccgttggagggctgcagaccgttcgcagttttggggccgaggagcatgaagtctgtcgctataaagaggcccttgaacaatgtcggcagctgtattggcggagagacctggaacgcgccttgtacctgctcgtaaggagggtgctgcacttgggggtgcagatgctgatgctgagctgtgggctgcagcagatgcaggatggggagctcacccagggcagcctgctttcctttatgatctaccaggagagcgtggggagctatgtgcagaccctggtatacatatatggggatatgctcagcaacgtgggagctgcagagaaggttttctcctacatggaccgacagccaaatctgccttcacctggcacgcttgcccccaccactctgcagggggttgtgaaattccaagacgtctcctttgcatatcccaatcgccctgacaggcctgtgctcaaggggctgacgtttaccctacgtcctggtgaggtgacggcgctggtgggacccaatgggtctgggaagagcacagtggctgccctgctgcagaatctgtaccagcccacagggggacaggtgctgctggatgaaaagcccatctcacagtatgaacactgctacctgcacagccaggtggtttcagttgggcaggagcctgtgctgttctccggttctgtgaggaacaacattgcttatgggctgcagagctgcgaagatgataaggtgatggcggctgcccaggctgcccacgcagatgacttcatccaggaaatggagcatggaatatacacagatgtaggggagaagggaagccagctggctgcgggacagaaacaacgtctggccattgcccgggcccttgtacgagacccgcgggtcctcatcctggatgaggctactagtgccctagatgtgcagtgcgagcaggccaatgggttctgggtgggtcccctgggtggtggctctgctagtgaatctgacccgactggattcctccatgactcaaggcacagactctccagtgatgtggggatgtttgtggcattgaccaagctggggcagccagatgctgagcagtggaacagccggctggatctcttggagaggagcagacaggccgtggatggggtctgtagacacaactacaggctgggcgcacccttcactgtggggagaaaagtgcaaccagaggtgacagtgtacccagagaggaccccactcctgcaccagcataatctgctgcactgctctgtgacaggcttctatccaggggatatcaagatcaagtggttcctgaatgggcaggaggagagagctggggtcatgtccactggccctatcaggaatggagactggacctttcagactgtggtgatgctagaaatgactcctgaacttggacatgtctacacctgccttgtcgatcactccagcctgctgagccctgtttctgtggagtggagagctcagtctgaatattcttggagaaagatgctgagtggcattgcagccttcctacttgggctaat

SEQ ID NO: 199951 - DNA, 1962 bp, Artificial Sequence
  derived and/or modified sequence
atgagactgcccgacctgagaccctggaccagcctgctgctggtggacgccgccctgctgtggctgctgcagggccccctgggcaccctgctgccccagggcctgcccggcctgtggctggagggcaccctgagactgggcggcctgtggggcctgctgaagctgagaggcctgctgggcttcgtgggcaccctgctgctgcccctgtgcctggccacccccctgaccgtgagcctgagagccctggtggccggcgccagcagagccccccccgccagagtggccagcgccccctggagctggctgctggtgggctacggcgccgccggcctgagctggagcctgtgggccgtgctgagcccccccggcgcccaggagaaggagcaggaccaggtgaacaacaaggtgctgatgtggagactgctgaagctgagcagacccgacctgcccctgctggtggccgccttcttcttcctggtgctggccgtgctgggcgagaccctgatcccccactacagcggcagagtgatcgacatcctgggcggcgacttcgacccccacgccttcgccagcgccatcttcttcatgtgcctgttcagcttcggcagcagcctgagcgccggctgcagaggcggctgcttcacctacaccatgagcagaatcaacctgagaatcagagagcagctgttcagcagcctgctgagacaggacctgggcttcttccaggagaccaagaccggcgagctgaacagcagactgagcagcgacaccaccctgatgagcaactggctgcccctgaacgccaacgtgctgctgagaagcctggtgaaggtggtgggcctgtacggcttcatgctgagcatcagccccagactgaccctgctgagcctgctgcacatgcccttcaccatcgccgccgagaaggtgtacaacaccagacaccaggaggtgctgagagagatccaggacgccgtggccagagccggccaggtggtgagagaggccgtgggcggcctgcagaccgtgagaagcttcggcgccgaggagcacgaggtgtgcagatacaaggaggccctggagcagtgcagacagctgtactggagaagagacctggagagagccctgtacctgctggtgagaagagtgctgcacctgggcgtgcagatgctgatgctgagctgcggcctgcagcagatgcaggacggcgagctgacccagggcagcctgctgagcttcatgatctaccaggagagcgtgggcagctacgtgcagaccctggtgtacatctacggcgacatgctgagcaacgtgggcgccgccgagaaggtgttcagctacatggacagacagcccaacctgcccagccccggcaccctggcccccaccaccctgcagggcgtggtgaagttccaggacgtgagcttcgcctaccccaacagacccgacagacccgtgctgaagggcctgaccttcaccctgagacccggcgaggtgaccgccctggtgggccccaacggcagcggcaagagcaccgtggccgccctgctgcagaacctgtaccagcccaccggcggccaggtgctgctggacgagaagcccatcagccagtacgagcactgctacctgcacagccaggtggtgagcgtgggccaggagcccgtgctgttcagcggcagcgtgagaaacaacatcgcctacggcctgcagagctgcgaggacgacaaggtgatggccgccgcccaggccgcccacgccgacgacttcatccaggagatggagcacggcatctacaccgacgtgggcgagaagggcagccagctggccgccggccagaagcagagactggccatcgccagagccctggtgagagaccccagagtgctgatcctggacgaggccaccagcgccctggacgtgcagtgcgagcaggccaagaccctgtggaagttcatgatcttctag

SEQ ID NO: 199952 - DNA, 1962 bp, Artificial Sequence
  derived and/or modified sequence
atgagactgcccgacctgagaccctggaccagcctgctgctggtggacgccgccctgctgtggctgctgcagggccccctgggcaccctgctgccccagggcctgcccggcctgtggctggagggcaccctgagactgggcggcctgtggggcctgctgaagctgagaggcctgctgggcttcgtgggcaccctgctgctgcccctgtgcctggccacccccctgaccgtgagcctgagagccctggtggccggcgccagcagagccccccccgccagagtggccagcgccccctggagctggctgctggtgggctacggcgccgccggcctgagctggagcctgtgggccgtgctgagcccccccggcgcccaggagaaggagcaggaccaggtgaacaacaaggtgctgatgtggagactgctgaagctgagcagacccgacctgcccctgctggtggccgccttcttcttcctggtgctggccgtgctgggcgagaccctgatcccccactacagcggcagagtgatcgacatcctgggcggcgacttcgacccccacgccttcgccagcgccatcttcttcatgtgcctgttcagcttcggcagcagcctgagcgccggctgcagaggcggctgcttcacctacaccatgagcagaatcaacctgagaatcagagagcagctgttcagcagcctgctgagacaggacctgggcttcttccaggagaccaagaccggcgagctgaacagcagactgagcagcgacaccaccctgatgagcaactggctgcccctgaacgccaacgtgctgctgagaagcctggtgaaggtggtgggcctgtacggcttcatgctgagcatcagccccagactgaccctgctgagcctgctgcacatgcccttcaccatcgccgccgagaaggtgtacaacaccagacaccaggaggtgctgagagagatccaggacgccgtggccagagccggccaggtggtgagagaggccgtgggcggcctgcagaccgtgagaagcttcggcgccgaggagcacgaggtgtgcagatacaaggaggccctggagcagtgcagacagctgtactggagaagagacctggagagagccctgtacctgctgatcagaagagtgctgcacctgggcgtgcagatgctgatgctgagctgcggcctgcagcagatgcaggacggcgagctgacccagggcagcctgctgagcttcatgatctaccaggagagcgtgggcagctacgtgcagaccctggtgtacatctacggcgacatgctgagcaacgtgggcgccgccgagaaggtgttcagctacatggacagacagcccaacctgcccagccccggcaccctggcccccaccaccctgcagggcgtggtgaagttccaggacgtgagcttcgcctaccccaacagacccgacagacccgtgctgaagggcctgaccttcaccctgagacccggcgaggtgaccgccctggtgggccccaacggcagcggcaagagcaccgtggccgccctgctgcagaacctgtaccagcccaccggcggccaggtgctgctggacgagaagcccatcagccagtacgagcactgctacctgcacagccaggtggtgagcgtgggccaggagcccgtgctgttcagcggcagcgtgagaaacaacatcacctacggcctgcagagctgcgaggacgacaaggtgatggccgccgcccaggccgcccacgccgacgacttcatccaggagatggagcacggcatctacaccgacgtgggcgagaagggcagccagctggccgccggccagaagcagagactggccatcgccagagccctggtgagagaccccagagtgctgatcctggacgaggccaccagcgccctggacgtgcagtgcgagcaggccaagaccctgtggaagttcatgatcttctag

SEQ ID NO: 199953 - DNA, 2310 bp, Artificial Sequence
  derived and/or modified sequence
atgagactgcccgacctgagaccctggaccagcctgctgctggtggacgccgccctgctgtggctgctgcagggccccctgggcaccctgctgccccagggcctgcccggcctgtggctggagggcaccctgagactgggcggcctgtggggcctgctgaagctgagaggcctgctgggcttcgtgggcaccctgctgctgcccctgtgcctggccacccccctgaccgtgagcctgagagccctggtggccggcgccagcagagccccccccgccagagtggccagcgccccctggagctggctgctggtgggctacggcgccgccggcctgagctggagcctgtgggccgtgctgagcccccccggcgcccaggagaaggagcaggaccaggtgaacaacaaggtgctgatgtggagactgctgaagctgagcagacccgacctgcccctgctggtggccgccttcttcttcctggtgctggccgtgctgggcgagaccctgatcccccactacagcggcagagtgatcgacatcctgggcggcgacttcgacccccacgccttcgccagcgccatcttcttcatgtgcctgttcagcttcggcagcagcctgagcgccggctgcagaggcggctgcttcacctacaccatgagcagaatcaacctgagaatcagagagcagctgttcagcagcctgctgagacaggacctgggcttcttccaggagaccaagaccggcgagctgaacagcagactgagcagcgacaccaccctgatgagcaactggctgcccctgaacgccaacgtgctgctgagaagcctggtgaaggtggtgggcctgtacggcttcatgctgagcatcagccccagactgaccctgctgagcctgctgcacatgcccttcaccatcgccgccgagaaggtgtacaacaccagacaccaggaggtgctgagagagatccaggacgccgtggccagagccggccaggtggtgagagaggccgtgggcggcctgcagaccgtgagaagcttcggcgccgaggagcacgaggtgtgcagatacaaggaggccctggagcagtgcagacagctgtactggagaagagacctggagagagccctgtacctgctggtgagaagagtgctgcacctgggcgtgcagatgctgatgctgagctgcggcctgcagcagatgcaggacggcgagctgacccagggcagcctgctgagcttcatgatctaccaggagagcgtgggcagctacgtgcagaccctggtgtacatctacggcgacatgctgagcaacgtgggcgccgccgagaaggtgttcagctacatggacagacagcccaacctgcccagccccggcaccctggcccccaccaccctgcagggcgtggtgaagttccaggacgtgagcttcgcctaccccaacagacccgacagacccgtgctgaagggcctgaccttcaccctgagacccggcgaggtgaccgccctggtgggccccaacggcagcggcaagagcaccgtggccgccctgctgcagaacctgtaccagcccaccggcggccaggtgctgctggacgagaagcccatcagccagtacgagcactgctacctgcacagccaggtggtgagcgtgggccaggagcccgtgctgttcagcggcagcgtgagaaacaacatcgcctacggcctgcagagctgcgaggacgacaaggtgatggccgccgcccaggccgcccacgccgacgacttcatccaggagatggagcacggcatctacaccgacgtgggcgagaagggcagccagctggccgccggccagaagcagagactggccatcgccagagccctggtgagagaccccagagtgctgatcctggacgaggccaccagcgccctggacgtgcagtgcgagcaggccaacggcttctgggtgggccccctgggcggcggcagcgccagcgagagcgaccccaccggcttcctgcacgacagcagacacagactgagcagcgacgtgggcatgttcgtggccctgaccaagctgggccagcccgacgccgagcagtggaacagcagactggacctgctggagagaagcagacaggccgtggacggcgtgtgcagacacaactacagactgggcgcccccttcaccgtgggcagaaaggtgcagcccgaggtgaccgtgtaccccgagagaacccccctgctgcaccagcacaacctgctgcactgcagcgtgaccggcttctaccccggcgacatcaagatcaagtggttcctgaacggccagtag

SEQ ID NO: 199954 - DNA, 2310 bp, Artificial Sequence
  derived and/or modified sequence
atgagactgcccgacctgagaccctggaccagcctgctgctggtggacgccgccctgctgtggctgctgcagggccccctgggcaccctgctgccccagggcctgcccggcctgtggctggagggcaccctgagactgggcggcctgtggggcctgctgaagctgagaggcctgctgggcttcgtgggcaccctgctgctgcccctgtgcctggccacccccctgaccgtgagcctgagagccctggtggccggcgccagcagagccccccccgccagagtggccagcgccccctggagctggctgctggtgggctacggcgccgccggcctgagctggagcctgtgggccgtgctgagcccccccggcgcccaggagaaggagcaggaccaggtgaacaacaaggtgctgatgtggagactgctgaagctgagcagacccgacctgcccctgctggtggccgccttcttcttcctggtgctggccgtgctgggcgagaccctgatcccccactacagcggcagagtgatcgacatcctgggcggcgacttcgacccccacgccttcgccagcgccatcttcttcatgtgcctgttcagcttcggcagcagcctgagcgccggctgcagaggcggctgcttcacctacaccatgagcagaatcaacctgagaatcagagagcagctgttcagcagcctgctgagacaggacctgggcttcttccaggagaccaagaccggcgagctgaacagcagactgagcagcgacaccaccctgatgagcaactggctgcccctgaacgccaacgtgctgctgagaagcctggtgaaggtggtgggcctgtacggcttcatgctgagcatcagccccagactgaccctgctgagcctgctgcacatgcccttcaccatcgccgccgagaaggtgtacaacaccagacaccaggaggtgctgagagagatccaggacgccgtggccagagccggccaggtggtgagagaggccgtgggcggcctgcagaccgtgagaagcttcggcgccgaggagcacgaggtgtgcagatacaaggaggccctggagcagtgcagacagctgtactggagaagagacctggagagagccctgtacctgctgatcagaagagtgctgcacctgggcgtgcagatgctgatgctgagctgcggcctgcagcagatgcaggacggcgagctgacccagggcagcctgctgagcttcatgatctaccaggagagcgtgggcagctacgtgcagaccctggtgtacatctacggcgacatgctgagcaacgtgggcgccgccgagaaggtgttcagctacatggacagacagcccaacctgcccagccccggcaccctggcccccaccaccctgcagggcgtggtgaagttccaggacgtgagcttcgcctaccccaacagacccgacagacccgtgctgaagggcctgaccttcaccctgagacccggcgaggtgaccgccctggtgggccccaacggcagcggcaagagcaccgtggccgccctgctgcagaacctgtaccagcccaccggcggccaggtgctgctggacgagaagcccatcagccagtacgagcactgctacctgcacagccaggtggtgagcgtgggccaggagcccgtgctgttcagcggcagcgtgagaaacaacatcacctacggcctgcagagctgcgaggacgacaaggtgatggccgccgcccaggccgcccacgccgacgacttcatccaggagatggagcacggcatctacaccgacgtgggcgagaagggcagccagctggccgccggccagaagcagagactggccatcgccagagccctggtgagagaccccagagtgctgatcctggacgaggccaccagcgccctggacgtgcagtgcgagcaggccaacggcttctgggtgggccccctgggcggcggcagcgccagcgagagcgaccccaccggcttcctgcacgacagcagacacagactgagcagcgacgtgggcatgttcgtggccctgaccaagctgggccagcccgacgccgagcagtggaacagcagactggacctgctggagagaagcagacaggccgtggacggcgtgtgcagacacaactacagactgggcgcccccttcaccgtgggcagaaaggtgcagcccgaggtgaccgtgtaccccgagagaacccccctgctgcaccagcacaacctgctgcactgcagcgtgaccggcttctaccccggcgacatcaagatcaagtggttcctgaacggccagtag

SEQ ID NO: 199955 - DNA, 1962 bp, Artificial Sequence
  derived and/or modified sequence
atgcgcttgcctgacctgcgaccttggacatccttacttctggtggatgctgcactactctggctcctgcagggcccattgggcaccctattgccacaggggctcccgggcctctggttagagggaacccttaggctaggagggctctggggactgctgaaactccgaggactgctggggtttgttggcactttgttgttgccactgtgcctggcaacaccattaaccgtgtccctcagagcattagttgcaggcgcttctagggccccccctgcacgggtagccagtgccccatggagctggttgctggtagggtacggcgccgcaggactttcctggtccctctgggctgttctcagtcctccaggggcccaggaaaaagagcaggaccaggtaaacaacaaggtactgatgtggcggcttctcaagctgtctcggcccgatttgcctctcctcgtcgcggcctttttctttctggtattggctgtcctcggcgagacacttataccacactactccggccgggtcatcgacatcctcgggggggatttcgacccccacgcctttgcctctgccatcttttttatgtgtttgttcagcttcggaagctccctttctgcggggtgtaggggaggctgttttacctacaccatgtccagaatcaatctgaggatccgggagcagctgttcagtagtctcctgcgacaggacctgggcttcttccaggagaccaaaaccggagagttgaatagcagactgagctcagatacaacgttgatgtctaattggttgccccttaacgccaacgtgctgctgcgctctctagtgaaggtggtaggcctgtatggattcatgctgtctattagccctcgactcactttgctctctttgcttcacatgccctttaccatcgctgccgagaaagtgtacaatactcggcaccaggaggttctccgtgaaatccaggatgctgtcgccagagccggccaggtagtgcgggaagccgttggcggcctacagactgtgagatcttttggagccgaagaacatgaggtctgccgatacaaggaggcactcgagcaatgcaggcagctatattggcgcagagatctagagcgggctctgtatctccttgtaagaagagtactccatctgggggtgcagatgttgatgttgtcctgtggtctgcaacaaatgcaggacggtgaactgacgcaagggtcactgctgtccttcatgatctatcaggagtccgtgggcagttacgtgcagacgctggtgtatatttacggagatatgctgtctaacgtaggtgctgccgaaaaggtgtttagctatatggacagacaacccaatctcccaagcccgggtacccttgccccgaccaccctccagggagtggtcaagtttcaggatgtgagctttgcctatcccaaccgccccgatcgccctgtgctaaaagggcttacctttaccctgaggccaggcgaggtaaccgcgcttgtcggacccaacgggagtggcaaatccaccgtagccgctctgctccagaatctctaccagcccaccggcggccaagtattgctggacgaaaaacctatttcccagtatgagcactgttacctgcacagccaggtcgtttctgtcggccaagaacctgtgctgtttagcgggtccgtgaggaataatattgcttacggtctgcaatcctgcgaagacgacaaggtgatggcggcagctcaagccgctcatgccgacgattttatacaagagatggaacacggcatttataccgatgtaggagaaaagggaagtcagcttgcagctggacagaagcagaggttggcgatcgcccgtgccttagtgcgggaccctcgcgtactgatactcgacgaggcaacctctgcccttgacgtccagtgcgagcaggccaagactctgtggaaattcatgatattttag

SEQ ID NO: 199956 - DNA, 1962 bp, Artificial Sequence
  derived and/or modified sequence
atgaggctcccagacttacgaccgtggaccagtctcctgctcgtggacgccgccctattgtggctcctgcagggcccactcggaacattgctgccacaggggctccccggcctttggctcgaaggaaccttgcggctgggaggcctgtggggactgcttaaactgcgagggctgctggggtttgtgggaacgctgctgctccctttgtgtttggccacgccactcacagtgagcctgcgcgcgttagtcgctggcgcttcccgtgccccgcctgcccgtgtagcatctgcaccttggtcctggctcctggttggttacggtgccgctggtctcagctggagcctgtgggcggtgctgagcccgcccggagctcaggagaaagagcaggatcaagttaacaataaagtgctcatgtggaggctgctgaagctgtctaggccagatctccccctgctcgtggcagcctttttctttcttgtactggctgtgttaggcgagactctgattccccactactctgggcgggtgatcgacatcctcgggggtgatttcgacccgcatgcattcgcttctgccatcttcttcatgtgtctgttctcattcggcagttcgttgtccgcaggttgtcgcggaggctgtttcacatataccatgtcacgcatcaacctgagaatccgggaacagctgtttagcagcctgttgcggcaggatctcggcttctttcaggaaaccaaaactggtgagcttaattctagactgagtagtgataccactcttatgtccaattggctccctctaaatgcgaacgtgctgctccggtccttagtgaaagtagtggggctctatggattcatgctttctatttctccacgcctcactctgctttccttgcttcatatgccttttaccattgcggctgagaaagtctataatacccgtcatcaggaggtgctgagagagattcaggacgctgtggctcgcgccggccaggtcgttagggaagccgtagggggtctgcagacagttcggtcctttggagccgaggaacatgaagtctgccgatacaaagaagccttggagcagtgccgccagttgtattggcggagagacctggaaagagccttatacttactggtccgccgggtcctccacctgggggtgcagatgcttatgttgagctgtggcctgcagcaaatgcaggacggagagcttacgcagggtagtcttctttcttttatgatctaccaggagtccgttggttcatacgtgcaaacgttggtgtacatttacggagacatgctatctaacgtgggggcggccgaaaaagtcttctcttacatggatagacagcccaacctccccagcccaggcaccctggctcccaccacattgcagggtgtcgttaaattccaggatgtgagtttcgcctacccaaatcgccccgacaggcccgtgctgaaggggctcaccttcacccttaggccgggggaagtcaccgctcttgtgggccctaacggctcgggcaaatcgactgtcgccgccctcttacaaaacttataccagcctaccggtgggcaagtgctcctggatgaaaagccaatctcccagtatgaacactgctatttgcatagccaggtggtctccgtcgggcaggagccggtcttgtttagtgggtctgtccgtaataacattgcatacggcctccagagttgtgaagatgataaggtgatggctgcagctcaggcagcccacgcggacgacttcatccaagagatggagcacggcatttacactgacgtgggcgaaaagggttcccagttagcggctgggcagaagcagaggctggccattgctagggcccttgtgcgagatcccagagtcttgatattggacgaagctacatcagccctggacgtacaatgcgagcaggccaagacactctggaagttcatgattttctag

SEQ ID NO: 199957 - DNA, 1962 bp, Artificial Sequence
  derived and/or modified sequence
atgcggctcccagacctgcgcccatggacctccctgttgcttgttgacgcagcgctgttgtggctgttgcagggcccactgggtacgttgctccctcaaggactccctgggctctggcttgaggggaccttaagactgggggggttgtggggcctgctcaagctgcgtggactcttaggattcgtcgggacactgttgctccccctctgcttagcgacacccctcacagtgtccctgcgggctctcgtggccggggcttcccgggctcctcccgcccgcgtggccagcgcaccatggagctggctgctggtcggatacggcgcagccggcctctcatggtctctgtgggcagtattgtcaccaccaggtgcacaagagaaagagcaggaccaggtcaacaacaaggtactgatgtggagattgcttaagctttcccgacccgatttaccattgctggttgccgccttctttttccttgtgttggcagttctgggggaaacattgatccctcactactcaggacgagtaatcgacatccttggaggcgattttgatccacacgccttcgcaagtgccatctttttcatgtgtctgttttcattcggcagttcgctgagtgccggctgccggggtgggtgcttcacctacacaatgtctcgtataaacctgcgtatcagggagcaactgttcagcagcctgctgcgccaggatctgggcttttttcaggagacaaagaccggcgagctgaattccagactaagttccgataccactcttatgtccaattggctgcctctgaatgctaatgtcctcctgcggagccttgtaaaggtcgtggggctgtacggttttatgttatctatctcccctcgcctcaccctgttatcactcttgcatatgcccttcaccatagcagcagagaaggtctataacacccggcaccaggaagtcctgagggagattcaggatgcagtggcccgggcaggccaggtggtgcgcgaagccgtgggagggcttcagactgttcgaagttttggagccgaggaacatgaggtgtgtcggtacaaggaggctctggagcagtgccggcagctttattggcgacgggacctagaacgggctttatacctgctggtacgccgtgtgttgcaccttggcgtgcagatgctaatgctttcttgtggccttcagcagatgcaagacggagagctgacccagggctccctgttatcctttatgatttaccaggaaagcgtcggctcctatgtgcaaaccctggtgtatatttatggtgacatgctgagcaacgtgggagctgcggaaaaggtattcagctacatggacagacaaccaaatctgccatcaccaggaaccctcgcccccaccacactgcaaggcgtagtgaaatttcaagatgtttcctttgcctatcccaacaggccagaccgccccgtgctcaagggcttaacgtttaccctcagaccgggcgaagtcacagccctagtgggacccaacggatctggcaagagtacagtagcagccctgctccaaaatttataccagcctaccggtgggcaggtgttactggatgagaaacctatcagtcagtacgaacactgttatctgcattcgcaggtcgtgtctgtgggccaggaacccgtcctttttagcggcagtgtgaggaacaacattgcttacggcttgcagagctgtgaggatgataaggttatggcagctgctcaagcagcgcatgccgatgattttatccaggagatggagcacggcatatacaccgatgtgggggagaaaggctcccagttggctgcaggtcagaaacagaggctggcaattgcacgcgcactggtgagggatcctagggttctgatcctggacgaagccacatctgcccttgacgttcagtgcgagcaggccaagacactgtggaagtttatgattttttag

SEQ ID NO: 199958 - DNA, 1962 bp, Artificial Sequence
  derived and/or modified sequence
atgcggttacctgatttgcggccttggacatctcttctgctggtcgatgccgctctgctctggttactccagggacctttaggcacgctgctccctcaggggttgccaggcctgtggctagaagggactcttcggctcgggggcttgtggggcctgctgaagctgaggggcctactggggttcgtgggcaccctgctgcttccactgtgcttagccacacccctgacagtgtccctgagggctctcgttgccggcgctagccgcgcaccacccgctcgggtcgcgtccgccccctggtcttggctgttagtgggatacggagcggcagggctgagttggtccctctgggctgtcctgagtcctccaggcgcccaggaaaaggagcaagaccaggtcaataacaaggtcttaatgtggcggctattaaagctctctaggcccgacttacctctcttggtggctgcatttttctttctcgtgctggccgtgctgggcgagacactgattccccactattccgggcgggtgatcgatattctcggcggtgatttcgatccccatgcgttcgcctctgctattttttttatgtgtctcttctcctttggatccagcctttcagcaggctgcagagggggctgttttacatacaccatgtcccggataaatctgagaatcagagaacagctcttctcttccctgcttcgccaagatctcggtttctttcaagagaccaaaaccggggaactcaactccagattgagcagtgatacaacactaatgtccaactggctccccctcaatgcaaatgtgttattgcggagcctcgtgaaagtcgtgggcctgtacggctttatgttaagcatatcgccacggttgacattactgagcttgctccatatgcccttcacgatagccgctgagaaggtgtacaatacacgccaccaggaggtgctcagggagatccaggatgctgtggcgcgtgcaggccaggtcgtcagagaagcagtgggcggactccagacagtacgaagctttggggctgaagaacacgaggtatgcaggtacaaggaagctctagagcagtgcagacagctgtactggcgtcgggacttagagagagctctctacctgctggtgagacgcgtgctccatctgggggtgcagatgctgatgctctcttgcggattgcagcagatgcaggatggtgagctgacgcagggtagcctgttgagcttcatgatctatcaagaatccgttggaagttatgtccaaacattagtatatatttacggagacatgttgagcaatgtaggcgccgcggagaaagtcttctcgtacatggaccgccaacccaatctcccatcacccgggacgctcgcaccaaccaccctacagggtgttgtcaaattccaagacgtgagtttcgcatatcccaatagaccggaccgcccggtactgaaggggctgacgttcaccctcaggccaggcgaggtgaccgcgctggtaggtcccaatggaagcggtaaatccaccgtggctgcacttctccagaacctgtaccagcctaccggtggtcaggtgctcttggacgagaagccaatcagccagtatgagcattgttacctgcattcacaagtggtctctgtaggacaggaacccgtgctgttcagcggctctgtgcggaataatattgcctacggcctgcagtcgtgtgaggacgacaaagtaatggctgccgcacaggctgcacacgctgacgacttcatccaggagatggagcatggaatatataccgacgtcggggaaaagggatcccaactggccgcgggtcagaagcagcgactggcaattgcccgagctttggtccgcgatccgagagtactaatcttggatgaggcaacaagcgcgctcgacgtccaatgtgagcaggccaaaaccctgtggaagttcatgatcttctag

SEQ ID NO: 199959 - DNA, 1962 bp, Artificial Sequence
  derived and/or modified sequence
atgcgactgcccgatctgcggccatggactagccttctgctggttgacgcagccctgttgtggttgcttcagggtcctcttgggaccctgctgccccagggcctcccaggcctgtggctggagggtacacttcggttgggtggactttggggcttacttaagctgcgcggattgcttggcttcgttggcaccctgctcctccccctttgtcttgctaccccgctgacagtgagcttgcgggctctggtggctggtgccagccgggccccgcccgccagagtggcctcagcaccctggagctggctacttgtaggctacggcgcagctggtctttcgtggtccttgtgggcagtcctcagcccacccggtgcacaagagaaggaacaggaccaagtgaacaataaagtgctcatgtggcgtctgttgaagttaagtagaccggacttacccctgctggttgctgcattctttttcctggtcctcgccgtgcttggagagaccctcattccccattactcgggacgggtcatagatatcctaggcggtgacttcgacccccacgcatttgcctccgcaattttttttatgtgtctcttttcattcggatcgagcttgtcagccggctgtaggggggggtgctttacgtatacgatgagtcgtataaacctacgcattcgagagcaactgtttagctctttgttacgtcaagacctcgggtttttccaggagacgaagaccggtgaactcaattccaggctgtctagcgataccacgcttatgagtaactggctgccgctgaacgcaaatgtgttgcttagaagcctggtgaaggtggttggcctttacggttttatgctgtctatcagccctcggttgactctgttgagtctgctccatatgcctttcacaatagctgccgagaaggtgtataacacacggcaccaggaagttctaagagagattcaggacgccgtcgcccgtgcgggacaggtcgttcgagaggctgtgggaggtctgcaaacggtgcgcagctttggcgctgaagaacacgaagtatgcaggtataaggaagcgctggagcagtgcaggcagctctattggcgccgggatttggagcgggcactgtatttgctggtgcgccgcgtcctccatctgggagttcagatgttgatgctaagttgtggcctgcagcagatgcaggacggcgagctcacccagggatcacttcttagcttcatgatctaccaggaaagcgtcggttcctatgtgcaaacattggtgtacatctacggtgacatgctatcgaatgttggcgcagccgagaaagtgttttcctatatggacaggcagccaaatctcccttcccccggaaccctcgctcccaccacactccagggcgtcgtaaagtttcaggatgtgtctttcgcctaccccaatcggccagaccgacctgttcttaagggtttgaccttcacactacgcccgggtgaagtcaccgctctggtaggacctaacggctctggtaaatctacagtggctgctcttctccagaacttatatcagccaactggggggcaggtccttcttgatgagaaacccatttcccaatatgagcattgctatctccattcccaggtggtgagtgttggccaggagccggttctattcagcggctctgtgcgcaataacatcgcctatgggttacaatcatgcgaggatgataaggtaatggcagccgctcaggcagcccacgctgacgattttatccaggaaatggaacacggtatttataccgatgtcggcgagaaggggagccagctggccgccggccagaaacagcgcctagccattgcccgggctttggtaagggaccctcgtgtgctgatactcgacgaagctacatcagcgctggacgttcagtgtgagcaggccaaaacactgtggaagttcatgattttctag

SEQ ID NO: 199960 - DNA, 1962 bp, Artificial Sequence
  derived and/or modified sequence
atgaggcttcccgacctccggccatggactagtttactgctggtggacgcggctcttctgtggctgttgcaaggtcctctgggcaccctgttaccccagggcttgcctggactttggctggagggtaccctgaggcttggtggcctttggggcctgctcaagctgagagggctcctagggtttgtggggacactccttctccctctctgcctggctacccccctgactgtttccctccgcgccctggtggcaggcgcttctagagccccccctgcccgagttgcatctgccccttggagctggctccttgtaggatacggagccgcaggcttgtcttggagcctctgggcagttttaagccccccgggcgcgcaggagaaagagcaggatcaggtaaacaacaaagtgttaatgtggcgactactcaagttgagtagacccgatctgccactgctggtagcagctttcttctttctggtcctggctgttttgggtgagacacttatcccgcactattcagggagagtgattgacatcctcggcggagattttgacccccacgcatttgcatcagcaatttttttcatgtgcctgttctcctttggatctagcctttccgcaggctgccggggcgggtgctttacttacacaatgagccggattaacctgaggattcgcgaacaacttttctcaagcttgcttagacaggatttgggcttcttccaggaaaccaaaacgggggagcttaacagtcggctcagctctgatacaactctcatgtcaaactggctccccttgaatgctaacgtcctgcttagaagtcttgtgaaggtggtgggactttacggcttcatgctatctatatccccaaggctcaccctccttagcctgctccacatgcctttcactattgccgctgaaaaagtgtacaacacccgtcaccaggaggttttacgagagatacaggatgctgtggcaagggccggacaggtggtcagggaagccgtcggtggcctgcagaccgttagaagcttcggggcagaggaacacgaagtttgtcgctacaaagaagctctagaacagtgtcgccagctgtattggcgcagagacctggagcgcgccctgtacctattggtgcggcgcgttctgcatcttggcgtgcagatgctgatgttatcatgcgggctacagcagatgcaggacggagagctcacccaagggagcctcctcagctttatgatttatcaagaatccgtgggctcttatgtgcaaacacttgtgtacatttatggtgacatgctgtctaatgttggtgcagccgaaaaggtattctcatacatggaccgacagcccaaccttccctctcccggcaccttagcgccaaccaccctccagggagttgttaagtttcaggatgtttcctttgcttatcccaatcggcctgaccggccggtgttaaagggactgacattcaccctgcggcccggagaagttacagcgctcgtgggaccaaacgggtcgggcaagagcaccgtcgccgccctcctccaaaacctttaccaacccaccgggggtcaggtgcttcttgacgagaagcccatttctcagtatgaacattgttacctgcattctcaggttgtgagcgtcggccaggaaccggtgctgttctccggttcagtgaggaacaacatcgcatacggtttgcaatcttgtgaggacgacaaggtcatggccgcagcccaagcagcacatgcagacgacttcattcaggagatggagcacggaatttacaccgatgtgggcgagaagggctcacagctcgcggccgggcaaaagcaacgccttgccattgctagagcattggtcagggaccctcgagtgttgattctcgacgaggcaacatctgctctggacgttcagtgtgagcaggctaaaacattatggaaattcatgattttctag

SEQ ID NO: 199961 - DNA, 1962 bp, Artificial Sequence
  derived and/or modified sequence
atgaggctgcccgatctgaggccctggacatcactgctcttggtggacgccgcacttctgtggctccttcagggccccttagggaccttgcttcctcaaggcttgccagggctgtggctggagggcactctgagactgggggggttatggggcctcttaaaactgcgcgggctgcttggattcgtgggtaccctgctgttgcctttgtgtctggctaccccactgacagtgtcgctgagggcccttgtggctggcgcttctagggcgccaccagcacgcgtagcatccgccccctggtcctggctgctggtggggtacggggccgcaggtctctcttggagtttgtgggccgtcctaagcccgcccggtgctcaggagaaagaacaagaccaagtgaataataaagttttgatgtggcgcctgctgaaactcagtcggcccgatctccccctgctggtcgccgcctttttttttcttgtgctggccgttctcggcgagactttgatcccgcactattcaggcagagtgatagacattttgggcggcgattttgatccccatgcattcgcatccgccattttcttcatgtgcttgtttagctttggcagctcactgtccgccggttgtcgcggggggtgcttcacatatacgatgagccgcataaatctccgaatccgggagcagctgttctcaagtctgctgagacaagatctgggcttcttccaggaaaccaaaacgggagaactgaattccaggctctcgtccgataccacactgatgtctaattggttaccactgaacgcaaatgtgctgctaagaagcttagtgaaggtggtggggctgtacgggttcatgcttagtataagcccgcgtttgactttgctgagcctgcttcatatgccgttcacaatcgctgccgagaaggtctacaacacgcgccaccaggaagttctgcgggaaatccaggacgcggtcgcgcgagctggacaggttgttagagaggctgttgggggcctgcagaccgtgcgcagttttggagccgaagagcacgaggtttgtcggtacaaagaggccctggaacagtgcagacagctgtactggcgcagagacctcgaacgtgctctatacctattgatcaggcgcgtgctgcacctcggggtccagatgctgatgctgagctgtggactccagcagatgcaagacggggaacttacccagggaagccttttgagttttatgatttaccaggaaagtgtggggtcctacgtccagaccctggtctacatctacggcgacatgctaagtaacgtgggtgccgctgagaaggtcttcagttacatggatcgacaaccaaacttaccctctcctgggacattagcaccaactactctccagggagtggtgaaatttcaggatgttagctttgcctatcccaatagaccggatagacccgtgttgaagggcctcacatttacactgcggccaggggaagtgaccgcactggtggggccgaacggatctggcaaatctacagtggcagctctcttacaaaacttgtatcagcccacaggcggccaggtgctgctcgacgaaaaacccatctcacaatatgagcattgttatcttcacagccaggtagtgtccgtcggtcaggagcccgtcctgttctcagggtctgtgcggaataatattacatatggtcttcagtcatgcgaagacgataaagtgatggccgccgcgcaggctgctcatgccgacgacttcatacaggagatggagcatgggatttacacagacgttggcgaaaagggttctcagctggctgctggtcagaagcagaggttagccatagcaagagccttagtgagagatccgcgggtgctcatactggacgaagcaactagtgctttagatgtccagtgtgagcaagccaagacactctggaaattcatgatcttctag

SEQ ID NO: 199962 - DNA, 1962 bp, Artificial Sequence
  derived and/or modified sequence
atgagattgcccgatttacgtccctggaccagcctgctgctggtggatgctgccctgctttggctgttgcaggggcccttaggaactcttctacctcagggcctgcctggattatggttggagggcacacttaggctgggaggcctttggggccttctgaagctccggggactcctggggttcgtcggaaccctgttactgcctctatgtctggcgacaccacttacagtctctctgagagccctggttgcaggggcaagccgcgccccgcccgctagagtcgcatccgcgccctggtcctggctcctcgttggatacggggccgccgggctgtcttggtcactttgggccgtattatctccacctggggcccaagaaaaagagcaggaccaggtgaacaataaagtcctgatgtggagactgctaaagctcagccgacccgatctgccactgctggtcgctgcatttttttttttggtgctggccgtcttaggagagaccctgatcccacactatagcggtcgggtcattgatattctgggaggcgactttgacccccacgcttttgcatcagccatcttctttatgtgtttgttttcttttggcagttctctttccgccggctgcagagggggctgtttcacgtatactatgagtcgcatcaatctgcgaatccgagaacaacttttcagcagtctgctaagacaagatcttgggttctttcaggaaaccaagactggggagctgaactctcgcctctcgtctgatactaccctcatgagtaactggctgcccctgaacgcaaacgtgttgctgaggtcattggtaaaagtggtcgggctttacggttttatgctctcgatttccccgcgcctgacgctcttgtcactgcttcatatgccattcacaattgcagctgaaaaggtctacaatacgaggcaccaggaggtgctgagagagatccaggacgccgtggcgagggctggccaggttgtgcgggaggctgtcggtggcctgcagactgtccgaagttttggcgccgaggaacacgaggtttgcaggtataaggaagctctcgagcagtgtaggcagctctactggcgacgcgacctagaacgcgcactgtatctcctggtgaggagggtgctgcacctaggtgttcagatgctgatgctgtcctgcggactccagcagatgcaggacggagaactcacccagggctctctgctgagctttatgatctatcaggagtccgtgggaagttacgtgcagacgctggtgtacatctacggggatatgctctctaatgtcggcgctgcagagaaagtgttctcctatatggaccgccaacctaatctgccctcacccggcaccctggctcctactactctgcaaggcgtcgtgaagttccaggacgttagcttcgcttatcctaataggcccgaccgcccggtactgaagggattaacattcaccctgagacccggcgaggtgacagctctggtgggaccgaatggctccggtaaatccaccgttgcagctttactgcagaacttatatcagccaactggtggccaggtgctgctcgatgaaaagcctattagtcaatacgaacattgttacttacactcccaagtggttagtgtggggcaggagcctgtgttattcagtggctccgtcagaaacaatatagcttacggtctgcaaagttgcgaggacgacaaagttatggccgccgcgcaggcagcccatgccgacgactttatccaggaaatggagcacggtatctatacagacgtgggggagaaaggatctcagctggccgccgggcaaaagcaacgtctggctatagccagagccctggttcgtgatccgcgcgttctgatcctagatgaggcgacgtctgcactggacgtgcaatgcgaacaggccaagaccctttggaagttcatgatattttag

SEQ ID NO: 199963 - DNA, 2310 bp, Artificial Sequence
  derived and/or modified sequence
atgagactaccggatctgcgcccctggactagcctgttactggtggacgctgccctactgtggctgttgcaaggcccattgggaaccctgcttccccagggtctgcctggcctttggttggagggcaccctgcgcctcggtggtctgtggggacttcttaagctgaggggcctccttggctttgtaggtaccctgctgcttcctctgtgcctggctactccacttacagtgtcattgcgcgcacttgtcgctggtgcctcgcgcgccccacctgcccgagtggcctccgccccatggagctggctgcttgtgggatacggagctgctggtttgtcttggagcctatgggccgtgttgtctccccctggtgctcaggaaaaagaacaggatcaggtgaataacaaggtgctgatgtggcgcctgctgaagctgagccgcccagacctccccctactggtggcagcctttttttttctcgtcctcgccgtactcggggagactttaatccctcactactccgggcgtgtcattgatattctgggtggggactttgatccacacgcctttgcctcagcaatcttcttcatgtgtctctttagctttggatcatctctgagcgcgggctgccgaggcggatgttttacatacactatgagccggattaacctgaggatacgggagcagttattctcctcgctactccggcaggacctgggattctttcaagagactaagactggcgaactaaactcgagactgagctcagacactactctgatgtctaactggctccccttaaatgcaaacgtactgctccggagcctggtgaaggtcgtaggcttgtatggatttatgctgtctatcagtccccgactcacactgctgtcactgttgcatatgccattcacgatagctgcagaaaaagtctataatacgagacaccaggaggtgctgcgagaaatccaggatgctgttgcccgtgcagggcaggtggtgcgtgaggctgtaggtggcctgcagacagtcagaagctttggggccgaagagcatgaggtctgtcggtacaaggaggccctcgaacagtgtcggcagttgtactggcgtagagacctggaacgagccctatatctgttagtgcggcgcgtgttgcacttgggagtacaaatgctaatgctctcatgcggtctgcagcagatgcaggatggcgaattgacccagggttcacttcttagcttcatgatttatcaagaaagcgttggatcatacgtgcagacgctggtttacatctatggagatatgctcagcaatgtgggagcggccgagaaggtcttttcctacatggatcgccagccaaatttgcccagccccggcacactagcccccacaacgctgcaaggtgtggtgaagtttcaggacgtgagcttcgcatatcccaaccggcccgaccgaccagtgctgaaaggcctgacattcacgttgaggcccggcgaagtcactgcactcgtagggcccaatggctcagggaagtctactgtggccgccctgcttcagaatctgtatcagcccactgggggtcaggtactgctcgatgaaaagccaataagccagtacgaacattgttatttacattctcaggtggtctctgttggccaggaaccagtcctgttcagcggcagtgtgaggaacaatattgcgtatggactgcagtcatgcgaagatgacaaggtaatggctgctgcacaagccgctcacgccgacgacttcattcaggaaatggagcatgggatttacacggacgtaggcgagaaggggtctcaactcgccgccggacagaagcaaagactcgctattgccagagctctggttagggaccccagggtgcttatcctggacgaggctactagcgccctggatgttcagtgcgagcaggcgaatggcttctgggttgggccactcggcggcggctcagctagtgagtccgatccaacagggtttttgcatgacagccgacatcggctctcttctgatgttggaatgttcgttgctctcacaaaattgggccagcctgatgcggaacaatggaactcacgcctggatttactcgagagaagcagacaggcagtggatggcgtgtgtcggcacaattaccgtctgggcgcaccattcaccgtgggcagaaaggttcagccagaggtcactgtctaccccgagagaactccactgctccaccagcacaatctactgcactgctctgtcaccggattctaccccggcgatatcaagattaagtggttccttaatggccagtag

SEQ ID NO: 199964 - DNA, 2310 bp, Artificial Sequence
  derived and/or modified sequence
atgcgactccccgacctgagaccctggacctctctgttgttagttgacgcggccttactttggttattgcaggggccactgggtaccctgctacctcaggggcttccagggctctggctcgaagggaccctacgcttgggaggtctttggggtctgttgaaactgagaggcctgctgggctttgtcggaaccttgctcctgccgctatgtttagccacacccctaactgtgtccctcagagctctggttgccggcgcgtctagagctcccccagctcgtgtggcgtcagcaccctggagctggctcctcgtcggctatggggccgccggactctcttggtctctgtgggccgtcctgagtcctccaggcgcccaggagaaagagcaggaccaggtaaacaacaaggtcctgatgtggagattgctcaagttgtcaagaccagatctgcctctgctggtagccgcctttttctttctcgtgttagcagtactcggcgaaacactaataccacactattccgggcgggtaattgacatcctcggcggcgactttgacccgcacgcatttgcttccgcaatcttctttatgtgtctgttcagcttcggatcatctctgagcgcgggatgtcgcggtggatgttttacctataccatgtctagaatcaacttaaggatcagggagcagctgtttagtagtctgctgcggcaggacttgggcttttttcaggagacaaagaccggcgaactcaattcccggctgtctagtgatacgacattgatgagcaactggctaccattaaatgcaaacgtcctactgagatcgttggtgaaggtggtcggactttacggctttatgctgagcatctctcccagacttactctgctgagtctgctgcatatgccattcaccatcgccgccgagaaggtgtataatactcggcatcaggaggtcctaagagagattcaggatgccgtggcccgtgcaggacaggtcgtacgggaggcagtgggagggttacagacggtcaggtctttcggggctgaagagcacgaagtgtgtagatataaggaagccctggagcaatgccgccagctttactggagacgggatctcgagagagccctctacctgctcgtccgacgggtgctacaccttggagttcagatgcttatgctcagttgtggactgcagcagatgcaggacggcgaattgacccagggctcactactgagctttatgatttaccaggagagtgtgggtagctacgtccagactttagtttacatctacggagatatgctgtcaaacgtaggagccgccgagaaggtcttctcctacatggaccgccaacctaacctgccttccccaggaaccttagcacccaccacactgcaaggggtggtaaagttccaagatgtgagctttgcctacccaaacaggcctgataggcccgtattgaagggtctaacctttactcttagaccaggcgaggttaccgctctggtgggaccaaacgggtcaggtaagagtaccgtggcggccctccttcagaatctgtaccagccaactggaggccaggttctcctcgatgagaagccaatttcacagtacgaacactgctatctccactcccaggtggtgagtgtgggccaggagccggtgctgttcagcggcagtgttaggaataatattgcttacgggctgcagtcatgcgaagatgataaggtaatggctgcagcccaggcagcgcatgccgatgacttcatccaggaaatggaacacggtatctataccgatgttggcgagaagggaagccagttagctgccgggcagaagcagcgcctcgccattgcgcgtgctcttgtccgggatccccgcgtgctgattctagatgaagcgacctctgccttggacgtacagtgcgagcaggctaatggtttctgggttgggcccttaggtggcggcagcgcctcggagtcagaccccaccggatttttacatgatagtcgccaccgactgtcttcggatgtggggatgttcgtcgccttgaccaaattgggccagcccgacgccgaacagtggaatagccgccttgacctgctggaacgctcccgtcaagccgtggatggggtatgccgccataattatcgcttaggggcacccttcaccgtaggccgcaaggtgcagcctgaggttacagtttatccagaacgcacccctctgctacaccagcacaatcttctgcattgttctgtgacgggtttttaccctggagatatcaagattaaatggttccttaatggacagtag

SEQ ID NO: 199965 - DNA, 2310 bp, Artificial Sequence
  derived and/or modified sequence
atgagacttccagatctgagaccatggacctccttgctccttgtcgatgcagcacttctttggctactgcagggaccgctcggcactctgttgccacaggggctgcccggcctgtggctggaaggcacactgaggttgggtggcttgtggggccttttaaagctgagagggctgttgggattcgtcggaaccctcctcctgccgctttgtttagccacgccactcacagtgagtctccgcgctctcgtggctggcgcaagtcgagctccaccagctcgtgtagctagcgcaccatggagttggttgctggtaggttacggagcagcagggttgtcctggtcactctgggctgtcctcagccctcccggggcccaagagaaggagcaggaccaggtcaataataaagttttgatgtggcgcctgctgaagctcagccgtccagacctgcctttactcgtggctgccttttttttcctagttttggccgtccttggcgagacattgattccacattactctggcagggtgattgatatactcggcggggatttcgacccacatgcattcgcaagcgccattttcttcatgtgtttgttctctttcggcagctcactgtcagccggatgtagggggggatgctttacgtatacaatgagccgcattaatttaaggattagagagcaactgttttcatcactcctgcgacaagacctcggcttcttccaagagactaaaacaggggagctgaacagtcgactctcctctgataccaccctgatgagtaattggcttcccttgaacgccaacgtgctcctccgctcactcgtaaaggtcgtgggtctgtacggcttcatgttgtcgatctccccacggctgactttgctgagtcttcttcacatgcctttcacaatcgctgcagaaaaagtttataatacacgccaccaagaagtcttacgggagatccaagatgccgtggcaagagccggccaagttgtcagagaggccgtcgggggcctgcagaccgtcaggtcttttggtgcggaggagcatgaggtatgtcggtacaaggaagctcttgagcaatgcagacagctctattggaggagggatctggagcgtgccctatacttgctggtgagaagggttctgcatctcggcgtccagatgctcatgctctcgtgtgggctgcagcagatgcaggatggggagttgacgcagggctctttactcagcttcatgatttaccaagagtccgtcggatcttacgtacagaccctggtctacatctatggcgatatgctgagtaatgtgggagcagctgagaaagtgttttcttacatggatcggcagccgaacctcccttcacccgggacactggcaccaaccactctgcagggtgttgtaaagtttcaggacgtatcattcgcctaccccaatcgcccagacaggcccgtgctgaagggactgaccttcacattacgcccaggagaggtgacagccctggtggggcccaatgggagcgggaaatcgacagttgccgcactgttacagaatctttaccagcctacaggggggcaggtgctcctggacgagaagcccatttcgcagtacgaacattgttatctgcacagccaagttgtatctgtagggcaggaacccgtgctctttagtggaagtgttcggaacaacatcgcatacggactgcagtcttgcgaagacgataaggtcatggccgctgcgcaagcggctcatgccgatgactttatccaggagatggagcatggaatatacacagatgtgggggaaaaggggtcgcagctggcagccggacaaaagcagcgattggccatagctagggccctcgtgagggacccccgtgtgcttatactcgatgaggctaccagtgcactggacgtgcagtgcgagcaggctaatggattctgggtcgggcccctgggaggtggctccgctagcgaaagtgaccccaccgggtttttgcacgattctcgtcatcgactgtcttcagatgtcggcatgtttgtcgccctgactaaacttggacagcctgatgcagaacagtggaactcaagactggacctcctggagcggtccaggcaagccgttgacggcgtttgccgccacaactaccggctgggtgccccattcaccgtcggaaggaaagtacagcccgaggtcaccgtctatccagagaggactcctttgttacaccagcacaacctgctgcactgcagtgttacaggcttctatcccggtgacattaaaatcaagtggtttctgaatgggcagtag

SEQ ID NO: 199966 - DNA, 2310 bp, Artificial Sequence
  derived and/or modified sequence
atgagactccctgatctgcgcccttggaccagcttactcctggtcgatgcagccctgctgtggctgcttcagggaccactcgggacattattgccccagggactgccagggctgtggctggagggaaccctgaggctgggcggcctctggggtttgctcaagctgcgcggcctgttgggcttcgtagggaccctgctgctgccactgtgcctagccacccccctgaccgtgtctcttcgcgctctcgtggccggcgcgtctagagcccctcctgcacgggttgcgtcagctccctggagttggctgctggtcggatacggtgccgccggcctatcttggtcgctgtgggctgtcctttcaccccctggagctcaggagaaggaacaggaccaggtcaataataaagtcctgatgtggcgtctgctgaagttgtctcgccccgatctgccgctgctggttgccgccttctttttcctggttctggccgttctcggggaaaccctgataccgcactattctgggcgagttatcgacatcctgggaggagatttcgacccccacgctttcgccagtgccattttttttatgtgtctgttctcattcggctcaagcctgtctgcaggatgccggggaggctgttttacatacaccatgagcagaatcaacttaagaatcagagagcagttgttctccagcctgttgaggcaggatcttgggttctttcaggagaccaagaccggcgaacttaatagcagactgtcatccgacaccacattgatgtctaattggctgcctcttaatgcgaacgtactgctgcggtcgttagtgaaggtcgtcggtctctacggattcatgctttctatctccccaaggctcacactcctgtctctactgcatatgcctttcaccattgccgccgagaaggtgtacaatactcggcaccaggaggttctgagagaaattcaagatgccgtcgcacgtgctgggcaggtcgtccgcgaggccgtagggggccttcaaaccgtccgcagctttggggctgaagaacacgaggtgtgtcgatataaggaagctcttgagcagtgccgtcagctgtactggaggagggaccttgaacgggcgctttacctgcttattcgacgggtgctgcaccttggcgtgcagatgcttatgctgagttgtgggcttcagcagatgcaggatggcgaactcacccaaggctcactgctgagctttatgatttatcaagagagtgtgggctcttatgtgcagactctcgtttatatttatggcgacatgttgagcaacgtcggagccgctgagaaggtgtttagttatatggaccgacagcccaacctcccttcccccggtaccctggcaccgaccaccctgcagggcgtggtcaaattccaggacgtatccttcgcctacccaaaccggcccgaccgccctgtcttgaagggtctgaccttcaccttgcgaccaggcgaggttacagcactggtgggccccaacggctctggcaaaagcactgttgcggcgctacttcagaatctgtatcaaccaacaggcggccaggtcctcctggatgagaaaccaatcagccagtacgagcattgctatttacacagtcaggtagtctccgtgggccaagagccagtactgttttcagggtctgtgcgcaataacattacctatggattgcagtcgtgtgaagacgataaagtgatggctgcagctcaagctgctcacgcagatgatttcatccaggaaatggaacatggtatatataccgatgtcggagagaagggttcacagctcgcagccggccagaaacagcgtctcgctattgctcgagccttagtgcgagatcctagagtgctgatcttagatgaagccacttcagccctcgatgttcagtgtgagcaggctaacggtttttgggtcggtcctcttggcggcggcagcgctagtgagagcgaccctaccggattcctccatgacagcagacataggctttcctctgacgtgggtatgttcgtcgcactgaccaagcttgggcagccagacgcggagcaatggaactcaagactggacctcctggagcggtcccggcaggccgtcgatggagtgtgtaggcacaactacagattgggcgcacccttcacggtgggccgtaaggtccagccggaggtgacagtctaccccgagagaacgcctctattgcaccagcataatttgttacactgttccgtgactggcttctatccaggtgatattaaaataaaatggttcctgaacggacagtag

SEQ ID NO: 199967 - DNA, 2310 bp, Artificial Sequence
  derived and/or modified sequence
atgaggctccccgacctgagaccttggacatctttattgctggttgatgcggcattgctctggctgctgcagggtccactgggtacactgctacctcaggggctgcccggattgtggcttgaagggaccctcagactgggcggtttgtggggcctgctgaagctgaggggcctgctcggcttcgtcgggaccctgctcttacccctctgcttagccacccccctaactgtgtccctaagagccctggttgccggcgcaagtcgcgccccccccgcccgtgtggcctccgccccttggtcttggctgctcgtggggtatggcgccgctggattatcatggagcttgtgggcggttttgtctccaccaggcgcgcaagagaaagaacaggatcaggtgaacaacaaagtgctcatgtggcgcctcctaaagctgtctagaccagatctacccctcctggtggcagcgtttttctttctggtacttgcagttttaggggagacgctcatccctcattattctggacgcgtgattgacatactagggggcgacttcgacccgcacgccttcgccagcgccatcttctttatgtgtctcttttcgttcggcagctctttgtccgccggatgtcggggaggctgttttacctatacaatgagtagaatcaacctccgaatccgggagcagctgttctcttctctgctgagacaggatctcggcttcttccaggaaactaaaactggggagctaaatagccgcctgtccagtgatactaccctgatgagcaactggctgcccctaaacgcaaacgtcctgcttagaagtctggtcaaggtagtcgggctgtacggattcatgctgagcatttcccccaggctcactctcttgagtcttctgcatatgccctttacgattgcagcggaaaaggtgtataacacgcgccaccaggaagtactgcgggagattcaggatgccgtagccagagcgggacaggtagtgagagaggccgtgggcgggctccagacagtgcgctcctttggggcagaagagcatgaggtatgcaggtataaagaagcacttgagcagtgccgccagctgtactggcgcagggacctggaaagggctctgtacctgctggtgcgcagggtcctgcatttgggggtgcagatgctgatgctctcatgcggcctgcagcagatgcaagacggcgagttgactcaaggatctctactgtcattcatgatctatcaggaatcggtgggctcctacgtgcagaccctggtgtatatatacggggacatgctctctaatgtcggggcggctgaaaaggtgttctcatatatggaccgccagccaaatctcccaagccctgggacactcgcccccacaacactacaaggggttgtgaagtttcaagacgtgtctttcgcgtatccaaatagaccggataggcccgtcctcaaaggtctgacctttacactgcgcccaggcgaagtgaccgcgctggtggggcccaacggctcagggaagagtacggtagcggccctcctgcaaaacctataccagccaacaggaggtcaggtactactggatgaaaagccgatatcccagtatgaacactgctatctacacagtcaagtcgtatcagtgggacaggagcctgtattattttcagggtctgttcgcaataacatagcctatggtctgcagtcctgcgaggatgataaagttatggcagccgcccaggcagcccatgctgacgatttcatacaggaaatggaacatggaatttacacggatgttggtgaaaagggttctcaactcgcagccggccagaagcaaaggctcgcaatcgccagagcgctagtcagagatcctcgcgtgctaatcttggatgaagccacttcagctctggatgtgcagtgcgaacaggcaaatggcttttgggtcggcccccttggaggcggtagcgcatctgagtcagaccccacaggctttttgcatgattctagacatagactgtcttctgatgtcggcatgttcgttgctctgacaaaactgggtcagcctgacgccgaacagtggaacagccgacttgacttgcttgaacgcagccgccaagcagtggatggagtatgtaggcacaattacaggctgggcgcgccgtttacagtgggtcggaaagtgcagcctgaggttaccgtctatccagagaggacaccactgctccatcagcacaacctgctgcattgtagcgtgaccgggttctaccctggggacatcaagatcaaatggtttctgaacggacagtag

SEQ ID NO: 199968 - DNA, 2310 bp, Artificial Sequence
  derived and/or modified sequence
atgcgcctccctgacttgaggccgtggaccagcctcctgctcgtggacgctgcattactctggctgctgcagggccccctggggacgctccttcctcagggtctgcctggactctggttggaggggacattaagactcggaggcctgtgggggctgctaaagctgcgaggcctgcttggttttgtcggtactctcctgttacctctctgcttagcaactccattgactgttagtttgcgcgcactcgtggccggagccagccgggctcccccagcaagagtggcaagcgccccttggagctggctgctggtgggctatggggccgccgggctgtcttggtccctctgggcagtgctctctccacctggcgcgcaggaaaaggagcaagaccaagttaacaataaggtgctgatgtggagactcctaaagctgagccgacctgacctaccactcttggtggctgcatttttctttctagtgctcgcggttctcggcgaaacccttatcccacactacagcggtagggttatcgatatactgggcggagactttgatcctcacgcttttgcaagcgccatcttcttcatgtgtcttttctcatttggctcttcactgtctgcgggttgtagaggaggctgcttcacatacacaatgagccggatcaatctccggatacgtgagcagttgtttagctccctcctgcggcaagatctaggatttttccaggaaactaaaaccggagaactgaacagcaggctgtcgagcgacaccacactgatgtcaaactggttgcctctcaatgcaaacgtgctcctgcgatccttagtgaaagtcgtgggcttgtacgggtttatgctcagcatctccccgcgtctcacactgttgtccctcttgcacatgccattcaccatcgcggcagaaaaagtgtacaatacaagacaccaagaagtgttgcgggaaattcaggatgccgtggcacgagccgggcaagtggttcgtgaagccgtgggagggctgcaaacggtaaggtcctttggagcggaggagcatgaagtctgtcgatacaaggaagcccttgaacagtgcaggcaactatactggaggcgagacctggaaagggcgctttacctgctggtcaggagagtgctgcatctaggggtgcagatgctcatgttaagctgtgggctccaacaaatgcaggatggggagctcacccagggcagcctcctatcctttatgatttatcaagaatccgtggggtcatacgtgcagacgcttgtttatatctacggggacatgctgagtaacgtgggcgcagcagagaaggtcttttcttacatggataggcagccaaatttgccctcccctggtacactcgcccccaccaccctacagggagtggtgaagttccaggatgttagcttcgcttaccctaacaggcctgacagacctgtgttgaagggcctcaccttcactttgcggccaggtgaggttacagccctcgtgggccctaacggaagtggaaaaagcactgttgctgcattgctgcagaatctctaccagccaactgggggacaagtgctactcgatgagaaacccatctcccaatatgagcattgttatttgcacagtcaggtggtcagtgtcggccaagagcccgtcttgttcagtggctctgtcaggaacaacatcgcctatggcttgcaatcttgcgaggatgacaaggtgatggccgccgcccaggccgcccacgctgatgacttcattcaagaaatggaacacggcatctatacagacgtgggcgaaaagggctcacagttggccgctggacaaaagcagaggctcgccattgcgagagctctggtgagagatcccagagtgttgattttggacgaggctacgtctgctctcgacgtgcaatgcgaacaggctaatggattctgggtcggccccttgggcgggggcagcgcctcagagtccgatcccaccggattcctgcacgactctaggcatagactgtcttctgacgtgggcatgttcgttgctctaaccaagctcggccagccggatgccgagcaatggaattcccggttagacctgctggaacgaagtcgtcaagcggtggacggagtgtgccggcataactatcgtctgggggcaccctttacagtggggagaaaggtacaacctgaggtcacagtctaccccgagagaaccccacttctgcatcaacacaacctgctgcattgttccgttaccggtttctaccctggtgacatcaaaatcaagtggttcctgaacggacagtag

SEQ ID NO: 199969 - DNA, 1962 bp, Artificial Sequence
  derived and/or modified sequence
atgaggctgcctgacctgcggccctggaccagcctgctgctggtggatgctgccctgctgtggctgctgcagggccccctgggcaccctgctgccccagggcctgcccggcctgtggctggagggcaccctgcggctgggcggcctgtggggcctgctgaagctgcggggcctgctgggctttgtgggcaccctgctgctgcccctgtgcctggccacccccctgactgtgtccctgcgggccctggtggccggggccagccgggcccccccagcccgggtggccagcgccccctggagctggctgctggtgggctacggggctgctggcctgtcctggagcctgtgggccgtgctgagccccccaggggcccaggagaaggagcaggaccaggtgaacaacaaggtgctgatgtggaggctgctgaagctgagcaggccagacctgcccctgctggtggccgccttcttcttcctggtgctggccgtgctgggggagaccctcatcccccactacagcggccgggtgattgacatcctgggcggggactttgacccccacgcctttgccagcgccatcttcttcatgtgcctcttctcctttggcagcagcctgtctgctggctgccggggcggctgcttcacctacaccatgagccgcatcaacctgcgcatccgggagcagctgttcagcagcctgctgcggcaggacctgggcttcttccaggagaccaagacaggagagctgaacagccggctgagcagtgacaccaccctgatgagcaactggctgcccctgaatgccaacgtgctgctgcggagcctggtgaaggtggtgggcctgtatggcttcatgctgagcatcagcccccggctgaccctgctgagcctgctgcacatgcccttcaccatcgctgctgagaaggtgtacaacaccaggcaccaggaggtgctgcgggagatccaggatgctgtggcccgggccggccaggtggtgcgggaggccgtgggcggcctgcagacagtgcgcagctttggagctgaggagcacgaggtgtgccgctacaaggaggccctggagcagtgccggcagctgtactggaggcgggacctggagcgggccctgtacctgctggtgcggcgggtgctgcacctgggcgtgcagatgctgatgctgagctgtggcctgcagcagatgcaggatggagagctgacccagggcagcctgctgtccttcatgatctaccaggagagcgtgggcagctatgtgcagaccctggtgtacatctacggggacatgctgagcaatgtgggcgctgctgagaaggtgttctcctacatggaccggcagcccaacctgcccagccctggcaccctggcccccaccaccctgcagggcgtggtgaagttccaggatgtgtcctttgcctaccccaacagaccagacaggcctgtgctgaagggcctgaccttcaccctgcggcctggagaggtgacagccctggtgggccccaatggaagtggcaagagcacagtggccgccctgctgcagaacctgtaccagcccactggaggccaggtgctgctggatgagaagcccatcagccagtatgagcactgctacctgcacagccaggtggtgtctgtgggccaggagcctgtgctcttcagcggctctgtgaggaacaacatcgcctacggcctgcagagctgtgaagatgacaaggtgatggctgctgcccaggccgcccatgctgatgacttcatccaggagatggagcacggcatctacacagatgtgggggagaagggcagccagctggccgccggccagaagcagaggctggccatcgcccgggccctggtgcgggacccccgggtgctgatcctggatgaggccaccagcgccctggatgtgcagtgtgagcaggccaagaccctgtggaagttcatgatcttctag

SEQ ID NO: 199970 - DNA, 1962 bp, Artificial Sequence
  derived and/or modified sequence
atgaggctgcctgacctgcggccctggaccagcctgctgctggtggatgctgccctgctgtggctgctgcagggccccctgggcaccctgctgccccagggcctgcccggcctgtggctggagggcaccctgcggctgggcggcctgtggggcctgctgaagctgcggggcctgctgggctttgtgggcaccctgctgctgcccctgtgcctggccacccccctgactgtgtccctgcgggccctggtggccggggccagccgggcccccccagcccgggtggccagcgccccctggagctggctgctggtgggctacggggctgctggcctgtcctggagcctgtgggccgtgctgagccccccaggggcccaggagaaggagcaggaccaggtgaacaacaaggtgctgatgtggaggctgctgaagctgagcaggccagacctgcccctgctggtggccgccttcttcttcctggtgctggccgtgctgggggagaccctcatcccccactacagcggccgggtgattgacatcctgggcggggactttgacccccacgcctttgccagcgccatcttcttcatgtgcctcttctcctttggcagcagcctgtctgctggctgccggggcggctgcttcacctacaccatgagccgcatcaacctgcgcatccgggagcagctgttcagcagcctgctgcggcaggacctgggcttcttccaggagaccaagacaggagagctgaacagccggctgagcagtgacaccaccctgatgagcaactggctgcccctgaatgccaacgtgctgctgcggagcctggtgaaggtggtgggcctgtatggcttcatgctgagcatcagcccccggctgaccctgctgagcctgctgcacatgcccttcaccatcgctgctgagaaggtgtacaacaccaggcaccaggaggtgctgcgggagatccaggatgctgtggcccgggccggccaggtggtgcgggaggccgtgggcggcctgcagacagtgcgcagctttggagctgaggagcacgaggtgtgccgctacaaggaggccctggagcagtgccggcagctgtactggaggcgggacctggagcgggccctgtacctgctgatccggcgggtgctgcacctgggcgtgcagatgctgatgctgagctgtggcctgcagcagatgcaggatggagagctgacccagggcagcctgctgtccttcatgatctaccaggagagcgtgggcagctatgtgcagaccctggtgtacatctacggggacatgctgagcaatgtgggcgctgctgagaaggtgttctcctacatggaccggcagcccaacctgcccagccctggcaccctggcccccaccaccctgcagggcgtggtgaagttccaggatgtgtcctttgcctaccccaacagaccagacaggcctgtgctgaagggcctgaccttcaccctgcggcctggagaggtgacagccctggtgggccccaatggaagtggcaagagcacagtggccgccctgctgcagaacctgtaccagcccactggaggccaggtgctgctggatgagaagcccatcagccagtatgagcactgctacctgcacagccaggtggtgtctgtgggccaggagcctgtgctcttcagcggctctgtgaggaacaacatcacctacggcctgcagagctgtgaagatgacaaggtgatggctgctgcccaggccgcccatgctgatgacttcatccaggagatggagcacggcatctacacagatgtgggggagaagggcagccagctggccgccggccagaagcagaggctggccatcgcccgggccctggtgcgggacccccgggtgctgatcctggatgaggccaccagcgccctggatgtgcagtgtgagcaggccaagaccctgtggaagttcatgatcttctag

SEQ ID NO: 199971 - DNA, 2310 bp, Artificial Sequence
  derived and/or modified sequence
atgaggctgcctgacctgcggccctggaccagcctgctgctggtggatgctgccctgctgtggctgctgcagggccccctgggcaccctgctgccccagggcctgcccggcctgtggctggagggcaccctgcggctgggcggcctgtggggcctgctgaagctgcggggcctgctgggctttgtgggcaccctgctgctgcccctgtgcctggccacccccctgactgtgtccctgcgggccctggtggccggggccagccgggcccccccagcccgggtggccagcgccccctggagctggctgctggtgggctacggggctgctggcctgtcctggagcctgtgggccgtgctgagccccccaggggcccaggagaaggagcaggaccaggtgaacaacaaggtgctgatgtggaggctgctgaagctgagcaggccagacctgcccctgctggtggccgccttcttcttcctggtgctggccgtgctgggggagaccctcatcccccactacagcggccgggtgattgacatcctgggcggggactttgacccccacgcctttgccagcgccatcttcttcatgtgcctcttctcctttggcagcagcctgtctgctggctgccggggcggctgcttcacctacaccatgagccgcatcaacctgcgcatccgggagcagctgttcagcagcctgctgcggcaggacctgggcttcttccaggagaccaagacaggagagctgaacagccggctgagcagtgacaccaccctgatgagcaactggctgcccctgaatgccaacgtgctgctgcggagcctggtgaaggtggtgggcctgtatggcttcatgctgagcatcagcccccggctgaccctgctgagcctgctgcacatgcccttcaccatcgctgctgagaaggtgtacaacaccaggcaccaggaggtgctgcgggagatccaggatgctgtggcccgggccggccaggtggtgcgggaggccgtgggcggcctgcagacagtgcgcagctttggagctgaggagcacgaggtgtgccgctacaaggaggccctggagcagtgccggcagctgtactggaggcgggacctggagcgggccctgtacctgctggtgcggcgggtgctgcacctgggcgtgcagatgctgatgctgagctgtggcctgcagcagatgcaggatggagagctgacccagggcagcctgctgtccttcatgatctaccaggagagcgtgggcagctatgtgcagaccctggtgtacatctacggggacatgctgagcaatgtgggcgctgctgagaaggtgttctcctacatggaccggcagcccaacctgcccagccctggcaccctggcccccaccaccctgcagggcgtggtgaagttccaggatgtgtcctttgcctaccccaacagaccagacaggcctgtgctgaagggcctgaccttcaccctgcggcctggagaggtgacagccctggtgggccccaatggaagtggcaagagcacagtggccgccctgctgcagaacctgtaccagcccactggaggccaggtgctgctggatgagaagcccatcagccagtatgagcactgctacctgcacagccaggtggtgtctgtgggccaggagcctgtgctcttcagcggctctgtgaggaacaacatcgcctacggcctgcagagctgtgaagatgacaaggtgatggctgctgcccaggccgcccatgctgatgacttcatccaggagatggagcacggcatctacacagatgtgggggagaagggcagccagctggccgccggccagaagcagaggctggccatcgcccgggccctggtgcgggacccccgggtgctgatcctggatgaggccaccagcgccctggatgtgcagtgtgagcaggccaacggcttctgggtgggccccctgggcggcggcagcgccagcgagagtgaccccaccggcttcctgcatgacagccgccaccggctgagcagtgatgtgggcatgtttgtggccctgaccaagctgggccagccagatgctgagcagtggaacagccggctggacctgctggagaggagccggcaggccgtggatggagtgtgccgccacaactaccgcctgggcgcccccttcaccgtgggcaggaaggtgcagcctgaggtgacagtgtacccagagaggacccccctgctgcaccagcacaacctgctgcactgcagcgtgacaggcttctacccaggggacatcaagatcaagtggttcctgaatggccagtag

SEQ ID NO: 199972 - DNA, 2310 bp, Artificial Sequence
  derived and/or modified sequence
atgaggctgcctgacctgcggccctggaccagcctgctgctggtggatgctgccctgctgtggctgctgcagggccccctgggcaccctgctgccccagggcctgcccggcctgtggctggagggcaccctgcggctgggcggcctgtggggcctgctgaagctgcggggcctgctgggctttgtgggcaccctgctgctgcccctgtgcctggccacccccctgactgtgtccctgcgggccctggtggccggggccagccgggcccccccagcccgggtggccagcgccccctggagctggctgctggtgggctacggggctgctggcctgtcctggagcctgtgggccgtgctgagccccccaggggcccaggagaaggagcaggaccaggtgaacaacaaggtgctgatgtggaggctgctgaagctgagcaggccagacctgcccctgctggtggccgccttcttcttcctggtgctggccgtgctgggggagaccctcatcccccactacagcggccgggtgattgacatcctgggcggggactttgacccccacgcctttgccagcgccatcttcttcatgtgcctcttctcctttggcagcagcctgtctgctggctgccggggcggctgcttcacctacaccatgagccgcatcaacctgcgcatccgggagcagctgttcagcagcctgctgcggcaggacctgggcttcttccaggagaccaagacaggagagctgaacagccggctgagcagtgacaccaccctgatgagcaactggctgcccctgaatgccaacgtgctgctgcggagcctggtgaaggtggtgggcctgtatggcttcatgctgagcatcagcccccggctgaccctgctgagcctgctgcacatgcccttcaccatcgctgctgagaaggtgtacaacaccaggcaccaggaggtgctgcgggagatccaggatgctgtggcccgggccggccaggtggtgcgggaggccgtgggcggcctgcagacagtgcgcagctttggagctgaggagcacgaggtgtgccgctacaaggaggccctggagcagtgccggcagctgtactggaggcgggacctggagcgggccctgtacctgctgatccggcgggtgctgcacctgggcgtgcagatgctgatgctgagctgtggcctgcagcagatgcaggatggagagctgacccagggcagcctgctgtccttcatgatctaccaggagagcgtgggcagctatgtgcagaccctggtgtacatctacggggacatgctgagcaatgtgggcgctgctgagaaggtgttctcctacatggaccggcagcccaacctgcccagccctggcaccctggcccccaccaccctgcagggcgtggtgaagttccaggatgtgtcctttgcctaccccaacagaccagacaggcctgtgctgaagggcctgaccttcaccctgcggcctggagaggtgacagccctggtgggccccaatggaagtggcaagagcacagtggccgccctgctgcagaacctgtaccagcccactggaggccaggtgctgctggatgagaagcccatcagccagtatgagcactgctacctgcacagccaggtggtgtctgtgggccaggagcctgtgctcttcagcggctctgtgaggaacaacatcacctacggcctgcagagctgtgaagatgacaaggtgatggctgctgcccaggccgcccatgctgatgacttcatccaggagatggagcacggcatctacacagatgtgggggagaagggcagccagctggccgccggccagaagcagaggctggccatcgcccgggccctggtgcgggacccccgggtgctgatcctggatgaggccaccagcgccctggatgtgcagtgtgagcaggccaacggcttctgggtgggccccctgggcggcggcagcgccagcgagagtgaccccaccggcttcctgcatgacagccgccaccggctgagcagtgatgtgggcatgtttgtggccctgaccaagctgggccagccagatgctgagcagtggaacagccggctggacctgctggagaggagccggcaggccgtggatggagtgtgccgccacaactaccgcctgggcgcccccttcaccgtgggcaggaaggtgcagcctgaggtgacagtgtacccagagaggacccccctgctgcaccagcacaacctgctgcactgcagcgtgacaggcttctacccaggggacatcaagatcaagtggttcctgaatggccagtag

SEQ ID NO: 199973 - DNA, 1962 bp, Artificial Sequence
  derived and/or modified sequence
atgcggctgcccgacctgcggccctggaccagcctgctgctggtggatgcagcactgctctggttattacagggtcctctggggacactactgccccaaggactccctggattgtggctggaagggaccctgaggctgggtggactgtggggtctgctgaagctccgcggtttgctcggttttgttggtactctgcttctgcccctgtgcctggccaccccccttactgtgagcctgcgtgccttagtggctggggcgtcacgcgcgccacccgccagggttgcatccgctccatggagctggctgctagttggctatggtgcagctggcctcagctggagtttgtgggccgtgctgagtcctccaggggcccaggaaaaggagcaagatcaggttaacaacaaagtactgatgtggcgcctcctaaaattgtctcgcccggaccttcccctgctggtggccgctttttttttcctggtccttgctgtgttgggggaaaccttaattccgcactactccgggcgcgtgattgatattctgggaggggattttgaccctcatgcatttgcctcagccatcttttttatgtgccttttctccttcggatcctcactatccgccgggtgccgaggaggttgttttacttataccatgtcgagaatcaatctcaggattagggagcaacttttctcgtcattgttaagacaggatctaggattcttccaggaaaccaagactggggaactgaattcacgactgtcttcagacacaactctaatgagcaactggctccctttgaatgccaatgtgctacttcgatccctagtgaaagtcgtaggactgtatggatttatgctttcaatttcgccccgcttgacacttttgagcctgttgcacatgccctttacgatcgccgctgagaaagtctataatactcgccaccaggaggtgctcagagaaatccaggacgctgtcgctagagcagggcaggtagtacgggaggccgtgggtggactccaaacagtgcgaagcttcggcgctgaggaacacgaggtttgtaggtataaagaggccctagagcaatgtaggcagctgtattggcgcagagatttggaacgggcgctgtatcttttggtgagacgcgtgctacaccttggggtgcagatgttaatgctgtcatgcggcctgcagcagatgcaagatggcgagctgactcaggggagcttactgtccttcatgatctaccaagaatcagtaggatcctatgttcaaacgctggtctacatctacggggacatgttgagcaacgtgggcgctgccgagaaagtattcagctatatggatagacagccaaatctaccgagcccaggcacactagccccaactaccctccagggtgtcgtcaagtttcaagatgtgtccttcgcttacccaaacaggcccgaccgcccagtgctaaaaggcctcacctttaccttgcgacccggagaggtcactgctctggttggaccgaatggaagcggcaaatccacagtggcggcactgttgcaaaatctgtatcagcccacgggtgggcaggttctactcgacgaaaaacctatctcacaatacgaacactgctatctccactcacaagtcgtgagcgtcgggcaagaaccggtgctattctcagggtccgtgaggaacaatatcgcgtacggactgcagtcttgtgaggatgacaaggttatggctgccgctcaggccgcacacgccgatgactttattcaggagatggagcatggcatctacacagacgtgggcgaaaaaggaagccagctcgcagcaggacagaaacagcgcctggcaattgccagggccctggttcgagacccccgcgtgctcatcctcgatgaggcgaccagcgcactagacgtccagtgtgagcaagcgaaaaccctttggaaattcatgatcttttag

SEQ ID NO: 199974 - DNA, 1962 bp, Artificial Sequence
  derived and/or modified sequence
atgcggctgcccgacctgcggccctggaccagcctgctgctggtggacgccgcattgctttggctgctgcaggggccacttgggacgctgctgccgcaagggttgcctggcctgtggctcgagggaacgctcagacttggtggcctgtggggcctgcttaagctcagaggacttctgggattcgtgggcactctcttgctccctctttgcctggcaactcctcttaccgtctcgctaagagcactggttgctggcgcatccagggctccccctgcacgggtggcctccgccccgtggtcctggctgctggtgggctacggggcagctgggctgagttggtcattgtgggcagtgctcagtccaccaggggctcaagagaaagagcaggatcaagtaaacaacaaggtcctcatgtggaggctgctgaaactctcacggccagaccttcctctgctggtagcggcgttcttctttctggtccttgctgtgcttggcgaaaccttaatccctcactactccggcagggttatcgacattctgggaggcgattttgatccgcacgctttcgcgtcggccattttttttatgtgcctgttttcctttgggagctctctctccgcggggtgtcgaggcggctgtttcacctatacaatgtcgcggatcaatctgcgtatacgggagcaacttttcagcagtctgcttagacaggacctgggattcttccaggagacaaagaccggagaactcaactcgcggttgagtagtgacacaaccctgatgtccaactggctcccactaaacgcaaatgtgctcctccgctcgctagtgaaggtcgtaggactgtacggatttatgttgtccatctcgcctcggttaaccctgctcagcctcctgcacatgccctttaccatcgcagctgaaaaggtgtataacactaggcaccaggaggttctgagagagatccaggacgcagtcgccagggctggtcaagtggtgcgcgaagcagttggcgggcttcagactgtgcgctccttcggagcggaggagcacgaggtctgtcggtacaaggaagcgctcgaacagtgtaggcagctgtattggagaagagatttggaacgtgcactttacctgttggtacgcagagtactccaccttggcgtgcaaatgcttatgctgtcatgcgggctgcagcaaatgcaggatggcgaactgacccagggctcgttgctgagtttcatgatctaccaggagtcggttggatcttacgtgcagaccctcgtctacatttatggagatatgctctctaacgtgggcgcagcagaaaaggtattctcatacatggaccgccagccaaacctgccgtcccctgggacattagccccaacaaccctgcagggtgttgtcaaatttcaagacgtaagctttgcctaccctaatcgacccgataggcccgttttgaagggcctgacattcaccttgagacctggggaagtgactgccctggtggggccgaacggatccggaaagtccacagtggctgcgttgttgcagaatctgtatcagccgacgggaggacaggttctcctggatgaaaagccaatttctcagtatgagcattgttacttacactcccaggtggtgtccgtcggacaggagcccgtgctgttttccggctcagtcagaaataacatagcttacggtctgcagtcttgtgaggatgacaaggtcatggctgctgcccaggcggcacatgctgacgattttatccaggaaatggagcacggaatctacaccgatgttggtgagaaagggagtcagctggccgcaggacagaaacaacgcttggccatcgccagggcactggtgcgggatcccagggtacttatcctggatgaagccacatcagcccttgatgttcaatgcgaacaggctaaaaccctgtggaagttcatgatcttctag

SEQ ID NO: 199975 - DNA, 1962 bp, Artificial Sequence
  derived and/or modified sequence
atgcggctgcccgacctgcggccctggaccagcctgctgctggtggatgccgctctgttgtggcttctgcagggaccgttgggcaccctgcttcctcaaggcctgcctggcctctggctggagggtacgctgcgtttgggcggcctgtggggactgctcaaacttcggggcctgttaggatttgttgggacacttctgctcccgctatgtctagcaaccccgctgaccgtgtcattgcgcgccttggtggctggcgcctcaagagcaccacctgcccgcgttgcttcggccccttggtcttggctcttggtgggctatggagccgccggcctgtcctggtccctgtgggcagtgttatctcctcctggcgcacaggagaaagagcaggatcaagttaacaacaaggtacttatgtggcggctgttaaagctcagcaggcccgatctgcctttgctcgttgccgccttctttttccttgtgctggcagtcctgggggagaccctcatcccccactatagcggaagggtgatcgatattctgggtggagatttcgacccccacgcattcgcatcagccatattcttcatgtgtctgtttagtttcggttcatctcttagcgctggatgccggggggggtgttttacctacactatgtcccggattaacctgagaatccgggagcagctgttctccagtctgctgaggcaggacttgggcttcttccaggaaactaagacaggagaattaaatagccgattatccagcgacactacgctgatgtccaactggctccctctgaatgcaaacgtcttgctgcgaagtttggtgaaggtggtcggcctctacgggttcatgctgagcatttcaccacgcctgaccctgcttagcttgctgcacatgcccttcacgatcgccgccgaaaaggtgtacaacacaagacatcaggaagtacttagagaaattcaggatgccgtggcacgtgcaggacaggtggtgcgcgaagccgtgggtggtttgcagactgtccgcagttttggcgctgaggagcatgaggtatgccgctacaaggaagccctagagcagtgcagacaattgtattggaggagggatttggagcgggccctttatctgctggtgcgcagggtgttgcatctgggagtgcagatgctcatgttatcatgcgggctccagcaaatgcaggacggagagctaacacaggggagtctgttatcatttatgatctaccaagaatctgttggtagctatgtgcagacacttgtctacatctatggagacatgttgtctaacgtaggggccgcagagaaagtcttctcatacatggataggcaacctaaccttcctagtccaggcacgttagcgccaaccacactgcagggtgtcgtcaaatttcaagacgttagtttcgcatatcccaatcgccccgatcggccagtgctaaaaggactgacgtttaccctacgccctggcgaggtcacggccctcgtgggtcctaatggcagtggaaagagtactgtggccgcccttctgcagaacctctatcagccgacgggagggcaggtcctgctggacgaaaagcctatatctcagtacgagcactgctacttgcactcccaggtggttagcgtgggccaggagcctgtgctattttcaggtagtgtgcgtaacaatattgcatacggcttacaatcctgcgaggacgataaagtgatggcagccgctcaggccgctcatgctgacgactttatacaggaaatggaacatggtatttataccgatgtgggcgaaaagggttcccagcttgccgccgggcagaagcagcgactcgctatcgccagagctctcgtcagggaccccagagtcctgattctcgacgaggccacttcagcactggacgtgcaatgcgagcaggcaaagaccctatggaagtttatgatcttctag

SEQ ID NO: 199976 - DNA, 1962 bp, Artificial Sequence
  derived and/or modified sequence
atgcggctgcccgacctgcggccctggaccagcctgctgctggtggacgccgccctgctgtggctcttgcaaggaccactggggacactactgccccagggactgccagggttgtggctggaaggcaccctgcggctaggcggcttgtggggcctccttaagctgcgaggcctcttaggctttgtcggtactttgctgctgccactgtgtctcgccactcctttgacagtgagcttgcgggcgctggttgcaggggcctcccgagcaccccccgctagagtggccagcgccccttggtcctggctcctggtgggatacggggctgctggccttagctggagtctatgggccgtgctctcacctcccggtgcccaagaaaaggaacaggatcaggtgaacaacaaggtactaatgtggcggctgctgaaattgtctcgacctgacctacccttattggtggcagcgtttttctttcttgttctggccgtgctaggagagactttgataccacactactccggacgcgttatcgatattttgggcggagatttcgatccccatgctttcgcctctgcgatctttttcatgtgcttgttttcctttggttcttctttaagcgctgggtgcaggggaggttgcttcacatacaccatgtcacgaattaatctgaggattagggaacagttgttctcatccctgttaagacaagatttgggtttcttccaggaaacaaaaacgggcgagctgaactcgaggctgtccagcgataccacgctcatgagtaactggttacctctgaatgctaatgtgttgttacgctcccttgtgaaggtggtggggctatacggcttcatgctgtcgatctctcccaggctcaccctgctgtcccttctccacatgccattcacaattgcggccgaaaaagtgtacaacaccagacaccaggaagttctgcgcgaaatccaggatgccgtggcgagggctggacaggtggtgcgggaggccgtgggcggtctgcagaccgtccgctcttttggtgctgaggagcacgaggtttgcagatataaagaggcccttgagcagtgcaggcagctgtactggagacgggacctggagcgggcactgtaccttctcgtgcgtcgagtcttacacctgggagtgcagatgctgatgttgtcgtgcggactgcagcaaatgcaagatggcgagctgacgcaaggtagtcttttatcttttatgatttaccaagagtccgtcggaagctacgtgcaaaccctggtctatatctacggcgacatgcttagtaacgttggtgcggctgaaaaagtgttcagttatatggaccgtcagcccaacctgcccagtcctggaacactagctcctactacactgcagggcgttgttaagtttcaggacgtttcttttgcatatcctaatcgccctgacaggccggtgctgaaaggcctgaccttcacgctacgtcctggcgaggtgactgctctggttggacccaacggttctggcaagtctacagtcgccgcactcctacagaacctgtaccagccaacgggtgggcaggtactgctggatgagaaacctatctcacagtacgaacactgctatctacacagccaagtggtgtctgtgggacaggaaccggtcctgttcagcggctccgttcgtaacaatattgcatacggcctccagtcgtgcgaagatgacaaggtgatggctgccgcccaggccgcacacgcagatgactttattcaagagatggagcatggaatctacactgacgtcggagagaaaggcagccagctagccgccggccagaagcagaggcttgctatagcaagggctctcgtacgggatccccgggtcttaattctcgatgaggcaacttcggctttagacgtccagtgcgagcaagctaaaacattgtggaaattcatgattttctag

SEQ ID NO: 199977 - DNA, 1962 bp, Artificial Sequence
  derived and/or modified sequence
atgcggctgcccgacctgcggccctggaccagcctgctgctggtggacgctgccctcctatggttactccagggccccctgggcacccttctgcctcaaggccttccagggctctggcttgagggcacgctgcgcctgggcgggctctggggcctgctgaagctgcgcgggctgctgggattcgtaggtacgctgctactccctctctgcctcgctacgccactcacggtctccttaagggcactggtggcaggtgcaagccgagcccccccagccagggttgccagcgccccatggtcttggttgctcgtgggctatggggccgcaggactctcatggtcactctgggccgtactctcccccccgggtgcacaagagaaagagcaggaccaggtgaacaacaaggtcctgatgtggaggctgctgaagctttcccgtcctgacctgccactgctagtggctgcgttcttttttctggtgctcgccgtgctaggtgaaaccctgatcccacactattctggcagggtgatcgatatcctgggaggcgacttcgacccccatgcgtttgcctccgcaattttttttatgtgtcttttcagcttcggtagttcactgagcgcaggatgccggggggggtgctttacttatactatgagtagaattaacctgagaatccgggaacagctcttttcttccttgcttcgacaggatctcggcttctttcaggaaacgaagaccggcgagctgaattccaggttgtcttcagacacgacactgatgtctaactggttgccgctgaacgccaacgtgctgctgcgctctttagtgaaagtagtgggcttgtatgggtttatgctgagcatctcccccaggcttacattgttgagcctgttgcacatgccatttaccattgccgccgagaaagtgtacaatacacgtcatcaggaggtactacgggagattcaggacgctgttgcccgcgccggccaggttgtgcgagaagccgtgggaggtttgcagaccgtccgctcttttggtgccgaggagcacgaagtgtgtaggtacaaggaagcactggagcagtgtagacagctatactggaggcgagacctcgagagggctctttatctgctggtgaggagggtgctccacctgggtgtccagatgctgatgctctcctgtggcctccagcagatgcaggacggagagctaactcagggaagcctgctgagttttatgatctaccaggaatcggtaggcagctacgtgcagacactcgtgtacatatacggcgacatgctaagtaacgtgggggccgctgagaaagtcttttcctatatggacaggcaacctaatctcccatcacctggcacactggcacctaccactctgcagggcgtcgtgaaatttcaggatgtatccttcgcctatccaaaccgtcctgaccggccagtactgaagggcctgaccttcactttgaggccaggtgaggtaaccgcactggtcggaccaaacggcagtggaaagtcgacagtagctgcactgctccagaatttgtaccaacccaccggaggccaggtcctgctagacgagaaacctatcagccagtacgagcactgttacctgcactcgcaggtggttagcgtaggacaagaaccagttctatttagtggctccgtcaggaacaatatcgcctatggtctgcaaagttgcgaagacgacaaagtgatggcagccgcacaggccgcacacgccgacgacttcattcaagagatggagcacggtatctatacagacgtcggcgagaaagggagccaactggcagcaggccagaagcagagactggcgatcgctcgggctcttgtgcgggacccacgggtgctcattctagatgaggctactagcgctctcgacgtgcagtgcgaacaggcgaaaaccctctggaaatttatgattttctag

SEQ ID NO: 199978 - DNA, 1962 bp, Artificial Sequence
  derived and/or modified sequence
atgcggctgcccgacctgcggccctggaccagcctgctgctggtggacgcagccttactgtggcttttacaaggaccattgggcacactgttgccacagggcttgccgggcctttggctggagggcactctgcgactcgggggtctgtggggccttctcaaactcagggggctgttggggtttgtgggaaccttgctcctccctctctgcctggcaaccccattaactgtcagcctcagggctctcgtcgcgggcgctagcagagctccccccgccagggtggcctccgccccatggtcttggctgctggtgggatacggagcagccggcttgagctggtccttatgggcagtgctttcaccccccggggcacaggagaaggaacaggaccaggttaataacaaggtcctgatgtggcgcctgctgaaactgagcaggcccgacctgccacttttggtggctgcattcttctttctcgtgctagcagtactcggggagactcttattccacattattcagggagggtgattgacatacttggcggggacttcgaccctcacgcattcgcgagcgctatcttttttatgtgtttgttcagcttcggcagcagtctttctgctggatgccgcggcgggtgttttacctatacaatgagccggattaacctgcgtattcgagagcagcttttttcctccctgctgcgccaggacttgggcttttttcaggaaacgaaaacaggtgagctgaactctaggctgtcctctgacacgacactcatgtctaactggctcccattaaatgcgaacgtgctcctgcggtctctggtcaaggtggttgggttgtatgggtttatgctctcgatatctccccgcctgactctgctcagtctgctgcatatgcccttcacaatcgctgccgagaaggtgtataacacccggcatcaggaagttttacgggagattcaagatgccgtcgccagagccggacaagttgtccgagaggcggtgggcggccttcagacggtgcggtcgtttggtgcagaagagcacgaagtttgccgatacaaagaggccctagaacagtgtcgccagctttattggagaagagacctggagcgggcactttatctgcttgtacgccgcgtgttgcatctgggggtccagatgctgatgttgagttgtggtctccaacagatgcaggatggcgagctgacccagggcagtttactgagctttatgatttaccaggagtcagtggggtcatatgttcagacgttggtttatatttacggggacatgctctccaatgtgggtgctgcagaaaaggtattttcatacatggaccggcagccgaatctgccctccccgggcacactagcccccaccacattgcagggcgttgtcaagtttcaggacgtctcatttgcctatcccaacaggcctgatcgaccagttcttaagggcctaacctttactctgaggccaggtgaagtcaccgctctggtaggcccaaacggcagtggcaaaagtaccgtcgccgcgctgttgcaaaacctctaccagcctacaggtggtcaggtgctgctcgacgagaagcctataagtcagtacgaacattgttacctccattcccaggtggtttcggtaggtcaagaacctgttctcttctctgggtccgttcgcaacaatattgcctatgggctgcagtcctgcgaagacgacaaggtgatggccgcagctcaggccgcgcacgctgacgacttcatccaagagatggaacacggtatttatactgacgtcggcgagaaaggctcacagctggccgccggacaaaaacaacggctcgccatagctcgtgcactggtgcgggacccaagggtgctgatcttagatgaagccacttccgctttggacgtgcagtgcgaacaagctaagacgctttggaagttcatgatattctag

SEQ ID NO: 199979 - DNA, 1962 bp, Artificial Sequence
  derived and/or modified sequence
atgcggctgcccgacctgcggccctggaccagcctgctgctggtggatgccgctttgctgtggctcctccaagggccactgggtacccttctaccccagggactgccagggctttggctagagggcaccctgcggctgggcggcctctggggcctgctgaaattaaggggtctgctgggcttcgtggggacactgctgttacccctgtgcttggccacaccccttacggttagccttagagccctcgtggctggtgcttccagggccccacccgcacgagtggcgtccgctccttggagctggctgctggtgggctacggcgctgccggcctgtcatggagtttgtgggccgtgctttcaccccccggcgcacaggaaaaagagcaggaccaggtcaacaacaaggtcctgatgtggcggctccttaagttgagccgccctgacctccccctgctggttgcagctttcttctttctggtcctggctgttctgggagagactctgattccccattattccgggagagtgatcgatatcctgggtggagatttcgacccccacgccttcgcttccgctatatttttcatgtgcctcttttcattcgggtcttccctctctgcaggctgcagaggcggctgctttacatacaccatgtcccgcataaacctccggattagggagcagttattctcatccctgctgcgccaggatctgggcttttttcaagaaactaagactggagagctcaactctaggctatcctctgatacaacactgatgtctaactggctgccattgaatgccaatgtgctgctgagaagtctcgttaaggtggtaggcttgtacggtttcatgctgtcaatcagccctaggcttacactgctgtccttgcttcatatgccctttactatcgccgccgagaaggtttacaatacccggcaccaggaagtcttgagagagatccaggacgccgtcgctcgggctggccaggtcgtcagggaagcggtcggaggtctgcagactgtgaggagctttggagccgaagagcacgaggtatgtcggtacaaagaagccttggagcagtgcaggcagctgtactggagaagggatttagaaagagccttgtatctactaatcagacgtgtgctgcacctcggcgtccagatgctcatgctttcatgtggtctccaacaaatgcaagatggcgagttaacgcaggggtccctactgagtttcatgatctatcaggagtctgtcgggagctatgtccagaccttggtatacatttatggcgatatgctctctaatgtgggagccgcagagaaagtgttctcctacatggaccgccaacccaatctgccctcgcccggtaccttggcccctacgaccctgcagggtgtggtgaagttccaggacgtgtctttcgcataccccaatagaccagaccggccagtcctcaagggcctgacatttactcttaggccaggagaagtcacagcccttgtcggtcctaacggatctggcaagagcactgttgctgccttgctgcaaaacctttatcagcccaccggaggccaagtgttactcgacgaaaaaccaatatcccagtatgaacactgctacttgcactcccaggttgtgtccgtggggcaggaaccggtgctgtttagcggatcagttaggaacaacattacctatggcctgcagagttgtgaggacgacaaggtcatggcagcagcccaggcagcccatgctgacgatttcattcaggaaatggaacacggcatatacactgatgtgggagagaaagggagtcagctcgccgcaggtcagaagcagcggcttgcgattgcccgggccctcgtccgcgacccccgtgtcttaatcctcgatgaggccacctctgccctcgacgtacagtgcgaacaagccaagacactgtggaaatttatgatcttctag

SEQ ID NO: 199980 - DNA, 1962 bp, Artificial Sequence
  derived and/or modified sequence
atgcggctgcccgacctgcggccctggaccagcctgctgctggtggatgcagcactcctgtggctcctacaggggccccttggcacacttctgccccaaggacttccagggctttggctggaaggaaccttgcggcttggggggctctggggcctgctcaaactgagaggactcctgggcttcgtgggaacgttgctcctgccgctctgtttagctacacctcttactgtctctctcagagcactggtggctggggcttcacgcgcccccccggctcgggtcgcctctgcaccctggtcatggcttctggtggggtacggggcagccggcctgtcctggtccctctgggctgttctgtccccaccgggtgcccaggagaaagaacaggatcaagtgaataataaagtgttgatgtggcggctgctaaagctgtctcgaccagatcttcccctgctggtggccgccttcttctttttagtgctagctgtcctcggagagacactaattccacactactccggcagagtgattgatattcttggcggcgactttgacccacacgccttcgcatctgctatcttctttatgtgtctgttcagcttcggatcttcgctctctgcaggatgtcgcgggggttgcttcacatatactatgagccgtattaacctccgtatccgcgaacaactattttcttcgctgctacgacaagacctggggttttttcaggagaccaagaccggggagttgaattctagactgtcatccgatacgacccttatgagtaattggttacctcttaatgccaatgtgttactgaggtccctagttaaagtcgtcgggctgtacgggttcatgctctccattagtcctcgcctcacactgctctcccttctccatatgccattcaccatcgccgccgagaaggtctacaacactagacaccaggaagtgctgagagaaatccaagacgccgtcgcgagggccgggcaggtggtgagggaagccgtgggcgggctgcagaccgtccgttcctttggcgcagaagaacatgaagtgtgcagatacaaggaagccctggagcagtgtcgccagctgtactggcgtagagatctggagagagcactttacttgcttgtgagaagggtcctgcacctgggagtgcagatgttgatgctgtcctgcggactgcaacagatgcaggatggagagcttacccagggctccctcctgagtttcatgatataccaagagtctgttggttcgtacgtccagacactggtttatatctatggggatatgctgtccaatgtcggagctgccgagaaggtgttctcctacatggaccgccagccaaatctgccatcccctggaacgctggcaccaaccaccctgcagggagtagtgaaatttcaggatgtgtctttcgcgtaccctaatcgcccagatcggcccgtgctgaagggcctcacatttacgttgcgcccaggcgaggtgaccgccctggtagggccgaacgggagtggcaaatctaccgtcgctgcactgctgcagaacctttatcagccaacaggcgggcaggtcctgctcgatgaaaagccaatatcgcagtacgagcactgctatctgcacagtcaagttgtgtctgtgggacaggaaccagttctgttctctggatctgttaggaataacatcgcgtacggtctgcagagctgtgaagatgacaaggtgatggcagctgcccaggccgcccatgccgatgattttattcaggagatggagcatggtatctacactgatgtcggcgagaaagggtcacagctagccgccggtcagaaacaacgcctcgccatcgccagagccctggtgagggatccaagggttttgatcctcgacgaggcaaccagcgctctcgacgtccagtgtgagcaggccaagacactctggaagttcatgatcttctag

SEQ ID NO: 199981 - DNA, 2310 bp, Artificial Sequence
  derived and/or modified sequence
atgcggctgcccgacctgcggccctggaccagcctgctgctggtggatgcagccctactctggctcttacagggccctctgggtaccctcctgcctcagggcctccctggcctctggctggaagggaccctgcggctcggaggtttgtggggcctcctgaagctgcgggggttattggggttcgtgggaacactgcttctccctctctgcctggccaccccactgaccgtgagtttacgggctctggtggcgggcgcctctagagcccccccagcccgtgtcgccagcgctccttggagctggctgctggtgggatacggggcagctggtctgtcctggtctctgtgggcggtcctctcccccccaggggcccaagaaaaagagcaggaccaagtgaacaacaaagtactgatgtggcgcctgctgaaactttccaggcccgacctcccactgctcgtagctgcgtttttctttttagtgctggctgtgctgggggaaaccctcattcctcactactcaggcagagtcatcgacatcctcggaggggattttgacccccatgcattcgcaagcgccattttttttatgtgcctgttttcttttggtagtagcttaagtgcaggatgtagaggcggctgcttcacctacactatgagtcggattaacctccgtatccgggaacagctgttctcttcgctgttacgacaggacctgggcttcttccaagagacaaagaccggcgagctgaacagcagattgtcgagcgacaccaccttaatgtctaattggctcccactcaacgccaatgttctgctgcggagccttgtgaaggtcgtggggctgtacggcttcatgctctcaatctctccgaggctcaccctgctcagcctcctgcacatgccttttacgatagcagcggaaaaagtgtataatactcggcaccaggaggtgctcagggagatccaggatgccgtggcacgcgccgggcaggtagtaagggaagcagtgggaggcctccaaaccgttcgctccttcggtgccgaagaacatgaggtttgcagatacaaagaggcactcgagcaatgcaggcaactgtattggaggagagatttggaacgtgccttgtacctgctggtaagacgggtgctgcacctgggtgtccaaatgctaatgttgtcatgcgggctgcagcagatgcaggacggcgaactgacgcaaggttccctcttgtcatttatgatctatcaggaaagtgtgggatcttatgtccagacactcgtctatatatacggcgatatgttatctaacgtcggggccgcggaaaaggtgttttcttacatggaccggcagcccaacctgccgtctcccggaacactagctcctactaccctccagggggtggtcaagttccaagacgttagtttcgcttaccctaaccggccagacagacccgtcctgaaaggcctgacctttaccctgcgacctggagaggtgacggctctcgtcggaccaaacggtagtgggaaatccacagtcgctgctttactgcagaacctctaccagcccaccggagggcaggtgttactggacgaaaaaccgatctctcaatacgaacactgctatctgcattcccaagtcgttagtgtcggccaggagcccgttttgtttagcggctcagtgagaaataatatcgcctatggtctgcagagctgcgaagatgacaaagtgatggcagctgcccaggcagcccacgccgacgatttcatccaggaaatggagcacggcatctataccgatgtgggggagaaaggctctcagctcgccgccgggcagaagcagcggttagctatagccagggcactcgtgcgtgatccaagagtgcttatcttggacgaggccacgagtgctctggatgtgcagtgcgaacaggcaaacgggttttgggtcggcccactaggcggcgggtcagcaagcgaatcagatcccaccgggttccttcatgatagcagacacaggctttcaagtgacgtggggatgttcgttgccttgaccaaattgggccagccggacgcggagcagtggaatagtcgcctggacttactggaaagaagccgccaggctgtcgacggagtttgcaggcacaattatcgccttggggctccattcactgtggggaggaaggtccagccagaagtgactgtctatcctgaacggacacctctcctccaccagcacaatctcttgcattgttctgtgaccggcttttatcccggtgacataaaaattaagtggtttcttaacgggcagtag

SEQ ID NO: 199982 - DNA, 2310 bp, Artificial Sequence
  derived and/or modified sequence
atgcggctgcccgacctgcggccctggaccagcctgctgctggtggatgccgcactcctgtggctccttcaaggaccattggggacccttttgccccaaggccttcctggattgtggcttgaaggcaccctgcggctgggggggctgtggggcctgttaaagctgcggggcctcttaggatttgtcgggaccctgctcctccccttatgtctggccacccctctcacagtatctctgagagccctggtcgcgggagcatctcgagcaccaccagctcgcgttgcctccgcaccttggtcatggctcttagtgggctacggagcagccggcctgtcatggtctctgtgggccgtcctgagtccaccaggcgcccaggaaaaggagcaggatcaggttaataataaagtgctgatgtggagacttctgaagttgagccggccagatctgcccttgcttgtggccgccttcttttttttggtcctggctgtcttgggagaaaccttaattccacattacagcggcagagtgatcgatatcctcggaggggacttcgaccctcatgcctttgcttcagcaattttttttatgtgcctcttttcttttggatcttccttgtcagccggctgcagaggtggatgctttacttataccatgtcacgaatcaacctccgaattcgagagcagctgttctctagtctcctccggcaggatctcggatttttccaggaaacaaaaactggcgagctgaattccagactgtcttcggacactacgttaatgtctaactggttgcccttaaacgccaatgtgctcctgaggtctctggttaaggtggtgggactctacggctttatgctctccataagtccgcgtttgactctcctctccctgctccacatgccattcactatcgcggccgagaaagtgtataatactagacatcaggaagtcttgagggagattcaggatgcggtggccagggctggccaggtagtcagagaggcagtcggcggcttgcaaactgtgcggtctttcggcgccgaggagcacgaggtctgtcggtataaggaagcactggaacagtgccgccagctctactggcgcagagatctggagcgggctctgtacctgctagtccgcagagtccttcaccttggagtccagatgctgatgctatcatgtggtttacagcagatgcaggatggagagctgactcaaggctctctgctgtcctttatgatctatcaggagtctgtcgggagttacgtccaaaccctggtgtacatctacggggatatgttaagtaacgtgggtgccgccgaaaaggtgttctcctatatggatagacagcctaaccttccctcacccgggacactcgcacccacaacactgcagggtgtcgtcaagtttcaggacgttagttttgcgtatcccaatcgccccgaccgccctgtgttgaaaggtcttactttcacactgcggccgggagaggtcaccgccttggtggggccaaacgggtctgggaagtctaccgtagccgcactactccaaaatctgtaccagccaacaggcggccaggtgctgcttgatgaaaagccgatttcccagtacgaacattgttacctgcacagtcaggtggttagtgttgggcaggaaccggtcctcttctcgggcagcgttagaaacaatattgcttatgggttacaatcatgcgaggatgataaggtgatggctgccgctcaggcagcccatgctgatgacttcattcaggaaatggaacatgggatatacaccgacgtgggcgagaagggctctcaactcgccgctggtcaaaagcaacgattggctatcgcccgagcacttgtgagggatcctagagtgctgattctggacgaggcgacttctgcactggacgtgcagtgtgagcaggcaaacgggttttgggtaggccccctcggaggcggctcggcgtctgaatccgaccccacaggctttctacacgactccagacaccgattgagttcagatgtaggcatgtttgtagccttgacaaagctgggacagccagatgccgaacagtggaactccagactcgaccttctggagaggtcacggcaggcggtggatggagtttgcaggcataactatcggctcggcgcgcccttcactgtcgggcggaaagtacagcccgaggtgacagtatatccggagcgaacgcccctgcttcatcagcacaacttgctccactgttctgtgaccggtttttatcctggcgatattaagatcaagtggtttcttaatggacagtag

SEQ ID NO: 199983 - DNA, 2310 bp, Artificial Sequence
  derived and/or modified sequence
atgcggctgcccgacctgcggccctggaccagcctgctgctggtggacgcagccctgctttggttactgcaggggccactaggcactctgctgccccagggtctcccaggcctttggcttgagggcacactccgcttgggtgggctgtgggggctcctgaaactgcgtgggctgttaggttttgtgggcaccttactgttgcccctgtgtctggccaccccgcttactgtaagcctgcgcgctctggtcgctggggcctcaagggcaccacctgctagagtggcatctgccccttggtcttggctgctggtagggtatggtgcagctggcttatcatggagcctttgggcagtgttaagtcctcctggtgcccaggagaaggaacaagaccaggttaataacaaggtccttatgtggagactacttaagctcagccggcctgacctgccattgttggtggcggcatttttttttctcgtcctcgcggtgctgggtgagacccttattccacattattcagggcgtgtgattgacatcctggggggggacttcgatccacacgcctttgcaagtgccatcttttttatgtgtctattctccttcggaagtagtctctcagccggttgccgaggtgggtgcttcacctacactatgagccgcattaatctacgcattcgtgaacagctgttttcgtctctgctgaggcaggacctgggtttctttcaggagactaaaactggggagctgaactcccgtttatcgtccgacaccacattaatgagtaactggctgccactcaacgcaaatgtactcctccggtccttagtcaaagtggtcggtctgtatggctttatgctgagcatttctccccggctaacgctactctctctgctccacatgccctttacaatcgcagccgagaaggtgtacaatacacgacaccaggaagtgcttagggaaatccaggacgctgtggcaagagccggccaggtggtgcgggaagcagtcggtggccttcaaacagtgcgatcgtttggagcagaagaacatgaagtgtgcaggtacaaagaagccctcgaacagtgcaggcagctgtattggcgccgcgacctcgaaagggcactgtaccttctggtccgacgagttctgcaccttggggtgcaaatgttgatgttgagctgcggactgcagcagatgcaggacggggagcttactcaaggatcgctgctcagttttatgatctaccaggagagtgtggggagctacgtacaaacccttgtgtatatctacggtgacatgctgagtaacgtcggggcagcagaaaaagtctttagctatatggatcggcaaccaaatctgcctagtcccggcacccttgcccctacaacactccaaggggtggttaaattccaggatgtttcgttcgcctatcccaaccgacctgatagacccgttctcaaagggctgacatttaccctgaggcccggtgaggtcactgccttggttggcccaaacgggtcgggaaagtctacagtcgctgcactgctgcagaatttgtaccaaccgacaggagggcaggtcttgttggatgaaaaaccgatttcacagtacgagcactgttatctccactcccaggttgtgagcgtcgggcaggagccggtcctcttcagcggctcagtgcggaacaatattgcatatggcctccaatcctgcgaggacgataaagtcatggctgccgcccaggccgctcatgccgacgattttatccaagaaatggaacatggaatctacaccgacgttggcgagaaaggctctcaattggccgcggggcagaagcagagactggcaatcgcaagggctctggtgcgcgaccctagggtgctgatcctcgatgaagccacgtcagctctcgacgttcagtgcgagcaggccaacggcttttgggtggggcctctggggggaggatctgcgagtgagtcagatcccacaggctttctacacgacagcaggcatcgtctttcaagtgacgtgggcatgttcgtcgccttaacaaagttaggtcagcccgatgccgagcagtggaactctcgcctggacctacttgagcgctcccgacaggccgtcgacggcgtctgcaggcataattataggctgggagcaccattcactgtggggcggaaggtgcagcccgaagtcaccgtgtacccagaacgcaccccactgctccatcagcacaatctgctgcattgttctgtgacgggtttctacccaggagatatcaagattaaatggttcttaaacgggcagtag

SEQ ID NO: 199984 - DNA, 2310 bp, Artificial Sequence
  derived and/or modified sequence
atgcggctgcccgacctgcggccctggaccagcctgctgctggtggacgctgcgctgctctggctgttacagggtcctctgggcactcttcttcctcagggactccccggactttggctggaaggcaccctgcggctgggggggttgtggggacttctgaaactacgagggctgctcgggtttgtcgggactctgctgctgccgctctgtttagctacaccacttacggtttctttgcgggccctcgttgctggcgcctcacgggcacctcctgctagagttgcttcagccccttggtcttggctgcttgttggttatggcgccgccggtctgtcgtggtcgctctgggcagtgctctcaccaccgggcgcccaagaaaaggagcaggaccaagtgaataacaaagttttgatgtggcgactgttaaagctgtccagacccgacttacctttattggtggccgccttcttctttctagttcttgccgtactgggcgagacccttattcctcactattctggtagagttatcgatatcctagggggcgattttgacccacatgccttcgcgtccgccatctttttcatgtgcctctttagctttggctccagtctgagtgccgggtgtagaggcgggtgcttcacttacacgatgagccggattaacttaagaattcgcgagcagttgttttcttctcttctgcgacaagacctaggattttttcaggaaaccaagaccggcgaactgaacagccggctgagtagcgacacgacactgatgagtaactggctgccgctgaacgccaatgtcttgctccgatctttagttaaagtggtaggcctctacggatttatgctgagcatctcaccccggctgacactgctcagcctcctgcacatgccattcacgattgctgccgagaaggtctacaatacccgccaccaggaggttctgagggaaatccaggacgcagttgcccgcgccgggcaagtcgttagggaggcagttggcggcctgcaaactgtgaggtcattcggagccgaagagcacgaggtctgccggtacaaagaggcacttgagcagtgcagacaactctactggcgccgggacctggaacgagccctctatctgctaatccgccgcgttcttcacctcggggtgcagatgttgatgcttagctgcggactccaacagatgcaggacggcgagctgacacagggaagcctgctgagtttcatgatatatcaggagagtgtggggtcttacgtgcagactctggtgtacatctatggagacatgctgtctaacgtgggtgcagctgagaaagtcttctcatacatggacagacagcccaatcttccttcaccaggcacacttgcccctactacactccagggagtggtgaagttccaagacgtgtcattcgcgtatccaaatcgccccgatcgcccggtgctcaaaggccttacatttaccctgaggcctggcgaggttacggccctggtgggcccgaatggctcggggaaatcaaccgtcgccgctctccttcagaacctgtaccagcctactgggggccaggtgctgctggacgaaaaacccatttcacaatatgaacactgttatctccattctcaggtggtcagcgtgggacaagagcctgtcctgttcagtggatctgtgcggaacaacattacttatgggctccaatcatgtgaggacgataaagtcatggcagcggcccaggccgcccacgctgacgacttcatccaggagatggagcacggaatctataccgacgtgggggaaaaaggctctcagctggctgccggtcagaagcagcgtcttgccatcgctcgtgctctggtacgagaccccagagtcctgattctcgatgaggctaccagcgcactcgacgtgcaatgcgaacaggccaatggcttttgggtggggcctctcgggggagggtccgcatccgagagtgatccaaccgggttcctgcacgacagcagacataggctgtccagcgacgtcggaatgttcgttgccctgactaagcttggtcagcccgatgctgagcaatggaatagtagactcgacctactggaaagatctcgccaggcagtggacggagtatgccgccataattaccgactgggggccccctttacagttggaagaaaggtccagcccgaggttacagtgtacccagaacgcaccccgctccttcatcagcacaacctcttacactgcagcgtaaccgggttttacccgggcgatatcaaaattaagtggtttcttaacggccaatag

SEQ ID NO: 199985 - DNA, 2310 bp, Artificial Sequence
  derived and/or modified sequence
atgcggctgcccgacctgcggccctggaccagcctgctgctggtggacgctgcactactgtggctgctgcaggggcctctcgggacccttttgcctcagggattacctggtctgtggctggaaggtacacttagattgggcggcttgtggggactgctgaagctgcgggggcttttgggatttgtcggaactttgctgctcccattatgtttagcaactcccctgactgtctccttacgcgccctggtcgccggggctagtcgggcgcccccagccagagttgccagcgcaccatggtcctggcttctcgtgggatacggggcagccggattgtcttggtctctgtgggccgttctttcgccaccaggcgcccaggaaaaagagcaggatcaggttaacaataaggtgctgatgtggcgcttattgaaactcagccggcccgatcttcctctgctagtggcagcttttttcttcctagtgctggctgtactgggggaaacattaatccctcattactccggcagggtgatcgacattctgggaggtgatttcgacccccacgcattcgcatcagccatcttctttatgtgtctgtttagctttggttccagcctgtccgcaggatgtagaggcggctgcttcacttacaccatgtcccgcatcaatctgcgcattcgggagcaactgttttcaagtttactgcggcaggacctcgggttctttcaggagaccaaaacaggagaactcaattcccgcctctctagcgatacaacgctgatgtccaactggctccctttaaacgctaacgtcctgctccgatccttagtgaaggtggtaggcttatatgggtttatgctgtccattagccccaggttgactctgctcagcctccttcatatgccctttaccatcgccgcggaaaaggtttataatacaagacaccaggaagttttgagggagatccaggatgccgtggcaagagctgggcaggtagtgcgcgaggccgttggtgggctacagaccgtgaggtccttcggcgctgaggagcacgaggtctgtaggtacaaggaagctctggagcagtgtagacagttgtattggcggcgcgacctggagcgagcactgtatcttctcgtccggcgggtactgcacctgggcgtccagatgctgatgttatcttgcggcttgcagcagatgcaggacggtgaactgacacaaggctctcttctctcatttatgatctaccaggaaagtgtgggctcttatgtccagacccttgtgtacatatatggggatatgctgtcaaacgtgggagctgcagagaaggtctttagttacatggatcggcagcccaacctcccttctccggggacactggccccgactacacttcagggggtagtgaagtttcaggacgttagctttgcctacccgaaccgtcctgaccgtccagttctcaagggcctcacgttcaccttaagacctggggaggtgaccgctctggtcggacctaatggatctgggaagagcaccgttgccgctctgctccagaatctgtatcaacctacaggcgggcaggttctgttggatgaaaagcctatatctcagtacgaacactgctacctgcactctcaggtggtgtcagtcggccaagagccagtcctatttagcgggagcgtccgcaacaatatcgcatatggactgcaaagttgtgaggacgataaggtgatggcggctgcacaggccgctcacgcggacgacttcattcaagaaatggaacatgggatttatacagatgtgggcgagaaaggcagccagctcgctgccggacagaagcagcggctggctatcgccagggccctagtccgcgatccccgggttcttatcctagacgaagcgacatctgctcttgacgtccagtgcgaacaagcgaacgggttctgggtcggacctttgggaggcgggtcagcctccgaatcggaccctacagggttcctacacgacagccgacacagactgtctagtgatgttggcatgttcgtggctctcacaaagctgggacagccagacgcggagcagtggaattctcggttggatttgctggagcgctctaggcaggccgtagacggcgtgtgcaggcataactacagactcggcgcaccgtttacagtgggtagaaaagtccagccagaggttactgtatacccagagcgcacaccgcttcttcaccagcacaatctgttgcattgctcggtaactggattttaccctggagatatcaagatcaaatggttcctgaatggacagtag

SEQ ID NO: 199986 - DNA, 2310 bp, Artificial Sequence
  derived and/or modified sequence
atgcggctgcccgacctgcggccctggaccagcctgctgctggtggatgccgccctgctttggcttctgcagggacctttaggcactctcctgcctcaaggcctgccgggcctatggctagagggtaccctgcggcttgggggcctttggggcctcttaaaattgcgggggttgcttggcttcgtgggcacgctgctcctcccgctctgtctggctactccactcaccgtgagccttcgcgcgcttgtagcaggcgcatctagagccccacccgccagggtggcatctgccccctggtcttggctgctggttgggtacggtgcagcagggcttagctggtctctatgggctgtactatccccacccggggcacaggagaaggagcaggaccaggtaaacaataaggtcctcatgtggcgcctgctaaagctatcccgtcccgatctcccactcctggtggccgctttctttttcctggttcttgctgtgctcggtgagacattgatcccacactacagcggccgggtaatagacattctggggggtgactttgatcctcacgctttcgctagtgctatcttcttcatgtgtcttttttcctttggatcgagcttatctgctggatgtcgtggcggctgcttcacttacactatgtcccggataaatttgcgcatccgcgagcagctcttctccagcctgttgaggcaagatctgggcttctttcaagaaaccaaaaccggtgaactgaactcccgcctcagctcagacactaccctcatgtctaattggcttccgctgaatgccaacgtgttgcttagaagtcttgtgaaagtggtgggcctctacggcttcatgttgagcatcagtccacgtctcaccttgctgtcattgctgcatatgcctttcacaattgcagcggaaaaagtttacaacacaagacaccaagaggtcctccgcgaaatacaggatgccgtagcgcgcgccggacaggtggtgcgggaagcagttggtggactccagacggtgaggtcatttggggcagaagagcacgaggtgtgtcgttataaagaagcgctggaacagtgtagacaactgtactggcgcagagacttggagagggctctatacctgttggtgcgtcgcgtgctgcacttaggggtccaaatgctgatgctaagctgcggcctgcagcagatgcaggacggcgaacttacgcaaggctccctcttaagcttcatgatttatcaggagagcgtaggatcctacgtgcagacccttgtgtacatttatggggacatgctgtcaaacgtcggtgcagccgagaaggtcttctcctatatggacaggcagccgaatctccccagccctggaactctggcccctactacattgcagggagtcgtaaaattccaggatgtcagctttgcctacccaaatcggcccgatcgcccagtgctcaagggtcttacattcacccttcgacccggtgaggtgacggctctggttggccctaatgggtcaggcaagagcaccgtggcggcattactccaaaatttgtatcagcctaccggtggccaggtgctcttggatgagaaacccattagccagtacgagcactgctatctgcacagccaagtcgtgtcggtgggacaggaacccgtgctcttctcaggcagtgttcgcaataatatcgcatacggattgcagtcgtgcgaggacgacaaggttatggccgcggcccaggccgcccacgctgacgacttcatacaggagatggagcacggtatttataccgacgttggcgagaagggaagccagctagcagctgggcagaaacaacgcctggctatagccagagccctcgtccgagacccacgggtgctgatcttagacgaggctacctcggccctcgatgtgcaatgcgaacaagccaatggtttttgggtgggccctctcggtggggggtcagcttctgagtctgaccccacaggatttctgcatgattcccgacatagactgtcctcggacgtcggcatgtttgtggcactaactaagctcgggcagcctgacgccgaacagtggaatagccgcctggatctgttggaaaggtcaagacaagccgtggatggcgtttgtcgccataattatcggcttggtgccccttttactgtggggcgaaaagtgcagcccgaggtgaccgtttaccctgagaggaccccattgctacatcaacacaatctgttgcattgttccgttactggattctaccccggtgacatcaaaatcaaatggtttctgaatgggcagtag

SEQ ID NO: 199987 - DNA, 1962 bp, Artificial Sequence
  derived and/or modified sequence
atgcgcttaccggacctgaggccttggacatctctgctgcttgtggatgccgctctactctggttactgcaaggacctctgggaaccttgttgccgcaggggctgcccggactgtggttggagggaaccctgaggttgggaggactgtggggtctcctgaaacttaggggattattggggttcgtgggcactctcctgcttcccctgtgtctcgcaacacccttaactgtctctttaagagctttggtcgccggtgccagtcgagcccctccagccagggtcgcgagcgccccatggtcttggttgctcgtcggttacggggcagcagggctgagctggagtctgtgggccgtcctgtcccctcctggtgcccaggaaaaggaacaggatcaggtgaataataaggttctcatgtggcgcttgctcaagctcagccggccagatcttccactgctagtggctgcattttttttcctggtcctggctgttctgggagaaactctgataccgcattacagcggacgcgtaatcgacatattaggcggagactttgaccctcacgcattcgccagcgcgatttttttcatgtgccttttctcattcgggtctagtctgagtgccggatgcaggggcggatgcttcacatacacaatgagtaggatcaacctgcggatccgcgagcagttgttcagctcactcctgcgccaggacctcggcttttttcaggagaccaaaacaggcgagctcaactcgaggctctcatcagatacaactctgatgagcaattggctgccactgaatgctaatgtgctgctgcggagcctcgtaaaggtcgtcggcttatatggatttatgttatcaatttctcccaggcttactctcttaagcctgttacacatgccgtttactatcgccgcagagaaggtctataatactaggcaccaggaggtgctacgggaaatacaagatgctgtcgcccgagctggacaggtcgttagagaggccgtgggtggcctgcaaactgtccgaagctttggcgcagaggagcacgaggtctgtcgctacaaggaagctttggaacaatgcagacagctctattggaggagagatcttgagcgggcactgtacctccttgtgagacgggtgctacaccttggtgttcagatgctgatgttatcttgcggcctgcagcagatgcaggatggcgagcttacgcaaggcagcctcctctccttcatgatatatcaggagagtgttggcagctacgttcaaacactggtgtatatttatggagacatgctatcgaatgttggagccgctgaaaaagtgttttcttatatggaccgacagccgaacctcccctcgcctggtacactcgcccctactacgctgcagggggtggtcaagtttcaagatgtgtcctttgcctatcccaatcgcccagacaggcccgtgttaaaaggcctgacttttaccctgagacctggagaagtgacagcactggttggaccaaacggcagcgggaagtcaacagtcgccgctctattacagaacttgtaccagccaaccgggggacaggtgctcctagatgagaaaccaatcagccagtatgaacactgttaccttcactcccaagttgtgtcagtaggccaggaacctgtcctgtttagtgggtctgtgcgtaacaacatcgcttatggcctccagagctgcgaagacgacaaggtaatggccgcagcacaggcagcacatgcggacgactttatccaggaaatggaacatggaatatatacagatgtgggggagaaagggtctcaactggctgctggacagaagcagcgcttggctatcgcaagggccctcgtgagggatcctcgtgtactgattcttgatgaggcaacatctgccctggatgtccaatgtgagcaggccaaaactctttggaaatttatgatcttttag

SEQ ID NO: 199988 - DNA, 1962 bp, Artificial Sequence
  derived and/or modified sequence
atgcgactgccggatctgcgcccttggacatcgctgttattagtagatgcggctctcctgtggttactccaaggacccttgggaacactgttgccacagggcctgccaggcctgtggcttgaagggacactcaggctggggggactgtggggtcttctgaagctgcgaggcctgctcgggttcgtggggacactgttgctgcccttatgcctggctacacctctgaccgtgtctttgcgggcacttgtggccggtgccagcagggcgcctccagccagggtcgcctctgccccttggtcctggttgctagttggctacggcgctgccggattatcatggtccctctgggccgtcctgtctcccccaggcgctcaggagaaggaacaggatcaggtcaacaacaaagtgctcatgtggaggttacttaagctctcgcggcctgacctgcccctcctcgttgccgcattcttcttcctagtcctggctgtgctgggagaaacccttattcctcattactccgggagggtcattgatattctcggtggggactttgacccacacgcattcgcgagtgctatcttcttcatgtgtctgtttagtttcggctcttctctgtcagccggatgtaggggaggctgctttacctacactatgtcacggataaacttgcgaattcgggagcagcttttcagttcccttctccggcaagatcttggtttcttccaggaaacgaaaaccggtgaacttaactcgcggttaagctccgacactacattgatgtccaactggctgccactgaatgctaatgtcctgctgaggtcactggtcaaagtggtgggcctctatggctttatgctgagtatcagtccacgactgacacttctgagcctgttgcacatgcctttcactatcgccgctgagaaagtctataacacccgacatcaggaggttctacgagagatacaggacgccgtagccagggctgggcaagtggttcgggaagccgtggggggtctgcagacagtgcggtcctttggagccgaagaacacgaggtgtgccgctataaagaagcccttgaacagtgtcggcagctttactggaggcgcgatctggagagagctctgtatctgctagtgagacgggtcttacacctcggcgtgcagatgctaatgcttagctgcgggctgcaacagatgcaggacggcgagttgacacaaggcagcttgcttagtttcatgatttatcaggagagtgtcggcagctatgtgcagacactggtctatatatatggagacatgttatcaaatgttggcgcagctgaaaaagttttttcatacatggaccggcagccaaacctgccatctcccggaacactggcacccacaactctccagggagtggtaaagttccaagacgtgtcctttgcctatccaaatagaccagataggccggtcctgaagggactaacttttactctgcgtcccggtgaggtgaccgcacttgtcggtcccaacgggtctggaaagtctactgtggccgcactgcttcagaacctgtaccaacccacaggagggcaggttctgcttgatgaaaaacccatctctcaatacgaacattgctacctgcacagtcaggtggtgtctgtggggcaggagcccgtcttgttttccggaagcgttcgcaacaatatcgcgtatggcttgcagtcatgcgaggatgacaaagtgatggctgccgctcaagcagcccacgccgatgacttcattcaggagatggaacacggaatttacactgacgtaggcgagaaggggagccaattggcggcaggccagaagcagcgcctggctattgcacgagccctggtaagggatccacgggttctcatcctagatgaggccacatctgctcttgatgtccagtgtgagcaggccaagacactgtggaagttcatgatcttttag

SEQ ID NO: 199989 - DNA, 1962 bp, Artificial Sequence
  derived and/or modified sequence
atgaggttgccagacctcagaccatggacctctcttctactggtggatgcagctctgctgtggttactccaagggcctttaggtacactgctcccccaagggcttcctggcctgtggctcgagggcacactgcgcttaggcggactttgggggttactcaagctgcgcggtctgcttggattcgtgggcacattactactacctctgtgtcttgcaacacccctcacagtgtccctgcgagcactcgtggctggagccagccgcgctccacccgctagagttgcttccgctccatggagctggctcctggttgggtatggagccgctggcctgagttggagcctgtgggcggtgctgtctccaccaggggcacaggaaaaagagcaggaccaggttaataataaggtcctgatgtggcggctgctcaagctcagccggccagatctgccattacttgtggcggcatttttttttctggtgctcgctgtgctgggagaaacgctgattccccattattccggcagggtgattgatattcttggcggagatttcgaccctcacgcttttgcatccgcaattttcttcatgtgtctgttcagtttcggtagttccctttctgcaggctgcaggggcggatgctttacatacacaatgtcaaggataaatctacgaattagagagcagttgtttagctcactcctcagacaagatctggggtttttccaagaaacaaagacaggcgagttgaactcccgtctgtcatcagatacaacacttatgagcaactggctacctctgaacgctaatgtgctgctacggtccctcgtgaaagtggtgggcctttatggatttatgctgtcaatttcacccagactcaccctgctgagtttgctgcacatgccgtttacaattgctgctgaaaaggtttataacacacgccatcaggaggtgctacgagagatccaggacgctgtggcccgagcaggccaggtagtgcgggaggccgtggggggtttgcaaacggtgcgctcattcggggcagaggagcacgaagtctgccgatataaggaagccttggaacaatgccggcagctctactggcgaagggatctggagagggccctctacctgctggtgaggcgagtcctccatttgggcgttcagatgttgatgttgtcatgcggcctgcaacagatgcaggacggtgaactgacccagggttcattgctttccttcatgatctaccaggaatcagtgggatcttacgtccagactctggtctatatctacggggacatgctgtctaatgtgggtgctgcagagaaagttttcagctacatggacagacaacctaatttgccaagccccggtaccttggcccctactaccttgcagggggtggtgaagttccaggacgtctccttcgcttaccctaaccggccagacaggccagtcctgaaaggactgacctttacgctgcggcctggggaggtcaccgccctggtgggccctaacgggagcggaaaaagcaccgtcgctgccctgctgcagaacctttaccaaccaaccggaggacaggtgctgttagacgagaagcccatctctcaatacgagcactgttatttgcactcacaggttgtttccgttggacaggagcctgtgctcttctcgggctctgtccggaacaacatcgcttatggcctgcagtcatgtgaggatgataaggtgatggccgctgcacaggcggcacacgccgacgactttatacaggagatggagcatggaatctatacagatgtgggcgaaaaggggtcacaactggctgcaggacaaaaacaaaggctggccatcgcaagggccctggtcagggatccccgtgtgctgatcctggatgaagccactagtgcactggatgtgcaatgcgagcaggcaaagacactctggaaattcatgatcttttag

SEQ ID NO: 199990 - DNA, 1962 bp, Artificial Sequence
  derived and/or modified sequence
atgcgtctgccagacctgcgcccatggacatccctcttgctggtggatgctgccctattatggctgcttcaaggccctttaggcaccctcctccctcagggcctgccaggcctttggttggagggaaccctgaggcttgggggactgtggggcctcttgaagctgagagggcttctgggcttcgtaggcactctgctactgccgttgtgtctggccaccccactcacagtgagtctgagggccctagtggcgggtgcctctagggcccctccagctcgggtagcttctgctccatggagttggctgctcgttggctatggggctgcaggactaagttggagcttgtgggcagtgctcagccccccaggcgcacaagaaaaagagcaggatcaggtcaataataaggtgctgatgtggcgtctgctgaaattgtcccgccctgatttgcctctgctggtcgccgcttttttcttcctggtcctggctgtgctcggcgagaccctcattccgcattactcggggagagtgatcgacatcctggggggtgactttgatccccacgcttttgcgtctgccattttcttcatgtgcttgttttccttcggatccagtctgtctgccggatgtcggggaggatgctttacttacaccatgtccaggataaacctccgcatcagagagcagctcttcagctcgctgctgcggcaagacctcggattcttccaggagacaaaaacaggagagttgaattccagactctccagcgacacgacccttatgtcaaattggctaccactgaatgccaatgtcctcctacgctcactggtcaaggtggtagggttgtatgggttcatgctgtccatctccccacggctcaccctgctttccctgctacacatgccattcaccatcgcagccgagaaagtatacaacacacggcatcaggaggtcctgcgggaaatccaagatgctgtggcccgagctggtcaggtggttagggaggctgttgggggactccagacagtgcgatccttcggtgcagaggaacacgaggtgtgccgctacaaagaagccttagaacaatgccgtcagttatactggcgcagggatttggagcgcgcattgtaccttctggtgcggcgtgtcctccacttgggtgtgcagatgctaatgctctcttgtggtctgcagcagatgcaggacggggagctgacacaggggagcctgctgtctttcatgatctatcaagaatccgtggggtcatacgtccagacactcgtctacatttacggcgacatgctgtcaaatgtgggagctgctgaaaaagttttctcttacatggaccgccagccaaatctgcctagccctggaacactagcacctactacacttcagggtgtggttaaattccaggatgtgagcttcgcatacccaaacagacccgacagaccagtgctgaaaggcctaaccttcaccctgcggccaggagaggtgacagctctggtgggcccaaatgggtctggtaaatcgacagttgctgccttgctccaaaacctatatcagccaaccggcggtcaagtactgttggatgagaagcccataagtcagtatgagcattgttacttacactctcaggtggtgagcgttggacaggagccagttttgtttagtggttctgtcagaaacaacattgcttatggcctccagtcctgtgaagacgataaagtgatggcggcagctcaggcagcccacgccgatgacttcatccaggagatggaacatggaatttatactgatgtcggtgagaagggtagtcagctggcggcaggccagaagcagcgcctggctattgccagggctctggtgagagacccacgcgtgctgattttagatgaggcaacctcagccctcgacgtacagtgtgaacaggctaagaccctctggaaattcatgatattttag

SEQ ID NO: 199991 - DNA, 1962 bp, Artificial Sequence
  derived and/or modified sequence
atgcgcctgcccgatctacggccatggactagcctgttactggtcgacgcggcactgttatggctgctgcaaggacccttgggcacactacttccgcagggattgcctggcctttggctagaaggtactcttaggctgggcggtttgtggggactgctcaaactaagggggctcctcggattcgtgggtacccttctgctgcctctgtgtctcgccacccctctgaccgtttcacttcgcgctttggttgctggcgctagtcgggcaccacctgctagggttgcaagcgctccctggagctggctgctagtcggctacggggctgccggactgagctggtccctttgggccgtgctgtcacccccaggtgcacaggagaaggaacaggatcaagtcaacaacaaggtgttgatgtggagacttttgaaactgagccgcccagatctgcctctcctcgtggccgcattcttcttcctcgtactcgctgtgctcggcgaaaccttgataccgcactacagcggtcgggtcattgacatactgggcggagatttcgacccacatgcatttgcatccgcaatcttttttatgtgcctcttctcttttggatcgtctttgagtgcgggttgcagaggtggctgttttacctacacgatgagcaggatcaacttgaggatcagggagcagctttttagcagcctgctgcgccaggatctgggcttttttcaagagactaagaccggagaattgaactctcgcctttccagcgacacaacactgatgagcaactggcttcctctgaacgcaaacgtgctgctgaggtctcttgtgaaggtcgtcgggctgtatggcttcatgctcagtatcagtcctagattaacgctcctgagtctgttgcatatgccttttactattgcagctgaaaaagtgtacaacacacgccaccaggaggtgctgagagagatccaagatgcagtggcgagggccggacaagtggtcagggaggctgttggagggcttcagacagtacggtcattcggggctgaggagcacgaagtgtgtcgctataaggaggctttggaacagtgtagacagctttattggcgccgagatttggagagggcgttgtatttgttggtaagaagggtgctgcatctcggcgtacagatgttgatgctgtcgtgcggtctgcagcaaatgcaggatggggagctgactcagggttcacttctctcgttcatgatctatcaggaatcagttggtagttatgttcagactttagtatacatatatggggatatgctgtccaacgtcggcgctgcagaaaaggtgttcagttacatggacaggcagccaaatctcccatctcctggcacacttgccccaacaactctgcaaggtgtggtgaagttccaggacgtgtccttcgcatatcccaacagacccgataggcccgtactgaagggcctcacattcacactccgccctggcgaagtgacagcgcttgtgggtccaaacggatccggtaagagtacagtcgctgccctgctccagaacctgtatcaaccgactggtgggcaagtgctgcttgacgagaaaccaatatcccagtatgagcattgttatctgcacagccaagtcgtctccgtaggtcaggaacctgtcttattttctggctccgtccgcaacaatattgcgtacggtcttcagtcctgtgaggacgacaaagtcatggccgctgcgcaggccgcacacgcggacgatttcatacaggagatggagcacgggatttacaccgacgtaggtgagaaagggagccagctcgccgcagggcagaaacaacgcttggcaattgccagggcacttgtccgcgatcctcgcgtgctgattctcgacgaggcaacgtctgctctggacgtgcagtgtgagcaggcgaagaccctgtggaaattcatgatcttttag

SEQ ID NO: 199992 - DNA, 1962 bp, Artificial Sequence
  derived and/or modified sequence
atgcgcttgcctgacctacggccttggacctcgctactgttggtggatgcagcactcctttggctgctgcaaggtccactggggactctgctgccccagggtctacctggcctgtggctggagggaacacttaggttaggcggactatggggcctgctgaagctcagaggcctgcttgggttcgtggggacactattgctgccactgtgcctcgccacccccttgaccgtgtccctgcgcgcactcgtcgcaggtgcttctcgagctccacctgctagagtcgcgtctgcaccctggtcttggctgctggtcggctacggagccgctgggctaagctggagcctgtgggcagtgctgtctccccctggggctcaggagaaggagcaggaccaggttaacaacaaggtactgatgtggagactcttaaagctctcacgtccggatctgccacttctggtggcagccttctttttccttgtgctggcagtgctcggggaaacgctgatccctcactacagtggccgagtaatcgacatcctcggtggcgacttcgacccacacgcttttgcctccgccatcttcttcatgtgcctgtttagcttcggttccagcctgagtgcaggatgcagggggggatgctttacctacacaatgtcacgtatcaatttgaggattcgagaacagctcttcagcagtcttctgcgccaggatttgggattcttccaggaaactaagactggcgagctcaactcccgtctgtctagtgacacaacattgatgtccaactggctgcccctaaacgcgaacgtcctgctccgcagcctggtgaaggtggtgggattgtacggtttcatgctctcgataagtcctcgactcactctgctgtccctgctgcatatgccatttaccatcgcagctgagaaagtctataataccagacatcaagaggtcctgcgggaaatacaggatgcggtggcccgagctggacaggttgttagagaggccgtgggcggactccaaaccgtccgttccttcggcgcagaggagcatgaggtctgcagatataaagaagccctggagcagtgtcggcaactgtactggcggagggatctggagagggctctctatctgctggtacgacgtgttctacatctgggcgttcagatgctcatgctttcatgtggacttcagcagatgcaggacggtgaactcacccagggctcccttttaagttttatgatctatcaggaatccgttggatcctatgtgcagaccttggtatatatttacggtgatatgctctccaacgtgggcgctgctgagaaggtgttcagttatatggacaggcaacccaacctcccctcacccggaactctggccccaacaacgttgcagggagtggtcaaattccaggatgtgtcatttgcatatccaaatcgccctgatagacctgtgctgaaagggctgacatttaccctcagacctggcgaggtgacagccctggtcggtccaaacggctccggcaagtcgaccgtggcggctcttctacagaatctgtatcagcccaccgggggacaggttttactggacgagaaaccaatctcccagtatgagcactgttatctgcacagccaagtggtgtctgtcggccaagaaccagttctttttagcgggagcgtccgcaacaacattgcctacggattgcagtcctgcgaggacgataaggtgatggccgcagcccaggctgctcacgcagatgactttatccaggaaatggagcatggaatctacacagacgtcggcgaaaagggctcccagctggctgcagggcaaaaacaacggctcgctattgctcgagctcttgtcagggaccctcgcgtgctgatccttgatgaggccacatcagccctggacgtgcaatgcgagcaggctaaaactctgtggaagttcatgattttctag

SEQ ID NO: 199993 - DNA, 1962 bp, Artificial Sequence
  derived and/or modified sequence
atgcgcttacccgatcttagaccctggacatctcttctcctggtggacgctgcactactgtggctactgcagggcccacttggaactctattaccacaaggtctccccggtttgtggctggaaggcacactgcgcttaggaggactctgggggcttcttaaactgcgaggactgctgggattcgtcgggactctcctgctgcctctgtgcctggccacacctctcaccgtgtcactacgagcgttagtcgcaggtgcttctcgtgcccctccagcccgagtggcctctgcaccgtggtcctggctactagtaggctacggagctgctgggttatcgtggagtctctgggccgtgttaagccccccaggggcacaggaaaaagaacaggatcaggtgaataataaagttttaatgtggaggcttctgaagctctctcggcctgatttacccctgctggttgccgcattcttcttcctcgtgctagccgtcctgggtgagaccctaatcccacattattcaggacgcgtgatcgacattttgggcggagattttgacccccacgcgttcgcttcagctatctttttcatgtgcctgttctcctttggtagcagccttagtgcgggatgtcgcggtggctgttttacgtatactatgagcaggattaatttgagaattcgagagcagctttttagctctctgttgagacaggacctaggcttttttcaggaaactaagacgggcgagctgaattctaggctgagctctgacacgactttaatgagcaactggcttccccttaatgccaacgtcctcttaagaagcctggtgaaagtcgtcggtctctacggcttcatgttgagcattagtccacggttgacactgctgtccctgttgcatatgccttttaccattgctgccgagaaggtatataatactcgtcaccaggaagtgttgcgcgaaatccaagatgccgttgctcgagccggacaggtggttcgcgaggcagtcggaggcttgcaaaccgtacgaagttttggtgctgaggagcacgaggtatgcagatacaaggaggcacttgagcagtgcagacagctgtattggcggcgtgaccttgagcgggctctgtacttgctcattagaagggtgctccacctcggcgtgcaaatgctcatgttatcatgcggtctacagcaaatgcaagatggcgagctgacccagggcagcttactgagctttatgatttatcaagagtcagtgggctcttatgtgcagacacttgtgtatatttatggggacatgttatcaaacgtgggtgccgctgagaaggtcttttcctacatggatcgacaaccaaatctccctagcccaggtacgttggccccaacaactttgcagggtgttgtgaagttccaggatgttagtttcgcgtatcccaaccgtcctgataggcccgtactaaagggcttgacctttacacttagaccaggagaggttaccgcactcgtcgggcctaacggcagtgggaaaagcaccgtggccgctttgctccagaatctgtaccagcccaccggaggacaggtcctgctcgatgagaaacccatctcccagtatgagcactgctatttgcactcacaggtagtgtcagtcggccaagaacccgtattgttcagtgggagcgtgcgaaacaacattacatacggcctgcaatcatgtgaagatgacaaggtgatggctgccgctcaggccgctcatgccgacgactttattcaagagatggaacacggcatctatacagacgttggggaaaaaggcagtcagcttgccgcaggccagaagcagcggctcgctatcgctcgtgctctcgttcgagacccacgtgtcttgatcctggacgaagccacatccgcgctggatgttcagtgtgaacaggctaagacgctgtggaagttcatgattttctag

SEQ ID NO: 199994 - DNA, 1962 bp, Artificial Sequence
  derived and/or modified sequence
atgcgactcccagatctgcggccatggacatctctcctgctagttgacgcagctcttctttggctgctacagggtccactcggaacactgctcccccagggccttccaggcttgtggctggaggggaccttgaggcttgggggactgtggggcctgcttaagctccggggactgcttgggtttgtcggcacattgcttctccccctatgtctggctacaccgttgaccgtgagtttgcgagcactggtggccggagcatccagggcgccacctgctcgagtggcctcagccccatggagctggctgctcgttggatacggggcagcgggtctgagttggtcactgtgggctgttttgtccccgccaggcgcacaggaaaaagaacaggaccaggtcaacaacaaagtgctgatgtggagactcctgaaactgagtcgccctgacttgccgcttcttgtcgcagcgttctttttcctcgtgctggccgtgttaggtgaaacactcattcctcattactctggcagggttatcgatatcctggggggtgacttcgatccacacgcctttgccagcgccatcttttttatgtgtttgttttccttcgggagtagtctcagcgccggatgcaggggcggttgctttacgtacactatgagcagaattaatctaaggattcgagagcagctcttctcctccctgctgagacaggacttgggatttttccaggagactaaaactggcgagctgaacagtcgcctcagtagcgataccactttgatgagcaattggctgcccctgaatgctaatgttttgctaagatcacttgtaaaggtggtggggctctatggttttatgctgtccatatccccccgactcaccctactgagcctgctgcacatgccatttaccatagccgctgagaaggtgtacaatactaggcaccaagaggtcctacgcgaaattcaagacgccgtggctcgggctgggcaagtggtgcgtgaagcagtgggaggactgcagaccgtcagaagcttcggagccgaagaacacgaggtgtgccggtacaaagaggccctcgaacaatgtagacagttgtactggaggcgggatctggaacgcgcactctatctcctcgtaagacgagtgctgcatttgggcgtgcagatgctaatgttaagctgtggcctccagcaaatgcaggatggcgagcttactcaggggtcacttctgagttttatgatctatcaagaatccgttggatcctacgtacagaccctagtgtacatctatggagatatgctctcaaacgttggcgctgctgagaaagtgtttagctatatggacagacagccaaacttgccctctccgggaacactcgccccaaccaccttgcagggcgtcgtgaagtttcaggacgtttcattcgcataccctaatcggcctgacagaccagtgctcaaaggcctgactttcactcttaggcccggtgaggttactgccctcgtggggcctaacggttctgggaagtccactgtagctgcactcttgcaaaacctttaccagcccactgggggacaggtactgttggacgaaaagcccatctcccagtacgagcattgttatttgcactcacaggtcgtttcagtcggccaagaacctgttctctttagtggttccgtcagaaacaatatcgcgtacggcttgcagagttgcgaggacgacaaagttatggccgcagctcaggctgcacatgccgatgatttcattcaggaaatggagcatggcatttataccgacgttggggagaaggggtcccagctagcagcaggacagaaacagcgattggcaatcgccagggctctggtgcgagaccctagagtgctaattctcgatgaggctacatctgcgcttgatgtgcagtgcgagcaggctaaaactctctggaaattcatgatattttag

SEQ ID NO: 199995 - DNA, 2310 bp, Artificial Sequence
  derived and/or modified sequence
atgagactgcccgacctgcgtccgtggacaagtcttctgttggtggacgcggcattgctgtggctgctacagggacccctggggactctgttaccacagggcctgcccggactatggctggaaggcacacttagactgggcggactttgggggctgctgaaactccggggactgttggggtttgtcggtaccctgttactgcccctgtgcctagctactccactcactgtatcccttcgggctcttgttgccggagcatctagggcaccccctgctcgggtagcctcagcaccttggtcttggttgctggtagggtacggagcggcagggttgagctggagcctttgggccgtcctgtctcccccaggggctcaggaaaaagagcaggatcaagtgaacaataaggtgctgatgtggcgtttgttgaagctatcgcgcccagatttgcctctcctggttgccgcatttttctttctggtactggctgtcctgggggaaactctgatccctcactactccgggagagtcattgatatcttgggtggagactttgatcctcacgccttcgcatcagccatattttttatgtgcctattctcatttggatcgtcactgtctgctggttgcagggggggatgttttacctatactatgtccagaatcaacctgcggatcagagagcagctctttagttccctgctgaggcaagatctcggctttttccaagagaccaaaactggtgagctgaactccagactctcatcagacaccaccctgatgtctaactggctgcccctgaacgccaacgtcctgctgaggtcactggtcaaggtagtcgggctatacgggttcatgttgtccatcagtcctaggctcaccttgctttctctcttgcacatgccttttacaattgccgcagaaaaggtttataacactaggcaccaagaggttctacgcgaaattcaggacgccgttgcaagagcgggacaggttgtgcgggaggccgtcggagggctccagacagtccgaagctttggggctgaagagcatgaagtttgtcgatacaaggaggctctcgagcagtgcagacagctatactggaggcgagatctggagcgcgctctgtatctgttggtccgaagggttctacacctgggtgttcagatgttgatgttatcgtgtggcctccagcagatgcaggatggggagctgacccagggtagtttgttgagctttatgatttaccaagaatctgtcgggtcttacgtgcagaccctagtttatatttacggggacatgctgagcaatgtgggcgctgcagaaaaggtgttttcatatatggacagacagcctaaccttccttcacccggaactctcgccccaacaaccttacaaggggtggtgaaattccaagacgtatcctttgcctatcctaatcgccctgaccggcctgtgttaaagggtctcacctttaccctcaggccaggggaagtcactgcactggtgggaccaaatggaagcggcaaatcaactgttgccgctctgttacagaatctataccagcctaccggtggtcaagttctgctggatgaaaaaccaatctcacaatacgagcattgttatcttcactcccaggtcgtgtcagtgggccaagagcccgtgttgtttagcggatcagtgcgaaacaacatcgcctatggtctccagtcctgtgaggatgataaagtgatggcagccgctcaggccgcacatgcagatgactttatccaggagatggagcacggtatttacacagatgtcggggaaaaaggatcacagctcgccgctggacagaaacagcggctggcaatagccagggctctcgtcagagatcccagagtcctgatcctggacgaagcaacttccgctctcgacgtacagtgcgagcaggcaaacggattttgggtgggcccactcgggggtgggtcggctagcgagtcagacccaactggctttctccatgactctcgtcacagacttagttccgacgtgggaatgtttgtggccctgaccaagcttggccagcccgatgcagagcagtggaattcaagattagatttactggagagatcccgtcaggctgtcgatggtgtgtgccggcacaactataggctcggggctcccttcacagtgggacggaaggtgcagcctgaggtaaccgtctatcccgagcgtaccccccttttgcaccagcataatctcctgcactgcagcgtgactggattttatccaggtgatataaagataaaatggttcctcaatggccaatag

SEQ ID NO: 199996 - DNA, 2310 bp, Artificial Sequence
  derived and/or modified sequence
atgcgactgcccgacctgcgcccatggacaagccttcttttagtggatgcggctctgctctggttgctgcagggtcctctcggtaccttgttacctcaggggctgcctggtctctggcttgaagggacgttgcgcctagggggtttatggggcctacttaagctgcgaggacttctagggtttgtagggacgttgctcctgccactgtgcctggcaacccccttaacagtttctctcagggccttggtagcaggggcttcacgggctcccccagctagagtggcctcagcaccctggagttggctgttggtggggtacggagcggcagggctctcatggagcctgtgggcagtattgtcccccccaggcgcacaagagaaggaacaggatcaggtgaacaacaaagtactgatgtggaggctgttaaagttgtctcgcccagacctcccactgctcgtggcggctttcttctttttggtgctggctgtgctgggagagaccctgatacctcactactccggcagggtcatcgacatcctggggggtgacttcgatcctcacgcctttgcctcggccattttctttatgtgcctgttttccttcggctcctccctcagtgctggatgccggggaggttgttttacgtacacaatgtcacgcatcaacctcagaatcagggagcagctgtttagttcactcttgcggcaggatctgggtttttttcaggagactaagaccggagagctgaattccaggctctcaagcgatacgacactgatgtctaattggctgcccctcaacgccaacgtccttttgcgatcactagttaaggtagttggtctatatggatttatgctcagcatcagcccacggctgacattgctgtccctcttacatatgccctttactatagcagccgagaaggtgtacaacacacgccaccaggaggtgctgagggagattcaggacgcagtcgcgagagccggtcaggtagtccgcgaggctgtcggcggtcttcagactgtgcggtccttcggagctgaggaacacgaggtttgtaggtataaggaagccctcgaacagtgcaggcagctctattggcgccgagatttagagagggcactgtacctactggtacgcagagtgctgcacctcggcgtacagatgcttatgctgagttgcggcctgcagcagatgcaggacggagagttgacccagggcagtctgctctcttttatgatttaccaggaaagcgtcggctcttacgtgcagactctcgtgtatatatatggagatatgctcagtaatgtgggcgcagctgaaaaagtgttttcttatatggatcggcagcccaacttgccatccccaggtacactggcgccaactactttgcagggggttgtgaaattccaggacgtttcctttgcttaccctaacagaccggatcgccctgtgctgaaagggcttacctttactctccgaccaggcgaagtgacggctctcgtcgggcctaacggttcggggaagagcactgtggctgcccttttgcaaaacctttaccaacccaccgggggacaagtgctgcttgacgaaaagccaattagccagtacgaacactgttatctccattcacaggttgtatccgtgggccaggaacctgtgctatttagcggatccgtgcgtaacaatattgcgtatggcctacagtcgtgcgaggacgataaggttatggccgcagcccaagccgcacatgccgatgacttcatacaggagatggaacacggaatctatactgacgtgggtgagaagggcagccagcttgcggcagggcagaagcagcgcctggccatagctagggcacttgtgcgggacccaagagtccttatcttggacgaagcaacctcagccctggacgtgcagtgcgagcaagctaatgggttctgggttggccctttaggtgggggatccgccagcgaatccgatcccactggcttcctgcatgactcgcgacaccgactttcttcagatgtgggcatgtttgttgcactcaccaagttagggcagcctgatgctgagcaatggaattcgagactcgacttgcttgaacgaagccgccaggccgttgatggggtctgtcggcacaattacagactgggagcacctttcaccgttggaagaaaagttcagccagaagttacagtctaccctgaacgcactcccttacttcaccagcataacctccttcactgctctgtgaccgggttctaccccggagatatcaagatcaagtggttcctgaacggacaatag

SEQ ID NO: 199997 - DNA, 2310 bp, Artificial Sequence
  derived and/or modified sequence
atgcggctgccggatcttagaccttggacaagcctgctgctggttgatgcggctttgctgtggctgctgcaagggcctttagggacgctgctgccgcagggactgcctggcctctggctggagggaactctgaggctgggtggcctatggggtcttttgaagcttagaggtctgttaggatttgttggcacccttttgctgcccctgtgcctcgccaccccgcttaccgtgtctcttagggcgctggttgccggtgctagcagggcaccaccggcacgagtggcgagcgcaccctggagctggctgttagtcggttatggcgctgccggattgtcatggtcactctgggccgtccttagccctccaggtgcacaagaaaaagagcaggatcaagtcaataacaaggtactgatgtggagactgctgaaactttcccgcccagacttgccgctcctggtggcggctttcttcttcctagtactggccgttctgggagaaacactgattcctcactattccggccgtgtgattgatatcctgggaggggattttgatccccatgcttttgcctcagctattttcttcatgtgtctcttttccttcggctcctcgctcagcgccggatgcaggggtggatgtttcacttataccatgagtaggatcaacttaaggatccgggaacaactgttctccagtcttctacgacaggatcttggtttctttcaggagactaagaccggtgagctaaattcacgcctgtcgagtgacacgacgttgatgtccaactggttgcccttgaacgccaatgtcctcctgaggtctttggtgaaagtggttggcctgtacggtttcatgctgtccatttctccacgactcacattgttatcactcctgcatatgccctttacgatcgcagccgaaaaagtttacaacactcggcaccaggaagtgttgagagagatccaggacgccgtggctagagctggccaggtggtacgggaggccgtcggaggattgcaaactgtgagaagttttggcgcagaagagcacgaagtttgtcgctataaggaggctctagagcagtgccggcagctatattggaggagggaccttgagagagctctgtatctgctggtgcgccgagttctgcacctcggagtccagatgctcatgctatcctgcgggctgcagcagatgcaggacggcgagctcacccagggaagccttctgtcctttatgatatatcaggaatcggtggggagctatgtgcagactcttgtgtacatctatggagatatgttgtccaatgttggggctgcagagaaggtatttagctatatggatcgtcagcccaacctcccctctcccggaactttggctcctaccactcttcagggagtggtgaagtttcaagatgtgagttttgcctacccaaatcggccagatcgtcccgtgttgaaggggctaactttcaccttgcgacctggtgaggtgactgcactggtaggacccaacgggtcagggaaatcgacggtggccgcactgctgcagaatctctatcagcctaccggtggccaagtcctgctggacgagaagccaatctctcagtacgagcattgctatctgcacagccaggtggtttccgtcgggcaggagcccgtgctgttctcagggtcagtgcgaaataatatagcgtacggtctccagtcttgtgaagatgacaaggtaatggctgccgctcaggctgctcacgccgatgattttattcaggaaatggagcatggaatctacacagatgttggagaaaagggctcccagctcgccgctggccagaaacagcggctggctattgcgcgagcactggtcagggaccctcgcgttcttatattagacgaagcgacctcagctcttgacgtgcagtgcgaacaggccaacggattttgggtgggccctctgggcggaggctccgcttcagagagcgatccgaccgggtttctgcatgatagccgccatcgtttgagttcggacgtgggtatgttcgtggccctgaccaagcttggccagccggacgccgaacagtggaactcacgactagatctgctggagcgctcccggcaggcagtagacggcgtctgtagacacaactaccggctcggggctcctttcaccgtgggaaggaaagtccagccagaggttaccgtctatccagagagaacccccttacttcaccaacataacttactgcattgctctgtgaccgggttctacccaggcgacattaagattaagtggtttcttaatggtcagtag

SEQ ID NO: 199998 - DNA, 2310 bp, Artificial Sequence
  derived and/or modified sequence
atgcggctgccagacctgcgcccttggacatccctgctgttggtagatgcggcactgctttggttgctgcaaggacctctagggacattacttccccagggactccccggtctgtggctcgaggggaccttaagattggggggattatggggacttctgaaactccgaggtttacttggatttgtgggcacactattgctgccactgtgtctcgccacgcctctaaccgtctccctaagggcccttgtagccggtgcgtcccgagcccctcctgcaagggtcgcctctgctccatggagttggctgttggtgggttatggggctgctggcctgagctggtccttgtgggccgttctgtctccacccggtgcgcaggagaaagagcaggatcaagtgaataacaaggtcctaatgtggagattgctgaaactgagccgaccggatctgcctcttttagtggcagcctttttcttccttgtcctcgccgtcctgggggagactctgataccgcactatagcggtagagtgatcgatatcctgggtggggatttcgatcctcatgcctttgcttcagccattttctttatgtgccttttctcctttgggtcatctctctccgcaggctgtagaggtggatgttttacatacacaatgtcccgcatcaatctgcggatccgcgaacagctttttagcagtctgttacgacaggacttgggtttcttccaagaaacaaaaactggggagctgaatagcagattgagctctgacactaccctcatgagcaattggctccctttaaatgctaacgttctccttcgctccctagtgaaggtggtggggctatatggattcatgctgagcataagtccgagactcacacttctgtcacttctgcacatgccctttaccatcgctgcggaaaaggtctacaacactcggcatcaggaggtgctgagggaaattcaggacgccgtagcccgtgcgggacaggtcgtgagggaagctgtggggggtctccaaaccgtccggtcgtttggagctgaagaacatgaagtctgcaggtataaggaggccctggagcagtgccgacagttatactggaggcgcgacctcgaaagagccctttacttactgattcggagggtgctgcacctcggggtacagatgcttatgctcagttgtggtctccagcagatgcaggatggtgagctgacccagggttcactattgagtttcatgatctaccaggaaagcgtgggatcctacgtgcaaaccctggtgtacatatatggggatatgctgtccaatgtcggcgcagccgaaaaggtattttcctacatggataggcagcctaacttaccatcaccaggcacactggcacccacgaccttacaaggcgtggtgaagttccaggacgtcagtttcgcttatccaaatagacctgatcgacccgtgttgaaggggctcaccttcaccctgcggccaggggaagtgaccgcactggtcggaccaaacggcagcggcaagtcaacagtagccgcacttctgcaaaacctgtatcagccaacggggggacaagtgctattggatgaaaaacccatttcccagtatgaacactgctatctgcattcacaggtggtgagcgttggtcaggagccagtgctgttcagcggaagtgtgcgtaataatatcacttatggcctgcagtcttgtgaagatgacaaagttatggcagccgcacaggcagcgcacgctgatgacttcatccaagagatggagcatgggatttacactgatgtaggcgagaagggatcacaactagcggcaggacagaaacagagactcgccatcgcaagagctcttgtcagggatcctagagtgctgatactggatgaagcaaccagtgccctggacgtacagtgcgaacaggctaacggtttttgggtcgggccactgggcggtggttccgcatccgaatccgaccccacaggttttctgcacgattcgaggcatcggctgtcctctgacgtagggatgttcgtggccctcacaaaactcggacaaccagacgcggaacagtggaatagcagattagacttactggagcggtcacgccaagcggtggacggggtctgcagacacaattatagattgggtgcacctttcaccgtgggaagaaaagtgcagcctgaggtgaccgtttaccccgaaagaaccccattactgcatcagcacaacctcctccactgtagcgttaccggtttctatccaggcgatatcaaaatcaagtggttccttaatggtcagtag

SEQ ID NO: 199999 - DNA, 2310 bp, Artificial Sequence
  derived and/or modified sequence
atgcggctgcctgaccttaggccctggacaagtttacttctggtagacgctgctctgctgtggctgcttcaaggccctctgggaacgctcctgccccaagggctgccaggcttatggctggaaggcacattacgcttaggaggcttatggggcttgttgaagctgagaggcttacttgggtttgttggcacattgctgctgcctctgtgcttggctactccacttaccgtgtccctgcgggcactggtggcaggggcttcccgagccccacccgctcgcgtcgcttcagccccatggagttggctgctggtgggctatggagctgccggattatcatggagtctgtgggccgtgctaagcccacctggggctcaggaaaaagagcaggatcaggtgaacaacaaagtcctcatgtggcggctgcttaagctgtcaagacctgatttgccactgttggtggcagcctttttttttttagttttggccgtcctaggtgaaaccctaattccacattattccggccgagtgatagacatcctgggcggagatttcgacccccacgctttcgcttctgctattttctttatgtgtctgttctctttcggatctagcttaagtgcgggttgcagaggcggatgctttacgtatacaatgtctcgtatcaacctgcgtatccgtgagcagttatttagcagccttcttcgccaggatctcggcttcttccaggaaaccaagacaggggagctcaattcgaggctgtcatctgatactactctcatgagcaattggcttcctctcaatgctaacgttctgctgcgatctctggttaaggtggtagggctgtacggtttcatgctctccattagccctcgcctcactttgcttagcctcctgcacatgccctttaccattgcagctgagaaagtatataacaccagacaccaggaggtgcttcgggagatccaagacgcagttgctcgcgcaggccaggtggtgagggaggctgtgggaggcctccaaaccgtgagatcattcggtgccgaggaacacgaggtttgtcgttataaggaggctcttgaacagtgcagacagctttactggcggagggatctggaacgtgcactgtatctgctggtgcgtagagtgctgcacctcggtgtccagatgctaatgctcagctgtggactgcagcagatgcaggacggagagctgactcagggcagtctgctcagcttcatgatctatcaggagagcgttggttcatatgtgcagacacttgtctacatctatggagacatgctgtccaacgtcggagccgctgaaaaagtgtttagttatatggatcgccagcccaatctgccctcacccggaaccctggcgcctaccacactccagggtgtcgtgaagttccaagatgtcagcttcgcatatccaaaccgaccggacagacctgtgttaaagggcctcacctttacactgcggccaggcgaggtgacggcactggtcggccctaatggctccgggaaaagtacagttgccgcattactccagaatctgtaccagcccactggaggacaggtgctcctcgacgaaaagcctatctcgcagtatgagcattgctatctgcactcacaggtagtgtctgtcggccaggaaccggtgctgttctcaggatctgtacgaaacaatatcgcatacgggctccaatcctgtgaagacgataaagtaatggcagcagcacaggctgcacatgctgacgacttcatccaggaaatggagcacggtatctataccgatgtaggagagaagggatcccagctggcagccggtcagaagcagcgcttggcaatcgcacgagctctggtgcgcgatcccagagtcttgatcctggacgaggccacaagcgccctagacgttcagtgcgaacaagctaatgggttctgggttggacccctggggggtggctcagcctctgagtctgacccaactgggtttttgcatgattcccggcatcgtttaagttctgacgtgggcatgtttgtagcactgacaaaactggggcagccagacgcggagcagtggaattcgcgcttagacctcctggaaagatctcgccaggcagtagatggggtctgccgccataactacagactcggtgcaccattcacagttggtcgaaaagtgcagcccgaggttactgtgtatcctgaacggaccccattgctacatcagcacaatcttctgcactgttctgtgacaggcttttaccccggtgatattaagatcaagtggttcttgaatgggcagtag

SEQ ID NO: 200000 - DNA, 2310 bp, Artificial Sequence
  derived and/or modified sequence
atgaggttacccgaccttcgaccctggacaagtctgctgctcgtggatgcggctctgctgtggctgttacaggggccactgggcacccttttgcctcagggtctacccggtctgtggctggaaggcacactaaggttaggcggtctctggggcctgttaaagctccggggtctcctggggttcgtcggaacccttctgttgcccctctgtctagctactcctctgaccgtgtcccttagagccctggtggccggtgcaagccgcgctcctcctgccagggttgccagcgcgccttggtcctggcttcttgtggggtacggagctgcgggactgtcatggtccctgtgggcggttctcagccccccaggcgcacaagaaaaggagcaggaccaagtcaacaataaagtgctgatgtggcggctgcttaaattaagtagacctgacctgcccctgctagtcgctgcatttttcttcctcgtgttggccgtgctcggcgagactcttatcccccattacagcggaagagttattgacatcctcggcggagattttgatccgcacgcgtttgccagcgccatttttttcatgtgcctgttctcgtttggcagcagcctctctgcaggttgcagagggggttgcttcacctacactatgtcccgtatcaatttgcggatccgggaacaattattctccagcctgctgcgacaggacctgggattctttcaggagacaaagacaggggagctgaacagccggcttagctctgataccacgttgatgtccaattggttgcccctgaatgcaaatgtgctgctgcgttctcttgtaaaggtggttggcctctatggatttatgctgagcatttcacctcgtttgacgttgctctctctgctccacatgcccttcaccattgctgcggagaaagtgtacaacaccaggcatcaggaggtactaagagaaatccaggacgccgtggcccgagctggccaggtggtccgagaggccgtggggggtctgcagacagtccgatcattcggggctgaggaacacgaagtttgtcgttacaaggaggcgttagagcaatgtaggcagctatactggaggcgagatctggagcgggcactctaccttttagtgcgaagggtgttgcacctcggcgttcagatgcttatgttatcatgcggactgcaacaaatgcaggatggagagttaacccagggctccctcctctcgtttatgatttatcaagagtccgtcggatcatacgtgcaaacactggtctacatctatggggatatgttgtctaatgtgggcgctgccgagaaggtgttttcatatatggatcgtcaacctaaccttccctctccagggaccctggcacctactaccctgcaaggcgttgtgaagttccaggatgtgagtttcgcgtaccctaatcggccagatcgacctgttctgaaaggcctgacgtttactctaaggcccggtgaggtgactgctttggtaggacctaatggatccggaaaatctacagtagcagctctcctccagaatttataccagccaaccggaggacaagtgcttctggatgagaagcctattagtcagtatgaacattgttatctgcacagccaagtggtttcggtcggacaggaacctgtgctgttttcaggctccgtgcgcaataatatcgcctacggcctgcagagctgtgaagacgacaaagtgatggctgccgcacaggccgcacacgcagatgactttatccaagagatggaacacggcatttacaccgatgtcggtgaaaagggatcccagctagccgcaggccagaagcagcgattggccatcgcgagagccctggtgagggaccccagggtccttattctggatgaggctacctctgccctggatgtgcagtgtgagcaggcaaatggcttctgggtgggacccctgggaggcggttcggcatctgagagcgacccaactggctttttacatgattccaggcaccgcctgtcctcagacgttggcatgttcgtggcactgacaaagttgggtcagccagacgccgaacaatggaattctcggctggacctcctagagcggagcagacaggccgtggacggggtgtgtcgtcataactatagattgggagcaccatttacagtgggacgaaaggtgcaaccagaggtaacggtgtaccctgaacggacgcctcttctgcaccaacacaatctcctgcactgctctgtgactgggttctatcccggagatatcaagatcaagtggtttctaaatggacagtag

SEQ ID NO: 200001 - DNA, 2497 bp, Artificial Sequence
  derived and/or modified sequence
gaggttgggagagacggagcggacctcagcgctgaagcagaagtccccggagctgcggtctccccgccgcggctgagccatgcggctccctgacctgagaccctggacctccctgctgctggtggacgcggctttactgtggctgcttcagggccctctggggactttgcttcctcaagggctgccaggactatggctggaggggaccctgcggctgggagggctgtgggggctgctaaagctaagagggctgctgggatttgtggggacactgctgctcccgctctgtctggccacccccctgactgtctccctgagagccctggtcgcgggggcctcacgtgctcccccagccagagtcgcttcagccccttggagctggctgctggtggggtacggggctgcggggctcagctggtcactgtgggctgttctgagccctcctggagcccaggagaaggagcaggaccaggtgaacaacaaagtcttgatgtggaggctgctgaagctctccaggccggacctgcctctcctcgttgccgccttcttcttccttgtccttgctgttttgggtgagacattaatccctcactattctggtcgtgtgattgacatcctgggaggtgattttgacccccatgcctttgccagtgccatcttcttcatgtgcctcttctcctttggcagctcactgtctgcaggctgccgaggaggctgcttcacctacaccatgtctcgaatcaacttgcggatccgggagcagcttttctcctccctgctgcgccaggacctcggtttcttccaggagactaagacaggggagctgaactcacggctgagctcggataccaccctgatgagtaactggcttcctttaaatgccaatgtgctcttgcgaagcctggtgaaagtggtggggctgtatggcttcatgctcagcatatcgcctcgactcaccctcctttctctgctgcacatgcccttcacaatagcagcggagaaggtgtacaacacccgccatcaggaagtgcttcgggagatccaggatgcagtggccagggcggggcaggtggtgcgggaagccgttggagggctgcagaccgttcgcagttttggggccgaggagcatgaagtctgtcgctataaagaggcccttgaacaatgtcggcagctgtattggcggagagacctggaacgcgccttgtacctgctcgtaaggagggtgctgcacttgggggtgcagatgctgatgctgagctgtgggctgcagcagatgcaggatggggagctcacccagggcagcctgctttcctttatgatctaccaggagagcgtggggagctatgtgcagaccctggtatacatatatggggatatgctcagcaacgtgggagctgcagagaaggttttctcctacatggaccgacagccaaatctgccttcacctggcacgcttgcccccaccactctgcagggggttgtgaaattccaagacgtctcctttgcatatcccaatcgccctgacaggcctgtgctcaaggggctgacgtttaccctacgtcctggtgaggtgacggcgctggtgggacccaatgggtctgggaagagcacagtggctgccctgctgcagaatctgtaccagcccacagggggacaggtgctgctggatgaaaagcccatctcacagtatgaacactgctacctgcacagccaggtggtttcagttgggcaggagcctgtgctgttctccggttctgtgaggaacaacattgcttatgggctgcagagctgcgaagatgataaggtgatggcggctgcccaggctgcccacgcagatgacttcatccaggaaatggagcatggaatatacacagatgtaggggagaagggaagccagctggctgcgggacagaaacaacgtctggccattgcccgggcccttgtacgagacccgcgggtcctcatcctggatgaggctactagtgccctagatgtgcagtgcgagcaggccaaaaccctttggaagttcatgatattttgaatttcaatggatatttcctgggaataatgagttcaaatgaacgaatatgtggaacaaagcatcaccaacatttattttttcaggatgaggtgatggacaaaaccatcacagggaaattgaggcaaatagtacatgtaaaacaatacttcgggtgagtccacctatcccaaagtcgtatcaaagaagtggctgcagattggagcccaaagcctttggttcctcagtttccaaatggattctcactaggtgggatcatgagtttgctttggacaccccaaattctaactatttcttttgtttcttacatcctttccctcttccccagccccttcccctcatgttacacctcttgctggtttgagacgtcaatcaccactgagaaagaattaaaccagtattttgagctggcaaaattcttagcctagtacaattccttcaattaaactgtagctcaac

SEQ ID NO: 200002 - DNA, 2497 bp, Artificial Sequence
  derived and/or modified sequence
gaggttgggagagacggagcggacctcagcgctgaagcagaagtccccggagctgcggtctccccgccgcggctgagccatgcggctccctgacctgagaccctggacctccctgctgctggtggacgcggctttactgtggctgcttcagggccctctggggactttgcttcctcaagggctgccaggactatggctggaggggaccctgcggctgggagggctgtgggggctgctaaagctaagagggctgctgggatttgtggggacactgctgctcccgctctgtctggccacccccctgactgtctccctgagagccctggtcgcgggggcctcacgtgctcccccagccagagtcgcttcagccccttggagctggctgctggtggggtacggggctgcggggctcagctggtcactgtgggctgttctgagccctcctggagcccaggagaaggagcaggaccaggtgaacaacaaagtcttgatgtggaggctgctgaagctctccaggccggacctgcctctcctcgttgccgccttcttcttccttgtccttgctgttttgggtgagacattaatccctcactattctggtcgtgtgattgacatcctgggaggtgattttgacccccatgcctttgccagtgccatcttcttcatgtgcctcttctcctttggcagctcactgtctgcaggctgccgaggaggctgcttcacctacaccatgtctcgaatcaacttgcggatccgggagcagcttttctcctccctgctgcgccaggacctcggtttcttccaggagactaagacaggggagctgaactcacggctgagctcggataccaccctgatgagtaactggcttcctttaaatgccaatgtgctcttgcgaagcctggtgaaagtggtggggctgtatggcttcatgctcagcatatcgcctcgactcaccctcctttctctgctgcacatgcccttcacaatagcagcggagaaggtgtacaacacccgccatcaggaagtgcttcgggagatccaggatgcagtggccagggcggggcaggtggtgcgggaagccgttggagggctgcagaccgttcgcagttttggggccgaggagcatgaagtctgtcgctataaagaggcccttgaacaatgtcggcagctgtattggcggagagacctggaacgcgccttgtacctgctcgtaaggagggtgctgcacttgggggtgcagatgctgatgctgagctgtgggctgcagcagatgcaggatggggagctcacccagggcagcctgctttcctttatgatctaccaggagagcgtggggagctatgtgcagaccctggtatacatatatggggatatgctcagcaacgtgggagctgcagagaaggttttctcctacatggaccgacagccaaatctgccttcacctggcacgcttgcccccaccactctgcagggggttgtgaaattccaagacgtctcctttgcatatcccaatcgccctgacaggcctgtgctcaaggggctgacgtttaccctacgtcctggtgaggtgacggcgctggtgggacccaatgggtctgggaagagcacagtggctgccctgctgcagaatctgtaccagcccacagggggacaggtgctgctggatgaaaagcccatctcacagtatgaacactgctacctgcacagccaggtggtttcagttgggcaggagcctgtgctgttctccggttctgtgaggaacaacattgcttatgggctgcagagctgcgaagatgataaggtgatggcggctgcccaggctgcccacgcagatgacttcatccaggaaatggagcatggaatatacacagatgtaggggagaagggaagccagctggctgcgggacagaaacaacgtctggccattgcccgggcccttgtacgagacccgcgggtcctcatcctggatgaggctactagtgccctagatgtgcagtgcgagcaggccaaaaccctttggaagttcatgatattttgaatttcagtggatatttcctgggaataatgagttcaaatgaacgaatatgtggaacaaagcatcaccaacatttattttttcaggatgaggtgatggacaaaaccatcacagggaaattgaggcaaatagtacatgtaaaacaatacttcgggtgagtccacctatcccaaagtcgtatcaaagaagtggctgcagattggagcccaaagcctttggttcctcagtttccaaatggattctcactaggtgggatcatgagtttgctttggacaccccaaattctaactatttcttttgtttcttacatcctttccctcttccccagccccttcccctcatgttacacctcttgctggtttgagacgtcaatcaccactgagaaagaattaaaccagtattttgagctggcaaaattcttagcctagtacaattccttcaattaaactgtagctcaac

SEQ ID NO: 200003 - DNA, 2497 bp, Artificial Sequence
  derived and/or modified sequence
gaggttgggagagacggagcggacctcagcgctgaagcagaagtccccggagctgcggtctccccgccgcggctgagccatgcggctccctgacctgagaccctggacctccctgctgctggtggacgcggctttactgtggctgcttcagggccctctggggactttgcttcctcaagggctgccaggactatggctggaggggaccctgcggctgggagggctgtgggggctgctaaagctaagagggctgctgggatttgtggggacactgctgctcccgctctgtctggccacccccctgactgtctccctgagagccctggtcgcgggggcctcacgtgctcccccagccagagtcgcttcagccccttggagctggctgctggtggggtacggggctgcggggctcagctggtcactgtgggctgttctgagccctcctggagcccaggagaaggagcaggaccaggtgaacaacaaagtcttgatgtggaggctgctgaagctctccaggccggacctgcctctcctcgttgccgccttcttcttccttgtccttgctgttttgggtgagacattaatccctcactattctggtcgtgtgattgacatcctgggaggtgattttgacccccatgcctttgccagtgccatcttcttcatgtgcctcttctcctttggcagctcactgtctgcaggctgccgaggaggctgcttcacctacaccatgtctcgaatcaacttgcggatccgggagcagcttttctcctccctgctgcgccaggacctcggtttcttccaggagactaagacaggggagctgaactcacggctgagctcggataccaccctgatgagtaactggcttcctttaaatgccaatgtgctcttgcgaagcctggtgaaagtggtggggctgtatggcttcatgctcagcatatcgcctcgactcaccctcctttctctgctgcacatgcccttcacaatagcagcggagaaggtgtacaacacccgccatcaggaagtgcttcgggagatccaggatgcagtggccagggcggggcaggtggtgcgggaagccgttggagggctgcagaccgttcgcagttttggggccgaggagcatgaagtctgtcgctataaagaggcccttgaacaatgtcggcagctgtattggcggagagacctggaacgcgccttgtacctgctcgtaaggagggtgctgcacttgggggtgcagatgctgatgctgagctgtgggctgcagcagatgcaggatggggagctcacccagggcagcctgctttcctttatgatctaccaggagagcgtggggagctatgtgcagaccctggtatacatatatggggatatgctcagcaatgtgggagctgcagagaaggttttctcctacatggaccgacagccaaatctgccttcacctggcacgcttgcccccaccactctgcagggggttgtgaaattccaagacgtctcctttgcatatcccaatcgccctgacaggcctgtgctcaaggggctgacgtttaccctacgtcctggtgaggtgacggcgctggtgggacccaatgggtctgggaagagcacagtggctgccctgctgcagaatctgtaccagcccacagggggacaggtgctgctggatgaaaagcccatctcacagtatgaacactgctacctgcacagccaggtggtttcagttgggcaggagcctgtgctgttctccggttctgtgaggaacaacattgcttatgggctgcagagctgcgaagatgataaggtgatggcggctgcccaggctgcccacgcagatgacttcatccaggaaatggagcatggaatatacacagatgtaggggagaagggaagccagctggctgcgggacagaaacaacgtctggccattgcccgggcccttgtacgagacccgcgggtcctcatcctggatgaggctactagtgccctagatgtgcagtgcgagcaggccaaaaccctttggaagttcatgatattttgaatttcaatggatatttcctgggaataatgagttcaaatgaacgaatatgtggaacaaagcatcaccaacatttattttttcaggatgaggtgatggacaaaaccatcacagggaaattgaggcaaatagtacatgtaaaacaatacttcgggtgagtccacctatcccaaagtcgtatcaaagaagtggctgcagattggagcccaaagcctttggttcctcagtttccaaatggattctcactaggtgggatcatgagtttgctttggacaccccaaattctaactatttcttttgtttcttacatcctttccctcttccccagccccttcccctcatgttacacctcttgctggtttgagacgtcaatcaccactgagaaagaattaaaccagtattttgagctggcaaaattcttagcctagtacaattccttcaattaaactgtagctcaac

SEQ ID NO: 200004 - DNA, 2497 bp, Artificial Sequence
  derived and/or modified sequence
gaggttgggagagacggagcggacctcagcgctgaagcagaagcccccggagctgcggtctccccgccgcggctgagccatgcggctccctgacctgagaccctggacctccctgctgctggtggacgcggctttactgtggctgcttcagggccctctggggactttgcttcctcaagggctgccaggactatggctggaggggaccctgcggctgggagggctgtgggggctgctaaagctaagagggctgctgggatttgtggggacactgctgctcccgctctgtctggccacccccctgactgtctccctgagagccctggtcgcgggggcctcacgtgctcccccagccagagtcgcttcagccccttggagctggctgctggtggggtacggggctgcggggctcagctggtcactgtgggctgttctgagccctcctggagcccaggagaaggagcaggaccaggtgaacaacaaagtcttgatgtggaggctgctgaagctctccaggccggacctgcctctcctcgttgccgccttcttcttccttgtccttgctgttttgggtgagacattaatccctcactattctggtcgtgtgattgacatcctgggaggtgattttgacccccatgcctttgccagtgccatcttcttcatgtgcctcttctcctttggcagctcactgtctgcaggctgccgaggaggctgcttcacctacaccatgtctcgaatcaacttgcggatccgggagcagcttttctcctccctgctgcgccaggacctcggtttcttccaggagactaagacaggggagctgaactcacggctgagctcggataccaccctgatgagtaactggcttcctttaaatgccaatgtgctcttgcgaagcctggtgaaagtggtggggctgtatggcttcatgctcagcatatcgcctcgactcaccctcctttctctgctgcacatgcccttcacaatagcagcggagaaggtgtacaacacccgccatcaggaagtgcttcgggagatccaggatgcagtggccagggcggggcaggtggtgcgggaagccgttggagggctgcagaccgttcgcagttttggggccgaggagcatgaagtctgtcgctataaagaggcccttgaacaatgtcggcagctgtattggcggagagacctggaacgcgccttgtacctgctcgtaaggagggtgctgcacttgggggtgcagatgctgatgctgagctgtgggctgcagcagatgcaggatggggagctcacccagggcagcctgctttcctttatgatctaccaggagagcgtggggagctatgtgcagaccctggtatacatatatggggatatgctcagcaacgtgggagctgcagagaaggttttctcctacatggaccgacagccaaatctgccttcacctggcacgcttgcccccaccactctgcagggggttgtgaaattccaagacgtctcctttgcatatcccaatcgccctgacaggcctgtgctcaaggggctgacgtttaccctacgtcctggtgaggtgacggcgctggtgggacccaatgggtctgggaagagcacagtggctgccctgctgcagaatctgtaccagcccacagggggacaggtgctgctggatgaaaagcccatctcacagtatgaacactgctacctgcacagccaggtggtttcagttgggcaggagcctgtgctgttctccggttctgtgaggaacaacattgcttatgggctgcagagctgcgaagatgataaggtgatggcggctgcccaggctgcccacgcagatgacttcatccaggaaatggagcatggaatatacacagatgtaggggagaaggggagccagctggctgcgggacagaaacaacgtctggccattgcccgggcccttgtacgagacccgcgggtcctcatcctggatgaggctactagtgccctagatgtgcagtgcgagcaggccaaaaccctttggaagttcatgatattttgaatttcaatggatatttcctgggaataatgagttcaaatgaacgaatatgtggaacaaagcatcaccaacatttattttttcaggatgaggtgatggacaaaaccatcacagggaaattgaggcaaatagtacatgtaaaacaatacttcgggtgagtccacctatcccaaagtcgtatcaaagaagtggctgcagattggagcccaaagcctttggttcctcagtttccaaatggattctcactaggtgggatcatgagtttgctttggacaccccaaattctaactatttcttttgtttcttacatcctttccctcttccccagccccttcccctcatgttacacctcttgctggtttgagacgtcaatcaccactgagaaagaattaaaccagtattttgagctggcaaaattcttagcctagtacaattccttcaattaaactgtagctcaac

SEQ ID NO: 200005 - DNA, 2497 bp, Artificial Sequence
  derived and/or modified sequence
gaggttgggagagacggagcggacctcagcgctgaagcagaagcccccggagctgcggtctccccgccgcggctgagccatgcggctccctgacctgagaccctggacctccctgctgctggtggacgcggctttactgtggctgcttcagggccctctggggactttgcttcctcaagggctgccaggactatggctggaggggaccctgcggctgggagggctgtgggggctgctaaagctaagagggctgctgggatttgtggggacactgctgctcccgctctgtctggccacccccctgactgtctccctgagagccctggtcgcgggggcctcacgtgctcccccagccagagtcgcttcagccccttggagctggctgctggtggggtacggggctgcggggctcagctggtcactgtgggctgttctgagccctcctggagcccaggagaaggagcaggaccaggtgaacaacaaagtcttgatgtggaggctgctgaagctctccaggccggacctgcctctcctcgttgccgccttcttcttccttgtccttgctgttttgggtgagacattaatccctcactattctggtcgtgtgattgacatcctgggaggtgattttgacccccatgcctttgccagtgccatcttcttcatgtgcctcttctcctttggcagctcactgtctgcaggctgccgaggaggctgcttcacctacaccatgtctcgaatcaacttgcggatccgggagcagcttttctcctccctgctgcgccaggacctcggtttcttccaggagactaagacaggggagctgaactcacggctgagctcggataccaccctgatgagtaactggcttcctttaaatgccaatgtgctcttgcgaagcctggtgaaagtggtggggctgtatggcttcatgctcagcatatcgcctcgactcaccctcctttctctgctgcacatgcccttcacaatagcagcggagaaggtgtacaacacccgccatcaggaagtgcttcgggagatccaggatgcagtggccagggcggggcaggtggtgcgggaagccgttggagggctgcagaccgttcgcagttttggggccgaggagcatgaagtctgtcgctataaagaggcccttgaacaatgtcggcagctgtattggcggagagacctggaacgcgccttgtacctgctcataaggagggtgctgcacttgggggtgcagatgctgatgctgagctgtgggctgcagcagatgcaggatggggagctcacccagggcagcctgctttcctttatgatctaccaggagagcgtggggagctatgtgcagaccctggtatacatatatggggatatgctcagcaacgtgggagctgcagagaaggttttctcctacatggaccgacagccaaatctgccttcacctggcacgcttgcccccaccactctgcagggggttgtgaaattccaagacgtctcctttgcatatcccaatcgccctgacaggcctgtgctcaaggggctgacgtttaccctacgtcctggtgaggtgacggcgctggtgggacccaatgggtctgggaagagcacagtggctgccctgctgcagaatctgtaccagcccacagggggacaggtgctgctggatgaaaagcccatctcacagtatgaacactgctacctgcacagccaggtggtttcagttgggcaggagcctgtgctgttctccggttctgtgaggaacaacattacttatgggctgcagagctgcgaagatgataaggtgatggcggctgcccaggctgcccacgcagatgacttcatccaggaaatggagcatggaatatacacagatgtaggggagaagggaagccagctggctgcgggacagaaacaacgtctggccattgcccgggcccttgtacgagacccgcgggtcctcatcctggatgaggctactagtgccctagatgtgcagtgcgagcaggccaaaaccctttggaagttcatgatattttgaatttcaatggatatttcctgggaataatgagttcaaatgaacgaatatgtggaacaaagcatcaccaacatttattttttcaggatgaggtgatggacaaaaccatcacagggaaattgaggcaaatagtacatgtaaaacaatacttcgggtgagtccacctatcccaaagtcgtatcaaagaagtggctgcagattggagcccaaagcctttggttcctcagtttccaaatggattctcactaggtgggatcatgagtttgctttggacaccccaaattctaactatttcttttgtttcttacatcctttccctcttccccagccccttcccctcatgttacacctcttgctggtttgagacgtcaatcaccactgagaaagaattaaaccagtattttgagctggcaaaattcttagcctagtacaattccttcaattaaactgtagctcaac

SEQ ID NO: 200006 - DNA, 2705 bp, Artificial Sequence
  derived and/or modified sequence
gaatgaaggccttggttggggaaacgaaagcgaaagctgcccgagccctgacgcccgccctggccgagcgtagctggcggaccagagccggtagcgaggttgggagagacggagcggacctcagcgctgaagcagaagcccccggagctgcggtctccccgccgcggctgagccatgcggctccctgacctgagaccctggacctccctgctgctggtggacgcggctttactgtggctgcttcagggccctctggggactttgcttcctcaagggctgccaggactatggctggaggggaccctgcggctgggagggctgtgggggctgctaaagctaagagggctgctgggatttgtggggacactgctgctcccgctctgtctggccacccccctgactgtctccctgagagccctggtcgcgggggcctcacgtgctcccccagccagagtcgcttcagccccttggagctggctgctggtggggtacggggctgcggggctcagctggtcactgtgggctgttctgagccctcctggagcccaggagaaggagcaggaccaggtgaacaacaaagtcttgatgtggaggctgctgaagctctccaggccggacctgcctctcctcgttgccgccttcttcttccttgtccttgctgttttgggtgagacattaatccctcactattctggtcgtgtgattgacatcctgggaggtgattttgacccccatgcctttgccagtgccatcttcttcatgtgcctcttctcctttggcagctcactgtctgcaggctgccgaggaggctgcttcacctacaccatgtctcgaatcaacttgcggatccgggagcagcttttctcctccctgctgcgccaggacctcggtttcttccaggagactaagacaggggagctgaactcacggctgagctcggataccaccctgatgagtaactggcttcctttaaatgccaatgtgctcttgcgaagcctggtgaaagtggtggggctgtatggcttcatgctcagcatatcgcctcgactcaccctcctttctctgctgcacatgcccttcacaatagcagcggagaaggtgtacaacacccgccatcaggaagtgcttcgggagatccaggatgcagtggccagggcggggcaggtggtgcgggaagccgttggagggctgcagaccgttcgcagttttggggccgaggagcatgaagtctgtcgctataaagaggcccttgaacaatgtcggcagctgtattggcggagagacctggaacgcgccttgtacctgctcgtaaggagggtgctgcacttgggggtgcagatgctgatgctgagctgtgggctgcagcagatgcaggatggggagctcacccagggcagcctgctttcctttatgatctaccaggagagcgtggggagctatgtgcagaccctggtatacatatatggggatatgctcagcaacgtgggagctgcagagaaggttttctcctacatggaccgacagccaaatctgccttcacctggcacgcttgcccccaccactctgcagggggttgtgaaattccaagacgtctcctttgcatatcccaatcgccctgacaggcctgtgctcaaggggctgacgtttaccctacgtcctggtgaggtgacggcgctggtgggacccaatgggtctgggaagagcacagtggctgccctgctgcagaatctgtaccagcccacagggggacaggtgctgctggatgaaaagcccatctcacagtatgaacactgctacctgcacagccaggtggtttcagttgggcaggagcctgtgctgttctccggttctgtgaggaacaacattgcttatgggctgcagagctgcgaagatgataaggtgatggcggctgcccaggctgcccacgcagatgacttcatccaggaaatggagcatggaatatacacagatgtaggggagaaggggagccagctggctgcgggacagaaacaacgtctggccattgcccgggcccttgtacgagacccgcgggtcctcatcctggatgaggctactagtgccctagatgtgcagtgcgagcaggccaatgggttctgggtgggtcccctgggtggtggctctgctagtgaatctgacccgactggattcctccatgactcaaggcacagactctccagtgatgtggggatgtttgtggcattgaccaagctggggcagccagatgctgagcagtggaacagccggctggatctcttggagaggagcagacaggccgtggatggggtctgtagacacaactacaggctgggcgcacccttcactgtggggagaaaagtgcaaccagaggtgacagtgtacccagagaggaccccactcctgcaccagcataatctgctgcactgctctgtgacaggcttctatccaggggatatcaagatcaagtggttcctgaatgggcaggaggagagagctggggtcatgtccactggccctatcaggaatggagactggacctttcagactgtggtgatgctagaaatgactcctgaacttggacatgtctacacctgccttgtcgatcactccagcctgctgagccctgtttctgtggagtggagagctcagtctgaatattcttggagaaagatgctgagtggcattgcagccttcctacttgggctaat

SEQ ID NO: 200007 - DNA, 2705 bp, Artificial Sequence
  derived and/or modified sequence
gaatgaaggccttggctggggaagcgaaagcgaaagctgcccgagccctgacgcccgccctggccgagcgtagctggcggaccagagccggtagcgaggttgggagagacggagcggacctcagcgctgaagcagaagtccccggagctgcggtctccccgccgcggctgagccatgcggctccctgacctgagaccctggacctccctgctgctggtggacgcggctttactgtggctgcttcagggccctctggggactttgcttcctcaagggctgccaggactatggctggaggggaccctgcggctgggagggctgtgggggctgctaaagctaagagggctgctgggatttgtggggacactgctgctcccgctctgtctggccacccccctgactgtctccctgagagccctggtcgcgggggcctcacgtgctcccccagccagagtcgcttcagccccttggagctggctgctggtggggtacggggctgcggggctcagctggtcactgtgggctgttctgagccctcctggagcccaggagaaggagcaggaccaggtgaacaacaaagtcttgatgtggaggctgctgaagctctccaggccggacctgcctctcctcgttgccgccttcttcttccttgtccttgctgttttgggtgagacattaatccctcactattctggtcgtgtgattgacatcctgggaggtgattttgacccccatgcctttgccagtgccatcttcttcatgtgcctcttctcctttggcagctcactgtctgcaggctgccgaggaggctgcttcacctacaccatgtctcgaatcaacttgcggatccgggagcagcttttctcctccctgctgcgccaggacctcggtttcttccaggagactaagacaggggagctgaactcacggctgagctcggataccaccctgatgagtaactggcttcctttaaatgccaatgtgctcttgcgaagcctggtgaaagtggtggggctgtatggcttcatgctcagcatatcgcctcgactcaccctcctttctctgctgcacatgcccttcacaatagcagcggagaaggtgtacaacacccgccatcaggaagtgcttcgggagatccaggatgcagtggccagggcggggcaggtggtgcgggaagccgttggagggctgcagaccgttcgcagttttggggccgaggagcatgaagtctgtcgctataaagaggcccttgaacaatgtcggcagctgtattggcggagagacctggaacgcgccttgtacctgctcgtaaggagggtgctgcacttgggggtgcagatgctgatgctgagctgtgggctgcagcagatgcaggatggggagctcacccagggcagcctgctttcctttatgatctaccaggagagcgtggggagctatgtgcagaccctggtatacatatatggggatatgctcagcaatgtgggagctgcagagaaggttttctcctacatggaccgacagccaaatctgccttcacctggcacgcttgcccccaccactctgcagggggttgtgaaattccaagacgtctcctttgcatatcccaatcgccctgacaggcctgtgctcaaggggctgacgtttaccctacgtcctggtgaggtgacggcgctggtgggacccaatgggtctgggaagagcacagtggctgccctgctgcagaatctgtaccagcccacagggggacaggtgctgctggatgaaaagcccatctcacagtatgaacactgctacctgcacagccaggtggtttcagttgggcaggagcctgtgctgttctccggttctgtgaggaacaacattgcttatgggctgcagagctgcgaagatgataaggtgatggcggctgcccaggctgcccacgcagatgacttcatccaggaaatggagcatggaatatacacagatgtaggggagaagggaagccagctggctgcgggacagaaacaacgtctggccattgcccgggcccttgtacgagacccgcgggtcctcatcctggatgaggctactagtgccctagatgtgcagtgcgagcaggccaatgggttctgggtgggtcccctgggtggtggctctgctagtgaatctgacccgactggattcctccatgactcaaggcacagactctccagtgatgtggggatgtttgtggcattgaccaagctggggcagccagatgctgagcagtggaacagccggctggatctcttggagaggagcagacaggccgtggatggggtctgtagacacaactacaggctgggcgcacccttcactgtggggagaaaagtgcaaccagaggtgacagtgtacccagagaggaccccactcctgcaccagcataatctgctgcactgctctgtgacaggcttctatccaggggatatcaagatcaagtggttcctgaatgggcaggaggagagagctggggtcatgtccactggccctatcaggaatggagactggacctttcagactgtggtgatgctagaaatgactcctgaacttggacatgtctacacctgccttgtcgatcactccagcctgctgagccctgtttctgtggagtggagagctcagtctgaatattcttggagaaagatgctgagtggcattgcagccttcctacttgggctaat

SEQ ID NO: 200008 - DNA, 2705 bp, Artificial Sequence
  derived and/or modified sequence
gaatgaaggccttggttggggaaacgaaagcgaaagctgcccgagccctgacgcccgccctggccgagcgtagctggcggaccagagccggtagcgaggttgggagagacggagcggacctcagcgctgaagcagaagcccccggagctgcggtctccccgccgcggctgagccatgcggctccctgacctgagaccctggacctccctgctgctggtggacgcggctttactgtggctgcttcagggccctctggggactttgcttcctcaagggctgccaggactatggctggaggggaccctgcggctgggagggctgtgggggctgctaaagctaagagggctgctgggatttgtggggacactgctgctcccgctctgtctggccacccccctgactgtctccctgagagccctggtcgcgggggcctcacgtgctcccccagccagagtcgcttcagccccttggagctggctgctggtggggtacggggctgcggggctcagctggtcactgtgggctgttctgagccctcctggagcccaggagaaggagcaggaccaggtgaacaacaaagtcttgatgtggaggctgctgaagctctccaggccggacctgcctctcctcgttgccgccttcttcttccttgtccttgctgttttgggtgagacattaatccctcactattctggtcgtgtgattgacatcctgggaggtgattttgacccccatgcctttgccagtgccatcttcttcatgtgcctcttctcctttggcagctcactgtctgcaggctgccgaggaggctgcttcacctacaccatgtctcgaatcaacttgcggatccgggagcagcttttctcctccctgctgcgccaggacctcggtttcttccaggagactaagacaggggagctgaactcacggctgagctcggataccaccctgatgagtaactggcttcctttaaatgccaatgtgctcttgcgaagcctggtgaaagtggtggggctgtatggcttcatgctcagcatatcgcctcgactcaccctcctttctctgctgcacatgcccttcacaatagcagcggagaaggtgtacaacacccgccatcaggaagtgcttcgggagatccaggatgcagtggccagggcggggcaggtggtgcgggaagccgttggagggctgcagaccgttcgcagttttggggccgaggagcatgaagtctgtcgctataaagaggcccttgaacaatgtcggcagctgtattggcggagagacctggaacgcgccttgtacctgctcataaggagggtgctgcacttgggggtgcagatgctgatgctgagctgtgggctgcagcagatgcaggatggggagctcacccagggcagcctgctttcctttatgatctaccaggagagcgtggggagctatgtgcagaccctggtatacatatatggggatatgctcagcaacgtgggagctgcagagaaggttttctcctacatggaccgacagccaaatctgccttcacctggcacgcttgcccccaccactctgcagggggttgtgaaattccaagacgtctcctttgcatatcccaatcgccctgacaggcctgtgctcaaggggctgacgtttaccctacgtcctggtgaggtgacggcgctggtgggacccaatgggtctgggaagagcacagtggctgccctgctgcagaatctgtaccagcccacagggggacaggtgctgctggatgaaaagcccatctcacagtatgaacactgctacctgcacagccaggtggtttcagttgggcaggagcctgtgctgttctccggttctgtgaggaacaacattacttatgggctgcagagctgcgaagatgataaggtgatggcggctgcccaggctgcccacgcagatgacttcatccaggaaatggagcatggaatatacacagatgtaggggagaagggaagccagctggctgcgggacagaaacaacgtctggccattgcccgggcccttgtacgagacccgcgggtcctcatcctggatgaggctactagtgccctagatgtgcagtgcgagcaggccaatgggttctgggtgggtcccctgggtggtggctctgctagtgaatctgacccgactggattcctccatgactcaaggcacagactctccagtgatgtggggatgtttgtggcattgaccaagctggggcagccagatgctgagcagtggaacagccggctggatctcttggagaggagcagacaggccgtggatggggtctgtagacacaactacaggctgggcgcacccttcactgtggggagaaaagtgcaaccagaggtgacagtgtacccagagaggaccccactcctgcaccagcataatctgctgcactgctctgtgacaggcttctatccaggggatatcaagatcaagtggttcctgaatgggcaggaggagagagctggggtcatgtccactggccctatcaggaatggagactggacctttcagactgtggtgatgctagaaatgactcctgaacttggacatgtctacacctgccttgtcgatcactccagcctgctgagccctgtttctgtggagtggagagctcagtctgaatattcttggagaaagatgctgagtggcattgcagccttcctacttgggctaat

SEQ ID NO: 200009 - DNA, 2705 bp, Artificial Sequence
  derived and/or modified sequence
gaatgaaggccttggttggggaaacgaaagcgaaagctgcccgagccctgacgcccgccctggccgagcgtagctggcggaccagagccggtagcgaggttgggagagacggagcggacctcagcgctgaagcagaagcccccggagctgcggtctccccgccgcggctgagccatgcggctccctgacctgagaccctggacctccctgctgctggtggacgcggctttactgtggctgcttcagggccctctggggactttgcttcctcaagggctgccaggactatggctggaggggaccctgcggctgggagggctgtgggggctgctaaagctaagagggctgctgggatttgtggggacactgctgctcccgctctgtctggccacccccctgactgtctccctgagagccctggtcgcgggggcctcacgtgctcccccagccagagtcgcttcagccccttggagctggctgctggtggggtacggggctgcggggctcagctggtcactgtgggctgttctgagccctcctggagcccaggagaaggagcaggaccaggtgaacaacaaagtcttgatgtggaggctgctgaagctctccaggccggacctgcctctcctcgttgccgccttcttcttccttgtccttgctgttttgggtgagacattaatccctcactattctggtcgtgtgattgacatcctgggaggtgattttgacccccatgcctttgccagtgccatcttcttcatgtgcctcttctcctttggcagctcactgtctgcaggctgccgaggaggctgcttcacctacaccatgtctcgaatcaacttgcggatccgggagcagcttttctcctccctgctgcgccaggacctcggtttcttccaggagactaagacaggggagctgaactcacggctgagctcggataccaccctgatgagtaactggcttcctttaaatgccaatgtgctcttgcgaagcctggtgaaagtggtggggctgtatggcttcatgctcagcatatcgcctcgactcaccctcctttctctgctgcacatgcccttcacaatagcagcggagaaggtgtacaacacccgccatcaggaagtgcttcgggagatccaggatgcagtggccagggcggggcaggtggtgcgggaagccgttggagggctgcagaccgttcgcagttttggggccgaggagcatgaagtctgtcgctataaagaggcccttgaacaatgtcggcagctgtattggcggagagacctggaacgcgccttgtacctgctcgtaaggagggtgctgcacttgggggtgcagatgctgatgctgagctgtgggctgcagcagatgcaggatggggagctcacccagggcagcctgctttcctttatgatctaccaggagagcgtggggagctatgtgcagaccctggtatacatatatggggatatgctcagcaacgtgggagctgcagagaaggttttctcctacatggaccgacagccaaatctgccttcacctggcacgcttgcccccaccactctgcagggggttgtgaaattccaagacgtctcctttgcatatcccaatcgccctgacaggcctgtgctcaaggggctgacgtttaccctacgtcctggtgaggtgacggcgctggtgggacccaatgggtctgggaagagcacagtggctgccctgctgcagaatctgtaccagcccacagggggacaggtgctgctggatgaaaagcccatctcacagtatgaacactgctacctgcacagccaggtggtttcagttgggcaggagcctgtgctgttctccggttctgtgaggaacaacattgcttatgggctgcagagctgcgaagatgataaggtgatggcggctgcccaggctgcccacgcagatgacttcatccaggaaatggagcatggaatatacacagatgtaggggagaaggggagccagctggctgcgggacagaaacaacgtctggccattgcccgggcccttgtacgagacccgcgggtcctcatcctggatgaggctactagtgccctagatgtgcagtgcgagcaggccaatgggttctgggtgggtcccctgggtggtggctctgctagtgaatctgacccgactggattcctccatgactcaaggcacagactctccagtgatgtggggatgtttgtggcattgaccaagctggggcagccagatgctgagcagtggaacagccggctggatctcttggagaggagcagacaggccgtggatggggtctgtagacacaactacaggctgggcgcacccttcactgtggggagaaaagtgcaaccagaggtgacagtgtacccagagaggaccccactcctgcaccagcataatctgctgcactgctctgtgacaggcttctatccaggggatatcaagatcaagtggttcctgaatgggcaggaggagagagctggggtcatgtccactggccctatcaggaatggagactggacctttcagactgtggtgatgctagaaatgactcctgaacttggacatgtctacacctgccttgtcgatcactccagcctgctgagccctatttctgtggagtggagagctcagtctgaatattcttggagaaagatgctgagtggcattgcagccttcctacttgggctaat

SEQ ID NO: 200010 - protein, 870 aa, Artificial Sequence
  derived and/or modified sequence
MGPPSLVLCLLSATVFSLLGGSSAFLSHHRLKGRFQRDRRNIRPNIILVLTDDQDVELGSMQVMNKTRRIMEQGGAHFINAFVTTPMCCPSRSSILTGKYVHNHNTYTNNENCSSPSWQAQHESRTFAVYLNSTGYRTAFFGKYLNEYNGSYVPPGWKEWVGLLKNSRFYNYTLCRNGVKEKHGSDYSKDYLTDLITNDSVSFFRTSKKMYPHRPVLMVISHAAPHGPEDSAPQYSRLFPNASQHITPSYNYAPNPDKHWIMRYTGPMKPIHMEFTNMLQRKRLQTLMSVDDSMETIYNMLVETGELDNTYIVYTADHGYHIGQFGLVKGKSMPYEFDIRVPFYVRGPNVEAGCLNPHIVLNIDLAPTILDIAGLDIPADMDGKSILKLLDTERPVNRFHLKKKMRVWRDSFLVERGKLLHKRDNDKVDAQEENFLPKYQRVKDLCQRAEYQTACEQLGQKWQCVEDATGKLKLHKCKGPMRLGGSRALSNLVPKYYGQGSEACTCDSGDYKLSLAGRRKKLFKKKYKASYVRSRSIRSVAIEVDGRVYHVGLGDAAQPRNLTKRHWPGAPEDQDDKDGGDFSGTGGLPDYSAANPIKVTHRCYILENDTVQCDLDLYKSLQAWKDHKLHIDHEIETLQNKIKNLREVRGHLKKKRPEECDCHKISYHTQHKGRLKHRGSSLHPFRKGLQEKDKVWLLREQKRKKKLRKLLKRLQNNDTCSMPGLTCFTHDNQHWQTAPFWTLGPFCACTSANNNTYWCMRTINETHNFLFCEFATGFLEYFDLNTDPYQLMNAVNTLDRDVLNQLHVQLMELRSCKGYKQCNPRTRNMDLGLKDGGSYEQYRQFQRRKWPEMKRPSSKSLGQLWEGWEG

SEQ ID NO: 200011 - protein, 289 aa, Artificial Sequence
  derived and/or modified sequence
FSGTGGLPDYSAANPIKVTHRCYILENDTVQCDLDLYKSLQAWKDHKLHIDHEIETLQNKIKNLREVRGHLKKKRPEECDCHKISYHTQHKGRLKHRGSSLHPFRKGLQEKDKVWLLREQKRKKKLRKLLKRLQNNDTCSMPGLTCFTHDNQHWQTAPFWTLGPFCACTSANNNTYWCMRTINETHNFLFCEFATGFLEYFDLNTDPYQLMNAVNTLDRDVLNQLHVQLMELRSCKGYKQCNPRTRNMDLGLKDGGSYEQYRQFQRRKWPEMKRPSSKSLGQLWEGWEG

SEQ ID NO: 200012 - DNA, 2613 bp, Artificial Sequence
  derived and/or modified sequence
atgggcccccccagcctggtgctgtgcctgctgagcgccaccgtgttcagcctgctgggcggcagcagcgccttcctgagccaccacagactgaagggcagattccagagagacagaagaaacatcagacccaacatcatcctggtgctgaccgacgaccaggacgtggagctgggcagcatgcaggtgatgaacaagaccagaagaatcatggagcagggcggcgcccacttcatcaacgccttcgtgaccacccccatgtgctgccccagcagaagcagcatcctgaccggcaagtacgtgcacaaccacaacacctacaccaacaacgagaactgcagcagccccagctggcaggcccagcacgagagcagaaccttcgccgtgtacctgaacagcaccggctacagaaccgccttcttcggcaagtacctgaacgagtacaacggcagctacgtgccccccggctggaaggagtgggtgggcctgctgaagaacagcagattctacaactacaccctgtgcagaaacggcgtgaaggagaagcacggcagcgactacagcaaggactacctgaccgacctgatcaccaacgacagcgtgagcttcttcagaaccagcaagaagatgtacccccacagacccgtgctgatggtgatcagccacgccgccccccacggccccgaggacagcgccccccagtacagcagactgttccccaacgccagccagcacatcacccccagctacaactacgcccccaaccccgacaagcactggatcatgagatacaccggccccatgaagcccatccacatggagttcaccaacatgctgcagagaaagagactgcagaccctgatgagcgtggacgacagcatggagaccatctacaacatgctggtggagaccggcgagctggacaacacctacatcgtgtacaccgccgaccacggctaccacatcggccagttcggcctggtgaagggcaagagcatgccctacgagttcgacatcagagtgcccttctacgtgagaggccccaacgtggaggccggctgcctgaacccccacatcgtgctgaacatcgacctggcccccaccatcctggacatcgccggcctggacatccccgccgacatggacggcaagagcatcctgaagctgctggacaccgagagacccgtgaacagattccacctgaagaagaagatgagagtgtggagagacagcttcctggtggagagaggcaagctgctgcacaagagagacaacgacaaggtggacgcccaggaggagaacttcctgcccaagtaccagagagtgaaggacctgtgccagagagccgagtaccagaccgcctgcgagcagctgggccagaagtggcagtgcgtggaggacgccaccggcaagctgaagctgcacaagtgcaagggccccatgagactgggcggcagcagagccctgagcaacctggtgcccaagtactacggccagggcagcgaggcctgcacctgcgacagcggcgactacaagctgagcctggccggcagaagaaagaagctgttcaagaagaagtacaaggccagctacgtgagaagcagaagcatcagaagcgtggccatcgaggtggacggcagagtgtaccacgtgggcctgggcgacgccgcccagcccagaaacctgaccaagagacactggcccggcgcccccgaggaccaggacgacaaggacggcggcgacttcagcggcaccggcggcctgcccgactacagcgccgccaaccccatcaaggtgacccacagatgctacatcctggagaacgacaccgtgcagtgcgacctggacctgtacaagagcctgcaggcctggaaggaccacaagctgcacatcgaccacgagatcgagaccctgcagaacaagatcaagaacctgagagaggtgagaggccacctgaagaagaagagacccgaggagtgcgactgccacaagatcagctaccacacccagcacaagggcagactgaagcacagaggcagcagcctgcaccccttcagaaagggcctgcaggagaaggacaaggtgtggctgctgagagagcagaagagaaagaagaagctgagaaagctgctgaagagactgcagaacaacgacacctgcagcatgcccggcctgacctgcttcacccacgacaaccagcactggcagaccgcccccttctggaccctgggccccttctgcgcctgcaccagcgccaacaacaacacctactggtgcatgagaaccatcaacgagacccacaacttcctgttctgcgagttcgccaccggcttcctggagtacttcgacctgaacaccgacccctaccagctgatgaacgccgtgaacaccctggacagagacgtgctgaaccagctgcacgtgcagctgatggagctgagaagctgcaagggctacaagcagtgcaaccccagaaccagaaacatggacctgggcctgaaggacggcggcagctacgagcagtacagacagttccagagaagaaagtggcccgagatgaagagacccagcagcaagagcctgggccagctgtgggagggctgggagggctag

SEQ ID NO: 200013 - DNA, 870 bp, Artificial Sequence
  derived and/or modified sequence
ttcagcggcaccggcggcctgcccgactacagcgccgccaaccccatcaaggtgacccacagatgctacatcctggagaacgacaccgtgcagtgcgacctggacctgtacaagagcctgcaggcctggaaggaccacaagctgcacatcgaccacgagatcgagaccctgcagaacaagatcaagaacctgagagaggtgagaggccacctgaagaagaagagacccgaggagtgcgactgccacaagatcagctaccacacccagcacaagggcagactgaagcacagaggcagcagcctgcaccccttcagaaagggcctgcaggagaaggacaaggtgtggctgctgagagagcagaagagaaagaagaagctgagaaagctgctgaagagactgcagaacaacgacacctgcagcatgcccggcctgacctgcttcacccacgacaaccagcactggcagaccgcccccttctggaccctgggccccttctgcgcctgcaccagcgccaacaacaacacctactggtgcatgagaaccatcaacgagacccacaacttcctgttctgcgagttcgccaccggcttcctggagtacttcgacctgaacaccgacccctaccagctgatgaacgccgtgaacaccctggacagagacgtgctgaaccagctgcacgtgcagctgatggagctgagaagctgcaagggctacaagcagtgcaaccccagaaccagaaacatggacctgggcctgaaggacggcggcagctacgagcagtacagacagttccagagaagaaagtggcccgagatgaagagacccagcagcaagagcctgggccagctgtgggagggctgggagggctag

SEQ ID NO: 200014 - DNA, 2613 bp, Artificial Sequence
  derived and/or modified sequence
atggggccaccaagtctggtgttgtgtttactgagtgcgactgtcttctcgttactgggcgggtccagcgccttcttgtcacaccaccggctgaaaggtcggtttcagagggatcgacgcaatatacgacctaacattatcctggtgctaacggatgaccaagatgttgaactgggaagcatgcaggttatgaacaagactagaaggatcatggaacagggaggcgcccatttcatcaacgcctttgtgacaacccctatgtgctgcccgtccagatccagtatactgacagggaagtacgtacataatcacaacacctacacaaacaacgagaattgttcctctccatcgtggcaagcccaacatgagtcacggacctttgcagtgtatttgaactcaaccgggtaccgcaccgctttcttcgggaaatacctgaacgagtacaacggatcttatgtgccccctggctggaaggagtgggtgggcttactgaagaatagcagattttacaattacaccctttgtcgaaatggcgtcaaagagaagcacggcagcgactactccaaagactacctgaccgacctgatcaccaacgattccgtttcattctttaggacgtcgaagaaaatgtatccacaccggccagtcctgatggtaatttcgcacgcagctccgcatgggcctgaggattcagccccccagtacagcagactgtttccaaacgccagtcaacacattaccccatcttacaattatgccccaaacccagacaaacattggatcatgaggtacacgggccccatgaagccaatccacatggaattcactaacatgttgcaaagaaagcggctacagaccctgatgagcgtcgacgactccatggaaaccatctataatatgctagttgagaccggagagctcgacaacacgtatatcgtatacaccgccgaccacggataccatatcggccaattcggactggtcaaaggaaaaagcatgccctatgaattcgacatccgcgtgcctttttacgtgagaggaccgaatgtggaggcaggttgtctgaatcctcacatcgtgttgaacatcgacttggcaccgacaattctggatattgccggactggacattcctgcagacatggacggaaagtcaattctgaaactgctggacaccgagcgacccgtcaatcgtttccaccttaagaagaaaatgagggtctggcgggatagcttcctggtggagagggggaagctgcttcacaagcgcgacaatgataaggtggatgcccaggaagaaaactttcttcccaagtaccagcgcgtcaaagatttatgccagcgagccgaatatcagaccgcatgcgagcagctcggccagaaatggcagtgtgtggaagacgccacggggaagctcaagctgcataagtgtaaaggtccgatgaggctgggcggctcacgtgccctgtccaacttggtgcctaagtattatggccagggcagcgaggcctgtacctgtgacagcggtgattacaaattgtctctggctggaagacgaaagaagctattcaagaagaagtataaggcaagttacgtccgatctcgcagtatcaggtctgtcgccattgaagttgatggccgggtgtatcacgtgggcctgggcgatgctgctcagccaagaaatttgaccaaacgccactggcctggtgccccggaggaccaggacgataaagatggaggtgacttttcaggaaccggcggccttcccgattactctgcggcgaaccccatcaaagtcactcaccgctgctatatacttgaaaacgatacggtacagtgtgacttggacctgtacaagagccttcaagcatggaaagatcacaaactccatattgatcatgaaatcgagacgttgcagaacaaaattaagaatttgagggaagtcagagggcaccttaagaaaaagcgacctgaagagtgtgattgccacaagataagttaccacactcaacacaaaggtcgtctcaagcatcgtggctctagcctgcacccattcaggaaaggcttacaagagaaggacaaagtgtggcttctgagggagcagaagcggaagaaaaagctacggaaattgctcaaacggctgcaaaacaatgacacgtgctctatgccgggactcacatgttttactcatgacaaccagcactggcagaccgcgcccttctggaccctaggtcctttttgtgcatgtaccagcgcaaataataacacatactggtgcatgcgaaccattaacgaaacacacaactttctgttttgcgaatttgcaaccggattcctggaatactttgatctcaacactgacccttatcagttgatgaatgccgtcaacaccctggatcgcgacgtcctgaaccagcttcatgtgcaactgatggagcttcgaagctgcaaaggctacaagcaatgtaatcccagaacacgcaacatggacttggggttaaaggatgggggctcctacgaacagtataggcagttccaaaggcggaagtggcccgagatgaagcgaccttcctctaaaagcctgggacaactttgggagggatgggagggttag

SEQ ID NO: 200015 - DNA, 870 bp, Artificial Sequence
  derived and/or modified sequence
tttagtggtactggaggcctgcccgactactccgccgctaaccctattaaggtcactcataggtgttacatcttggagaatgacacagtacagtgcgacctggacctctacaaatctctgcaagcctggaaggaccacaagctacacattgaccacgagatagaaaccctacagaataaaatcaagaatctccgggaggtccgcggccatttaaagaaaaagcggcccgaggaatgcgactgccataagatatcataccacacacagcacaagggcagacttaagcatcgggggagcagtctccacccgttcagaaagggcttacaggagaaagataaggtgtggcttctgcgggagcagaagcgtaagaaaaagctgcgcaagttattgaagaggctgcagaataatgacacctgctcgatgcccggactaacctgctttacacacgataaccagcactggcagacggccccattttggaccctcggtccattctgcgcctgcacatccgctaacaacaacacctattggtgcatgaggactattaatgagactcacaattttctcttctgtgaatttgctaccggttttctcgagtacttcgacctaaataccgacccgtaccagctgatgaacgcagtgaatacgcttgatcgtgacgttttaaatcagctgcacgttcagctgatggagctcagatcttgcaaaggatacaaacagtgcaatccaaggacacgaaacatggacctaggactgaaagacgggggatcctacgagcagtacaggcagttccaacgccggaagtggcctgaaatgaagagaccttcgagtaagtcccttggtcaactctgggagggatgggagggttag

SEQ ID NO: 200016 - DNA, 2613 bp, Artificial Sequence
  derived and/or modified sequence
atgggtccaccttccttagttctgtgtctcctttctgcaacagtgttctcccttctgggtggaagctcagccttcctaagtcatcatagactaaagggcaggtttcagagagaccgcaggaatatccgacccaacatcattcttgtgctgaccgacgaccaggatgtggagctcggttccatgcaagtgatgaacaagacccggcgtattatggagcaaggcggggctcactttatcaacgcttttgtgaccaccccaatgtgctgtccatcccggtccagcattctcactggcaagtacgtgcacaatcacaacacctatactaataacgagaactgttcaagcccttcttggcaggcccagcatgagagtcgtacatttgccgtctatttgaactcaactgggtaccgcaccgccttcttcggtaagtacttgaacgaatacaacgggtcttatgtgccgcccggctggaaggagtgggtggggctgcttaagaactcccgattttataactataccttatgtcgcaacggcgtgaaggagaagcacggttccgactattcgaaggattacttgacagatctgatcacgaacgattctgtgagcttctttagaacatccaaaaaaatgtacccccataggcccgtgttaatggtcatttctcatgccgcacctcatgggcctgaggactccgctccacaatacagccgcttgtttccaaacgcatctcagcatatcacacccagttataactatgctccaaatccggacaagcattggatcatgcggtacacaggacctatgaagccgatccatatggagtttacaaacatgctgcagaggaagcggttacagacactgatgtcggtggatgatagcatggagaccatctacaacatgctggtcgagaccggtgaactagataatacctatattgtgtacaccgctgatcatggatatcatatcggccagtttggcttggtcaagggtaagagcatgccatatgaattcgacataagggtacctttctatgtgagaggccccaacgtggaagccggttgtctcaacccccacatcgtgttgaatatcgaccttgctcctactatactcgacatcgccggcttagacatcccagccgacatggatggtaaatccattttaaaattgttggacaccgagaggcccgttaataggtttcacctcaaaaaaaaaatgagagtgtggcgcgattcctttctcgtggagcggggcaaattattacataagcgggacaacgataaggtggatgcgcaggaggaaaactttctgccaaagtatcagagggtgaaggacctgtgccaacgagccgagtaccagacagcttgcgagcaactgggacagaagtggcagtgcgtggaggatgcaaccggcaagctcaagttgcacaagtgcaaagggcctatgagactcggcgggagccgggcgctgtcgaacctggttcctaagtattacggtcagggatctgaagcttgcacctgcgacagcggtgattataagctgagcctcgccggaagacgtaagaagctgttcaaaaagaagtataaggcgtcttacgtgcgcagtcggagtatcagaagtgtcgccattgaggtcgatggacgcgtgtaccacgtcggtctcggcgacgctgcccagcccaggaacttgactaagaggcactggcccggggcgcccgaggaccaggatgacaaggatgggggggacttttctgggacaggaggcctgccagattactctgctgccaatccaatcaaagttacccaccggtgttatattctggaaaacgacaccgtacagtgcgacctagacctgtataaaagcctccaagcctggaaggaccataaactgcacatcgatcatgaaatagagacgcttcagaacaagatcaaaaatctacgggaagtgagaggtcacctcaagaagaaacggccagaggaatgcgactgccacaaaatttcataccatactcagcacaagggtcggctgaagcacagaggcagtagcctgcacccatttcgcaaaggactccaggagaaggataaggtgtggttattgcgcgagcaaaagcggaagaagaaattgcggaagctgctgaaaagacttcagaataatgatacttgttccatgcccggtctcacatgcttcacccatgataaccagcactggcagacggcccccttttggaccctcggacctttctgcgcctgcaccagcgccaacaataatacctattggtgtatgcgcaccattaatgagacccacaattttcttttttgtgagttcgctaccggcttcctcgagtactttgatctgaatacagacccatatcagttgatgaacgcagttaacacactcgaccgagacgttctgaaccagcttcacgtgcagttgatggagctgcggtcttgtaaggggtacaagcaatgcaaccctcgcacacgcaacatggacttgggactgaaagacggaggatcctatgagcagtaccggcaatttcaaagaaggaagtggcctgagatgaagcggccttcgagcaagtccctcgggcagctctgggagggctgggaggggtag

SEQ ID NO: 200017 - DNA, 2613 bp, Artificial Sequence
  derived and/or modified sequence
atgggcccccccagcctggtgctgtgcctgctgagcgccaccgtcttcagcctgctgggcggcagcagcgccttcctgagccaccaccggctgaagggccgcttccagagggacagaagaaacatccggcccaacatcatcctggtgctgacagatgaccaggatgtggagctgggctccatgcaggtgatgaacaagacccggcgcatcatggagcagggcggggcccacttcatcaatgcctttgtgaccacccccatgtgctgccccagccgcagcagcatcctgaccgggaagtatgtgcacaaccacaacacctacaccaacaatgaaaactgcagcagccccagctggcaggcccagcacgagagcaggacctttgctgtgtacctgaacagcacaggctacagaacagccttcttcggcaagtacctgaatgagtacaacggcagctatgtgcccccaggctggaaggagtgggtgggcctgctgaagaacagccgcttctacaactacaccctgtgcagaaatggagtgaaggagaagcacggcagtgactacagcaaggactacctgacagacctgatcaccaatgacagcgtgtccttcttccgcaccagcaagaagatgtacccccacaggcctgtgctgatggtgatcagccatgctgccccccacggcccagaagattctgccccccagtacagccgcctcttccccaatgccagccagcacatcacccccagctacaactatgcccccaacccagacaagcactggatcatgagatacacaggccccatgaagcccatccacatggagttcaccaacatgctgcagaggaagaggctgcagaccctgatgtctgtggatgacagcatggagaccatctacaacatgctggtggagaccggggagctggacaacacctacatcgtgtacacagctgaccacggctaccacatcggccagtttggcctggtgaagggcaagtccatgccctatgaatttgacatccgggtgcccttctacgtgcggggccccaacgtggaggccggctgcctgaacccccacatcgtgctgaacatcgacctggcccccaccatcctggacattgctggcctggacatcccagctgacatggatggcaagagcatcctgaagctgctggacacagagaggcctgtgaaccgcttccacctgaagaagaagatgagggtgtggagggacagcttcctggtggagcggggcaagctgctgcacaagagggacaatgacaaggtggatgcccaggaggagaacttcctgcccaagtaccagagggtgaaggacctgtgccagagagctgagtaccagacagcctgtgagcagctgggccagaagtggcagtgtgtggaggatgccaccgggaagctgaagctgcacaagtgcaagggccccatgaggctgggcggcagccgggccctgagcaacctggtgcccaagtactacggccagggcagcgaggcctgcacctgtgacagcggggactacaagctgagcctggccggccgcaggaagaagctgttcaagaagaagtacaaggccagctatgtgcgcagccgcagcatccgctctgtggccatcgaggtggatggccgggtgtaccacgtgggcctgggagatgctgcccagcccaggaacctgaccaagaggcactggccaggggcccctgaggaccaggatgacaaggatggaggagacttctctggaactggaggcctgcctgactacagcgctgccaaccccatcaaggtgacccaccgctgctacatcctggagaatgacacagtgcagtgtgacctggacctgtacaagagcctgcaggcctggaaggaccacaagctgcacatcgaccatgaaattgagaccctgcagaacaagatcaagaacctgcgggaggtgcggggccacctgaagaagaagaggccagaagaatgtgactgccacaagatctcctaccacacccagcacaagggccgcctgaagcaccggggcagcagcctgcaccccttcaggaagggcctgcaggagaaggacaaggtgtggctgctgcgggagcagaagaggaagaagaagctgaggaagctgctgaagaggctgcagaacaatgacacctgcagcatgcctggcctgacctgcttcacccatgacaaccagcactggcagacagcccccttctggaccctgggccccttctgtgcctgcaccagcgccaacaacaacacctactggtgcatgaggaccatcaatgagacccacaacttcctgttctgtgaatttgccaccggcttcctggagtactttgacctgaacacagacccctaccagctgatgaatgctgtgaacaccctggacagagatgtgctgaaccagctgcacgtgcagctgatggagctgcggagctgcaagggctacaagcagtgcaaccccaggaccaggaacatggacctgggcctgaaggatggcggcagctatgagcagtaccggcagttccagaggaggaagtggccagagatgaagaggcccagcagcaagagcctgggccagctgtgggagggctgggagggctag

SEQ ID NO: 200018 - DNA, 870 bp, Artificial Sequence
  derived and/or modified sequence
ttcagcggcaccggcggcctgcctgactacagcgctgccaaccccatcaaggtgacccaccgctgctacatcctggagaatgacacagtgcagtgtgacctggacctgtacaagagcctgcaggcctggaaggaccacaagctgcacatcgaccacgagattgagaccctgcagaacaagatcaagaacctgcgggaggtgcggggccacctgaagaagaagaggcctgaggagtgtgactgccacaagatctcctaccacacccagcacaagggccgcctgaagcaccggggcagcagcctgcaccccttcaggaagggcctgcaggagaaggacaaggtgtggctgctgcgggagcagaagaggaagaagaagctgaggaagctgctgaagaggctgcagaacaatgacacctgcagcatgcctggcctgacctgcttcacccatgacaaccagcactggcagacagcccccttctggaccctgggccccttctgtgcctgcaccagcgccaacaacaacacctactggtgcatgaggaccatcaatgagacccacaacttcctgttctgtgaatttgccaccggcttcctggagtactttgacctgaacacagacccctaccagctgatgaatgctgtgaacaccctggacagagatgtgctgaaccagctgcacgtgcagctgatggagctgcggagctgcaagggctacaagcagtgcaaccccaggaccaggaacatggacctgggcctgaaggatggcggcagctatgagcagtaccggcagttccagaggaggaagtggccagagatgaagaggcccagcagcaagagcctgggccagctgtgggagggctgggagggctag

SEQ ID NO: 200019 - DNA, 2613 bp, Artificial Sequence
  derived and/or modified sequence
atgggcccccccagcctggtgctgtgcctgctgagcgccaccgtgttctctctgctggggggctcctccgcattcttgagtcaccaccggcttaagggacggtttcagcgagaccgtcggaatattaggcctaatatcattctggtcttaacagacgaccaggatgtggagttgggatcgatgcaggtcatgaataaaacacggagaatcatggagcaggggggagcccatttcattaatgcattcgttactacgccaatgtgctgtccgagcagaagctccattctgactggaaagtacgtgcacaaccacaacacttatacgaacaacgaaaactgcagttccccttcgtggcaggctcaacatgagtccaggacattcgccgtttacctcaatagcacggggtatcgtaccgcattttttggtaagtacctaaacgaatataatgggagctacgtgcctcccggctggaaagagtgggtgggtctgctcaaaaactcccgcttctataattacacattatgcaggaatggcgtaaaagagaagcatggatctgactactctaaggactacttgacggatctgatcaccaatgattctgtcagcttcttccgcacatcgaaaaagatgtacccacaccgccccgttctgatggtgatttctcacgccgccccccatggtcccgaggactccgccccccagtactccaggctgttcccaaacgctagtcagcatatcactcccagctacaactacgccccaaacccagataaacattggattatgcgatatacaggtccaatgaaaccgattcatatggaatttactaacatgcttcagcggaagcggcttcagactctgatgtccgtagacgattctatggaaactatctataacatgcttgtcgagactggtgagttagacaatacatacatagtatataccgctgaccatggctatcacataggacagtttggccttgtcaaaggaaagtcgatgccctatgagtttgatatccgcgtcccattctacgtgagggggccaaacgtcgaggcgggttgcttgaaccctcacattgtgctcaacatcgacctagcacccactatacttgatatcgcaggcctggatatcccagctgacatggacggaaagtccattctgaagttgctggacacagagagacctgtgaatcgttttcatttgaagaagaagatgcgggtctggcgtgattctttcctggtcgaaagaggcaagctcctgcataagcgggataacgataaagtcgatgcccaggaagaaaacttccttccgaagtatcagagggtgaaggatctctgtcagcgagctgagtaccagactgcatgtgagcagctcggccagaaatggcagtgtgtagaagacgctaccggtaagcttaagctacacaagtgcaaggggccgatgagattgggaggatcccgggctctttctaatctagtgcccaagtactatggccaaggcagcgaagcatgcacctgcgactcgggagactacaaactgagtctggcaggaagaagaaagaagttatttaagaaaaaatataaggcgagttatgtccgaagtcggtccattagaagcgttgctattgaggtggatggtcgtgtgtaccacgtgggtttgggcgacgctgcccagccaagaaatcttacaaagaggcattggcctggcgcccctgaggatcaggatgacaaggacggtggcgatttttcagggacaggcggacttcctgactacagcgctgcaaatcccatcaaggttacccaccgctgctacatcctggaaaacgataccgtgcagtgtgatcttgacctgtataagagcctccaggcgtggaaagaccataaacttcacatcgaccatgaaatagaaacgctgcagaataaaataaaaaatctcagagaggtgcggggccacctgaagaaaaagagacctgaagaatgtgattgtcacaagatctcctaccacacacagcacaagggaagattgaagcatcgcgggagttcgttacacccatttaggaagggtctacaggaaaaagataaggtgtggctcctgcgcgaacagaagcgcaaaaagaagctgagaaagctgttaaagcggctccagaataacgacacctgtagcatgcctggattgacatgtttcacccatgacaaccagcactggcagactgctcctttttggacactcgggcccttctgtgcgtgtacgtccgcaaataataacacctactggtgcatgagaacaatcaacgaaacacacaatttcctgttttgtgagtttgccactggctttcttgagtatttcgatcttaatactgacccttatcagctgatgaatgctgtgaacacgctcgaccgcgacgtattaaatcagcttcatgttcagctgatggagttgaggtcgtgcaaagggtacaagcaatgtaatccccgcacccgcaacatggacctggggctcaaagatggtggaagctacgagcagtatcgccaatttcagcgtaggaagtggcctgagatgaaaaggccctcgagcaagagtttaggccagctctgggagggttgggaaggctag

SEQ ID NO: 200020 - DNA, 870 bp, Artificial Sequence
  derived and/or modified sequence
ttcagcggcaccggcggcctgcccgactacagcgccgccaaccccatcaaggtgactcaccggtgctacattctagagaacgatacagttcagtgtgatctggacctgtataagagccttcaggcctggaaggaccataaactgcacattgaccatgaaatagaaaccctgcagaataagatcaaaaacctcagggaagtgagaggccatctgaaaaagaagcgcccagaggaatgcgattgccacaagattagctaccatacgcagcacaaaggccgcctcaagcatagagggtccagtctgcatccatttcgtaagggcctgcaggaaaaagacaaggtgtggcttctgagagaacagaagaggaagaaaaagctgcgcaaactgctgaaacgactccagaacaacgatacatgttccatgcccgggctgacttgtttcacacacgacaaccaacactggcagacagccccattttggacacttgggcctttttgtgcatgcacctctgccaacaacaacacctattggtgcatgcgaacaattaatgagacccacaatttcttgttttgcgaattcgccacggggtttctggagtactttgacctgaataccgacccataccagctgatgaacgccgtcaatactcttgaccgtgatgttctaaaccagcttcatgtgcaattgatggaactgcgcagttgcaaaggctataaacagtgcaatccgcgcacccgcaatatggacctagggctgaaggacggcgggagttatgagcagtaccgacagtttcagcggagaaaatggcccgagatgaagaggccttcatccaagtctttaggacaactgtgggagggttgggagggttag

SEQ ID NO: 200021 - DNA, 2613 bp, Artificial Sequence
  derived and/or modified sequence
atgggcccccccagcctggtgctgtgcctgctgagcgccaccgtgtttagcctgcttggggggtcttccgcatttctcagccatcatcgcctcaagggtagattccagcgggatcggcgcaatatccgacccaatattattttggtcctaaccgacgatcaggacgttgaactggggagtatgcaggtgatgaacaagacgcggagaataatggagcaagggggagcccatttcattaatgcattcgtaaccacccctatgtgctgtccatcaaggtcatctatccttactggtaagtacgtgcataatcacaacacatacaccaacaacgagaactgttcctcacccagctggcaggcccagcacgagtctagaactttcgccgtgtacctgaatagcacaggatatcggacagccttctttggcaaataccttaatgagtataacggaagctacgtcccccccggatggaaggaatgggtgggtctgctcaagaactctaggttttacaactataccctgtgtaggaacggcgttaaggagaaacatggcagtgactactcaaaggactaccttacggatctgattaccaacgattccgtgagtttcttcagaacatccaagaagatgtacccccaccgcccagtattgatggttattagccatgccgctccccacggccccgaggattcagctccccagtactccaggctcttcccaaacgcaagccagcatattaccccgtcttacaattatgctccaaatcctgacaaacattggatcatgaggtacacagggcctatgaaaccaatccatatggaatttacgaatatgttacagcgcaagcgcctccaaaccctaatgtcggtggatgacagcatggagaccatctacaacatgcttgttgagacaggtgagcttgataacacctatattgtgtataccgcggaccatggataccatataggccaattcgggctggtcaaggggaaaagcatgccttatgagttcgatattcgcgtgcctttttacgttcgaggacctaacgttgaggcaggctgtcttaatcctcatatagtgctgaacattgacctggccccgaccatccttgacatcgcaggacttgacatccctgccgatatggacggcaaaagtattctgaaattacttgatactgaacgccctgtcaacaggtttcatctgaaaaagaagatgcgggtctggagggactcatttctggtggaaagaggcaagctgctccacaagcgggataacgacaaagtggacgcacaggaggaaaactttttgcctaagtatcagcgggtcaaagacttatgccaacgggccgaatatcaaacagcatgtgagcagctggggcagaagtggcaatgtgtcgaggatgcaacagggaaactcaaactccacaagtgcaaaggccccatgcgattaggagggagccgagcgctttccaacctggtgccgaagtactatggtcagggcagcgaagcatgcacttgtgactctggcgactacaagctgtcgcttgcaggccgcagaaagaagctcttcaagaaaaagtataaggcttcatatgtaaggtctcggtcaattcggtctgtcgctatcgaggtggatggccgagtgtatcatgtcggcctgggcgatgcggcacagccccgcaacctgacaaagcgacactggccaggtgcaccagaagaccaggatgataaggacggtggtgatttctccggaactggaggccttcctgactactccgcggctaacccaataaaggtgacgcatagatgctacatcctggagaacgacacagtccagtgcgacctggatctgtataagagcttgcaggcttggaaagaccacaaactgcatatcgatcacgaaattgaaaccctacagaataagatcaaaaatctaagagaggtgaggggtcacctgaagaagaaaagacctgaggagtgtgattgtcacaagatctcatatcatacacagcacaaagggagactgaaacacagaggcagcagtctccacccattcaggaagggactgcaagagaaggataaggtgtggctcctgagggaacaaaagcgcaagaagaagttgcgtaagctgctgaaacgtcttcagaacaacgacacgtgtagtatgcctggcctgacatgctttacccatgataatcaacactggcagacggcgccgttctggaccttgggacccttctgtgcctgtacatctgcgaacaataatacctactggtgcatgaggacaataaatgagactcataacttcctcttctgcgaatttgccaccgggtttttggagtactttgatctgaacactgatccctatcagctgatgaacgctgttaacactctggatcgtgacgtgctcaatcagctgcacgtgcagttgatggaattaaggagttgtaagggctataaacaatgcaatccgcgcactcggaatatggacctgggtcttaaagacggaggatcttatgaacagtaccgccaattccagaggagaaaatggcctgagatgaagaggccaagtagcaaaagtctcgggcagctatgggagggatgggagggatag

SEQ ID NO: 200022 - DNA, 2613 bp, Artificial Sequence
  derived and/or modified sequence
atgggcccaccatcactggtgctatgtctgctgtcagctaccgtgtttagcctcctcggagggagtagcgccttcctctcccaccatcggctgaaagggagattccaaagagacaggcgtaatattcgacccaatatcattctggttctcactgatgatcaggatgtggagcttgggtcaatgcaggtcatgaataaaacacgtcggatcatggaacagggtggcgcacacttcatcaacgcattcgtgacaacacctatgtgctgtcctagtcgcagctccatcttgactgggaagtacgtccacaatcataacacctatactaataatgagaactgttcctctccctcttggcaggcccagcacgagtccagaactttcgccgtgtatctgaactccaccgggtaccgcacagccttcttcgggaaataccttaacgaatacaacgggagttatgtgcctccaggatggaaagagtgggtcgggctgctgaagaatagtaggttttacaactataccttatgcaggaacggggtcaaggagaaacacggaagcgattactctaaagactacctcacagatttgatcacgaacgattccgtgagcttcttcagaacatctaaaaagatgtacccacatcgacctgtgctgatggtgatcagccatgcagcccctcacgggcctgaagatagcgcccctcagtacagtcgcctgtttcccaacgcttcacaacatataaccccttcttacaattacgcgcctaatccggataagcactggatcatgagatacactgggccaatgaaacccattcacatggagtttacgaacatgctgcagcgtaaaagactgcagacactcatgagcgttgacgattcaatggagacaatatacaacatgttggtcgaaactggtgaactcgacaacacatatatagtatatactgcagatcatgggtaccacatcggccagtttgggctggttaagggaaagagcatgccttatgagttcgatattcgtgtgccattttacgtgcggggacctaacgtcgaagccggatgtcttaacccccacatcgtgctgaatatcgatctggcccctacaatactcgacatcgccggtttggacatccccgcagacatggatgggaagagcattttgaagcttctggacaccgaacgcccagtcaaccggttccacctgaaaaagaagatgagggtatggagagattccttcctcgtcgagagggggaaattactgcataaaagagacaacgataaggtggacgcccaggaggagaactttctcccgaagtaccagcgggtgaaggatctgtgccaacgcgctgagtatcagacagcttgcgaacagctggggcaaaagtggcagtgcgtggaggacgcaactggcaaactcaaactccacaaatgcaaaggcccaatgaggttgggcggtagtcgcgctctcagtaacctggttcctaaatattatggccagggatctgaagcttgtacatgtgacagcggtgactataaactgagtctcgcagggagaagaaagaaattatttaagaaaaagtacaaagccagctacgtccgcagccgcagtatcaggagcgtggccatcgaggttgacgggcgagtgtaccatgttgggctgggtgatgccgcacagccacgtaatttaaccaagcggcactggccgggtgctcccgaggatcaagacgataaagatggcggagacttctccggcaccggagggctgcctgactactcagccgctaaccctatcaaagttacacaccgctgttacattctggagaacgacacagtgcagtgtgatttggatttgtataagagtctccaggcatggaaagaccacaaattacacatcgaccacgaaattgaaactctgcagaacaagattaagaacctacgggaggtgcgtggacatctgaaaaaaaaaaggcctgaggagtgcgactgccataaaattagctaccatacccagcacaaagggaggctaaagcacagagggtcatcattacatcccttccgcaaaggcctgcaggaaaaagacaaggtgtggcttctgagggagcagaagcgaaaaaaaaaactgagaaagctcctcaagcggctccagaacaacgatacctgttcaatgcctggcttaacctgtttcacccacgataaccagcactggcagacagcgccattttggaccttgggccctttttgtgcctgtacgtccgctaacaataacacatactggtgtatgaggactattaacgagacccataattttttgttttgcgaatttgccaccggatttctggagtattttgatctcaacaccgatccttaccagctcatgaacgctgtcaacacgttggatcgagatgtgctcaaccagctgcacgtgcagctgatggagctgcgatcttgtaagggatacaaacaatgtaacccaagaacccgcaatatggatctcggtcttaaggacggcggatcatacgaacagtaccgtcagtttcagagacggaaatggcctgaaatgaagcggcctagcagcaagtcgctcggacaactttgggagggctgggaaggttag

SEQ ID NO: 200023 - DNA, 870 bp, Artificial Sequence
  derived and/or modified sequence
ttttctgggacgggcggattgccagattatagcgctgctaatccgattaaggttacacacaggtgctacatcttagaaaacgacaccgtgcaatgcgatctggatctctataaaagcctccaagcttggaaagaccacaagctccacattgaccatgagatcgaaactctgcaaaataagatcaagaatcttcgcgaagtgcgaggacacttgaagaaaaaacggcctgaggagtgtgattgccacaagatttcttatcacacacaacataaggggaggttaaagcatcggggatcatctctgcacccattccggaaaggactgcaagagaaggacaaggtctggcttctcagggagcagaagcgaaaaaagaaactcaggaaattactgaagagactgcaaaataacgacacatgcagcatgccgggactgacatgtttcactcacgataaccagcattggcaaactgcccctttttggaccctgggcccattttgtgcctgtacatctgccaacaacaatacctattggtgtatgcgcactatcaatgagacccataactttttattttgcgagttcgcaactggttttctcgagtattttgacctcaatacagatccatatcagttgatgaatgcagtgaatactctggatcgggatgtgctgaatcagctgcatgtgcagctgatggaactgagatcttgtaaggggtacaagcagtgtaaccctagaacaaggaatatggacctcgggctcaaagatggaggcagctatgagcagtatcggcaattccaaagacgaaaatggccagagatgaaacgtccttcttctaagagcctcgggcagctgtgggagggctgggaggggtag

SEQ ID NO: 200024 - DNA, 2613 bp, Artificial Sequence
  derived and/or modified sequence
atgggtccaccctccctcgtcctgtgcctgctctctgctaccgttttttccttgctcggcggtagcagtgccttccttagccaccacaggctgaaaggcaggttccaacgggaccggagaaatattcgaccaaacatcattttggtattaaccgatgatcaggacgtggagctcggctcgatgcaggtcatgaataagacacgacgtattatggaacagggcggagcccactttataaacgccttcgtgaccactccgatgtgctgtccatctcggtccagcatactgacaggcaaatacgtccataatcacaatacctacacaaacaatgaaaactgcagctcgccttcttggcaagcccagcacgaatcaagaacttttgctgtttacctgaattcaacgggttaccggacagccttttttggaaagtacctcaatgagtataacggttcctatgttcctcccggatggaaggagtgggtgggcttattaaagaatagtagattttacaactatacactttgccgcaatggggtgaaagagaagcatggctctgattatagcaaggactacttgacagatctaattaccaacgactctgtgagcttctttcgcacgtcgaaaaaaatgtacccccatcgcccagtgctgatggtgatatcgcacgcagcacctcacgggccagaggactccgcccctcagtactccagactctttccgaacgcttctcaacatatcaccccaagctataactacgcacccaaccctgacaaacactggattatgagatacacaggtcccatgaaaccgatacatatggaattcacaaatatgctacagagaaagaggcttcagactcttatgagcgtggacgatagcatggagacaatatataacatgctcgtagagaccggggaacttgataacacgtatatagtttacactgctgatcatggataccatatcggccagttcggcctggtcaagggcaaatccatgccatatgagttcgacattcgcgtcccattctacgtgaggggtcctaatgttgaagctggctgcctgaacccccacatcgtgctgaatatcgatctagctcccaccatactcgatatagcaggcctggacataccggcagatatggatggcaagtcgatactgaagctgttagacaccgagcgcccagtgaatagatttcatttgaagaaaaagatgagggtgtggcgggacagcttcctggtcgaaaggggtaaacttctgcataaacgggataatgacaaggtggatgctcaggaagagaatttcctgcccaagtatcagagggtaaaagatctgtgtcagcgggctgaatatcaaaccgcttgcgagcagttggggcagaaatggcagtgcgttgaggatgcgacaggaaagttgaagctgcacaaatgtaaaggtccaatgcgcttaggcggaagcagagctctctctaacttggtgccgaaatactatggacaaggatcagaggcatgcacttgtgatagcggggattataagcttagtttggcagggcgacgaaaaaagctcttcaagaagaagtataaagccagttacgtacgcagtagaagtatcaggtccgtggcaatagaggtggacggtcgcgtctaccatgtgggcttgggggacgcggcacagcccaggaatctgaccaaaaggcactggccaggagcacctgaggaccaggacgacaaggacggcggtgatttcagcggcacgggcggacttcctgactatagcgcagcgaacccgatcaaggtcactcatagatgctacattcttgagaacgacaccgtgcagtgcgacctcgatctctacaaaagcctccaggcctggaaagatcataagctccatatcgaccacgagattgaaactttgcaaaataaaatcaagaacctgcgggaggttaggggacaccttaagaagaagcgacccgaagagtgtgattgccacaagatctcatatcatactcaacataaaggtcgcctaaaacacagaggctccagccttcacccttttaggaaaggtttacaggagaaggacaaggtgtggctgctgagggagcaaaagagaaaaaagaaactgcgtaaacttctcaagcgcttgcagaataacgatacttgcagcatgcctgggctaacttgtttcacgcacgacaaccagcattggcaaacagcccctttttggacactgggaccattttgcgcttgcacaagcgctaacaacaacacatattggtgcatgaggaccatcaacgagacacacaatttcctgttctgcgagtttgccactgggtttctcgagtatttcgatctgaatactgacccttaccaattaatgaacgccgttaacacactggaccgggatgtcctgaaccagctacatgtgcagctgatggagctgcggtcttgtaagggttataagcagtgcaatccgcgtactagaaatatggatctcggcctgaaggatgggggttcatacgagcagtatcgtcagtttcagcgtcgcaaatggccagaaatgaagcgtccctcttctaaaagcctcggccagctgtgggaaggctgggagggatag

SEQ ID NO: 200025 - DNA, 4915 bp, Artificial Sequence
  derived and/or modified sequence
cacttgagccgaagttaatttctcggggagttctcgggcgcgcacaggcagctcggtttgccctgcgattgagctgcgggtcgcggccggcgccggcctctccaatggcaaatgtgtgtggctggaggcgagcgcgaggctttcggcaaaggcagtcgagtgtttgcagaccggggcgagtcctgtgaaagcagataaaagaaaacatttattaacgtgtcattacgaggggagcgcccggccggggctgtcgcactccccgcggaacatttggctccctccagctccgagagaggagaagaagaaagcggaaaagaggcagattcacgtcgtttccagccaagtggacctgatcgatggccctcctgaatttatcacgatatttgatttattagcgatgccccctggtttgtgtgttacgcacacacacgtgcacacaaggctctggctcgcttccctccctcgtttccagctcctgggcgaatcccacatctgtttcaactctccgccgagggcgagcaggagcgagagtgtgtcgagtgagtgtgcgtctgtgtgtcccggcgagggtgcgcgctcggcgccgggagcgcggccagccgagtccggaggcatcgggaggtcgagagccgccgggaccccagctctgcgttcactgccccgtccggagctggacttcggggccggggccggggccgtgcgccggggacaggcagggccgggtcgcgggccgcgcgtcccccaggccggagatctgcgagtgaagagggacgagggaaaagaaacaaagccacagacgcaacttgagactcccgcatcccaaaagaagcaccagatcagcaaaaaaagaagatgggccccccgagcctcgtgctgtgcttgctgtccgcaactgtgttctccctgctgggtggaagctcggccttcctgtcgcaccaccgcctgaaaggcaggtttcagagggaccgcaggaacatccgccccaacatcatcctggtgctgacggacgaccaggatgtggagctgggttccatgcaggtgatgaacaagacccggcgcatcatggagcagggcggggcgcacttcatcaacgccttcgtgaccacacccatgtgctgcccctcacgctcctccatcctcactggcaagtacgtccacaaccacaacacctacaccaacaatgagaactgctcctcgccctcctggcaggcacagcacgagagccgcacctttgccgtgtacctcaatagcactggctaccggacagctttcttcgggaagtatcttaatgaatacaacggctcctacgtgccacccggctggaaggagtgggtcggactccttaaaaactcccgcttttataactacacgctgtgtcggaacggggtgaaagagaagcacggctccgactactccaaggattacctcacagacctcatcaccaatgacagcgtgagcttcttccgcacgtccaagaagatgtacccgcacaggccagtcctcatggtcatcagccatgcagccccccacggccctgaggattcagccccacaatattcacgcctcttcccaaacgcatctcagcacatcacgccgagctacaactacgcgcccaacccggacaaacactggatcatgcgctacacggggcccatgaagcccatccacatggaattcaccaacatgctccagcggaagcgcttgcagaccctcatgtcggtggacgactccatggagacgatttacaacatgctggttgagacgggcgagctggacaacacgtacatcgtatacaccgccgaccacggttaccacatcggccagtttggcctggtgaaagggaaatccatgccatatgagtttgacatcagggtcccgttctacgtgaggggccccaacgtggaagccggctgtctgaatccccacatcgtcctcaacattgacctggcccccaccatcctggacattgcaggcctggacatacctgcggatatggacgggaaatccatcctcaagctgctggacacggagcggccggtgaatcggtttcacttgaaaaagaagatgagggtctggcgggactccttcttggtggagagaggcaagctgctacacaagagagacaatgacaaggtggacgcccaggaggagaactttctgcccaagtaccagcgtgtgaaggacctgtgtcagcgtgctgagtaccagacggcgtgtgagcagctgggacagaagtggcagtgtgtggaggacgccacggggaagctgaagctgcataagtgcaagggccccatgcggctgggcggcagcagagccctctccaacctcgtgcccaagtactacgggcagggcagcgaggcctgcacctgtgacagcggggactacaagctcagcctggccggacgccggaaaaaactcttcaagaagaagtacaaggccagctatgtccgcagtcgctccatccgctcagtggccatcgaggtggacggcagggtgtaccacgtaggcctgggtgatgccgcccagccccgaaacctcaccaagcggcactggccaggggcccctgaggaccaagatgacaaggatggtggggacttcagtggcactggaggccttcccgactactcagccgccaaccccattaaagtgacacatcggtgctacatcctagagaacgacacagtccagtgtgacctggacctgtacaagtccctgcaggcctggaaagaccacaagctgcacatcgaccacgagattgaaaccctgcagaacaaaattaagaacctgagggaagtccgaggtcacctgaagaaaaagcggccagaagaatgtgactgtcacaaaatcagctaccacacccagcacaaaggccgcctcaagcacagaggctccagtctgcatcctttcaggaagggcctgcaagagaaggacaaggtgtggctgttgcgggagcagaagcgcaagaagaaactccgcaagctgctcaagcgcctgcagaacaacgacacgtgcagcatgccaggcctcacgtgcttcacccacgacaaccagcactggcagacggcgcctttctggacactggggcctttctgtgcctgcaccagcgccaacaataacacgtactggtgcatgaggaccatcaatgagactcacaatttcctcttctgtgaatttgcaactggcttcctagagtactttgatctcaacacagacccctaccagctgatgaatgcagtgaacacactggacagggatgtcctcaaccagctacacgtacagctcatggagctgaggagctgcaagggttacaagcagtgtaacccccggactcgaaacatggacctgggacttaaagatggaggaagctatgagcaatacaggcagtttcagcgtcgaaagtggccagaaatgaagagaccttcttccaaatcactgggacaactgtgggaaggctgggaaggttaagaaacaacagaggtggacctccaaaaacatagaggcatcacctgactgcacaggcaatgaaaaaccatgtgggtgatttccagcagacctgtggtattggccaggaggcctgagaaagcaagcacgcactctcagtcaacatgacagattctggaggataaccagcaggagcagagataacttcaggaagtccatttttgcccctgcttttgctttggattatacctcaccagctgcacaaaatgcattttttcgtatcaaaaagtcaccactaaccctcccccagaagctcacaaaggaaaacggagagagcgagcgagagagatttccttggaaatttctcccaagggcgaaagtcattggaatttttaaatcataggggaaaagcagtcctgttctaaatcctcttattcttttggtttgtcacaaagaaggaactaagaagcaggacagaggcaacgtggagaggctgaaaacagtgcagagacgtttgacaatgagtcagtagcacaaaagagatgacatttacctagcactataaaccctggttgcctctgaagaaactgccttcattgtatatatgtgactatttacatgtaatcaacatgggaacttttaggggaacctaataagaaatcccaattttcaggagtggtggtgtcaataaacgctctgtggccagtgtaaaagaaaatccctcgcagttgtggacatttctgttcctgtccagataccatttctcctagtatttctttgttatgtcccagaactgatgttttttttttaaggtactgaaaagaaatgaagttgatgtatgtcccaagttttgatgaaactgtatttgtaaaaaaaattttgtagtttaagtattgtcatacagtgttcaaaaccccagccaatgaccagcagttggtatgaagaacctttgacattttgtaaaaggccatttcttgggagttttttggtgtgtctgtttttttaaagtattcaagatactaccagtcaacatctttttggaagaaaatgccttgggtttagaagattttcttaaaaggggagtagatggttgtagattgactaaaaagtctaccatacttcaagggactacaggtaagtctcatagtataccagctttggtacttcattttttaaaaaagtattaatcaattgcaaagaaattcgccttggccaacccttctttgtgtatcaggtagtctaacctgatacaagtagttgacagatttcaactatcaatcaccagtccaacccatttctcatttaacagatgacggagataatccctaaaagcacccacatttgtttcaatgccccaaacaggccaaggctccctagcaactccctagtggcgttttttaacttctcagaaactgttaccattatttgaaataggcttccttaacctcctttacccttaacccaacagggattt

SEQ ID NO: 200026 - DNA, 1825 bp, Artificial Sequence
  derived and/or modified sequence
ttcagtggcactggaggccttcccgactattcagccgccaaccccattaaagtgacacatcggtgctacatcctagagaacgacacagtccagtgtgacctggacctgtacaagtccctgcaggcctggaaagaccacaagctgcacatcgaccacgagattgaaaccctgcagaacaaaattaagaacctgagggaagtccgaggtcacctgaagaaaaagcggccagaagaatgtgactgtcacaaaatcagctaccacacccagcacaaaggccgcctcaagcacagaggctccagtctgcatcctttcaggaagggcctgcaagagaaggacaaggtgtggctgttgcgggagcagaagcgcaagaagaaactccgcaagctgctcaagcgcctgcagaacaacgacacgtgcagcatgccaggcctcacgtgcttcacccacgacaaccagcactggcagacggcgcctttctggacactggggcctttctgtgcctgcaccagcgccaacaataacacgtactggtgcatgaggaccatcaatgagactcacaatttcctcttctgtgaatttgcaactggcttcctagagtactttgatctcaacacagacccctaccagctgatgaatgcagtgaacacactggacagggatgtcctcaaccagctacacgtacagctcatggagctgaggagctgcaagggttacaagcagtgtaacccccggactcgaaacatggacctgggacttaaagatggaggaagctatgagcaatacaggcagtttcagcgtcgaaagtggccagaaatgaagagaccttcttccaaatcactgggacaactgtgggaaggctgggaaggttaagaaacaacagaggtggacctccaaaaacatagaggcatcacctgactgcacaggcaatgaaaaaccatgtgggtgatttccagcagacctgtggtattggccaggaggcctgagaaagcaagcacgcactctcagtcaacatgacagattctggaggataaccagcaggagcagagataacttcaggaagtccatttttgcccctgcttttgctttggattatacctcaccagctgcacaaaatgcattttttcgtatcaaaaagtcaccactaaccctcccccagaagctcacaaaggaaaacggagagagcgagcgagagagatttccttggaaatttctcccaagggcgaaagtcattggaatttttaaatcataggggaaaagcagtcctgttctaaatcctcttattcttttggtttgtcacaaagaaggaactaagaagcaggacagaggcaacgtggagaggctgaaaacagtgcagagacgtttgacaatgagtcagtagcacaaaagagatgacatttacctagcactataaaccctggttgcctctgaagaaactgccttcattgtatatatgtgactatttacatgtaatcaacatgggaacttttaggggaacctaataagaaatcccaattttcaggagtggtggtgtcaataaacgctctgtggccagtgtaaaagaaaatccctcgcagttgtggacatttctgttcctgtccagataccatttctcctagtatttctttgttatgtcccagaactgatgttttttttttaaggtactgaaaagaaatgaagttgatgtatgtcccaagttttgatgaaactgtatttgtaaaaaaaattttgtagtttaagtattgtcatacagtgttcaaaaccccagccaatgaccagcagttggtatgaagaacctttgacattttgtaaaaggccatttcttggg

SEQ ID NO: 200027 - DNA, 4238 bp, Artificial Sequence
  derived and/or modified sequence
gggccatttctggacaacagctgctattttcacttgagccgaagttaatttctcggggagttctcgggcgcgcacaggcagctcggtttgccctgcgattgagctgcgggtcgcggccggcgccggcctctccaatggcaaatgtgtgtggctggaggcgagcgcgaggctttcggcaaaggcagtcgagtgtttgcagaccggggcgagtcctgtgaaagcagataaaagaaaacatttattaacgtgtcattacgaggggagcgcccggccggggctgtcgcactccccgcggaacatttggctccctccagctccgagagaggagaagaagaaagcggaaaagaggcagattcacgtcgtttccagccaagtggacctgatcgatggccctcctgaatttatcacgatatttgatttattagcgatgccccctggtttgtgtgttacgcacacacacgtgcacacaaggctctggctcgcttccctccctcgtttccagctcctgggcgaatcccacatctgtttcaactctccgccgagggcgagcaggagcgagagtgtgtcgaatctgcgagtgaagagggacgagggaaaagaaacaaagccacagacgcaacttgagactcccgcatcccaaaagaagcaccagatcagcaaaaaaagaagatgggccccccgagcctcgtgctgtgcttgctgtccgcaactgtgttctccctgctgggtggaagctcggccttcctgtcgcaccaccgcctgaaaggcaggtttcagagggaccgcaggaacatccgccccaacatcatcctggtgctgacggacgaccaggatgtggagctgggttccatgcaggtgatgaacaagacccggcgcatcatggagcagggcggggcgcacttcatcaacgccttcgtgaccacacccatgtgctgcccctcacgctcctccatcctcactggcaagtacgtccacaaccacaacacctacaccaacaatgagaactgctcctcgccctcctggcaggcacagcacgagagccgcacctttgccgtgtacctcaatagcactggctaccggacagctttcttcgggaagtatcttaatgaatacaacggctcctacgtgccacccggctggaaggagtgggtcggactccttaaaaactcccgcttttataactacacgctgtgtcggaacggggtgaaagagaagcacggctccgactactccaaggattacctcacagacctcatcaccaatgacagcgtgagcttcttccgcacgtccaagaagatgtacccgcacaggccagtcctcatggtcatcagccatgcagccccccacggccctgaggattcagccccacaatattcacgcctcttcccaaacgcatctcagcacatcacgccgagctacaactacgcgcccaacccggacaaacactggatcatgcgctacacggggcccatgaagcccatccacatggaattcaccaacatgctccagcggaagcgcttgcagaccctcatgtcggtggacgactccatggagacgatttacaacatgctggttgagacgggcgagctggacaacacgtacatcgtatacaccgccgaccacggttaccacatcggccagtttggcctggtgaaagggaaatccatgccatatgagtttgacatcagggtcccgttctacgtgaggggccccaacgtggaagccggctgtctgaatccccacatcgtcctcaacattgacctggcccccaccatcctggacattgcaggcctggacatacctgcggatatggacgggaaatccatcctcaagctgctggacacggagcggccggtgaatcggtttcacttgaaaaagaagatgagggtctggcgggactccttcttggtggagagaggcaagctgctacacaagagagacaatgacaaggtggacgcccaggaggagaactttctgcccaagtaccagcgtgtgaaggacctgtgtcagcgtgctgagtaccagacggcgtgtgagcagctgggacagaagtggcagtgtgtggaggacgccacggggaagctgaagctgcataagtgcaagggccccatgcggctgggcggcagcagagccctctccaacctcgtgcccaagtactacgggcagggcagcgaggcctgcacctgtgacagcggggactacaagctcagcctggccggacgccggaaaaaactcttcaagaagaagtacaaggccagctatgtccgcagtcgctccatccgctcagtggccatcgaggtggacggcagggtgtaccacgtaggcctgggtgatgccgcccagccccgaaacctcaccaagcggcactggccaggggcccctgaggaccaagatgacaaggatggtggggacttcagtggcactggaggccttcccgactactcagccgccaaccccattaaagtgacacatcggtgctacatcctagagaacgacacagtccagtgtgacctggacctgtacaagtccctgcaggcctggaaagaccacaagctgcacatcgaccacgagattgaaaccctgcagaacaaaattaagaacctgagggaagtccgaggtcacctgaagaaaaagcggccagaagaatgtgactgtcacaaaatcagctaccacacccagcacaaaggccgcctcaagcacagaggctccagtctgcatcctttcaggaagggcctgcaagagaaggacaaggtgtggctgttgcgggagcagaagcgcaagaagaaactccgcaagctgctcaagcgcctgcagaacaacgacacgtgcagcatgccaggcctcacgtgcttcacccacgacaaccagcactggcagacggcgcctttctggacactggggcctttctgtgcctgcaccagcgccaacaataacacgtactggtgcatgaggaccatcaatgagactcacaatttcctcttctgtgaatttgcaactggcttcctagagtactttgatctcaacacagacccctaccagctgatgaatgcagtgaacacactggacagggatgtcctcaaccagctacacgtacagctcatggagctgaggagctgcaagggttacaagcagtgtaacccccggactcgaaacatggacctgggacttaaagatggaggaagctatgagcaatacaggcagtttcagcgtcgaaagtggccagaaatgaagagaccttcttccaaatcactgggacaactgtgggaaggctgggaaggttaagaaacaacagaggtggacctccaaaaacatagaggcatcacctgactgcacaggcaatgaaaaaccatgtgggtgatttccagcagacctgtggtattggccaggaggcctgagaaagcaagcacgcactctcagtcaacatgacagattctggaggataaccagcaggagcagagataacttcaggaagtccatttttgcccctgcttttgctttggattatacctcaccagctgcacaaaatgcattttttcgtatcaaaaagtcaccactaaccctcccccagaagctcacaaaggaaaacggagagagcgagcgagagagatttccttggaaatttctcccaagggcgaaagtcattggaatttttaaatcataggggaaaagcagtcctgttctaaatcctcttattcttttggtttgtcacaaagaaggaactaagaagcaggacagaggcaacgtggagaggctgaaaacagtgcagagacgtttgacaatgagtcagtagcacaaaagagatgacatttacctagcactataaaccctggttgcctctgaagaaactgccttcattgtatatatgtgactatttacatgtaatcaacatgggaacttttaggggaacctaataagaaatcccaattttcaggagtggtggtgtcaataaacgctctgtggccagtgtaaaagaaaatccctcgcagttgtggacatttctgttcctgtccagataccatttctcctagtatttctttgttatgtcccagaactgatgttttttttttaaggtactgaaaagaaatgaagttgatgtatgtcccaagttttgatgaaactgtatttgtaaaaaaaattttgtagtttaagtattgtcatacagtgttcaaaaccccagccaatgaccagcagttggtatgaagaacctttgacattttgtaaaaggccatttcttggga

SEQ ID NO: 200028 - protein, 145 aa, Artificial Sequence
  derived and/or modified sequence
MELVQVLKRGLQQITGHGGLRGYLRVFFRTNDAKVGTLVGEDKYGNKYYEDNKQFFGRHRWVVYTTEMNGKNTFWDVDGSMVPPEWHRWLHSMTDDPPTTKPLTARKFIWTNHKFNVTGTPEQYVPYSTTRKKIQEWIPPSTPYK

SEQ ID NO: 200029 - DNA, 438 bp, Artificial Sequence
  derived and/or modified sequence
atggagctggtgcaggtgctgaagagaggcctgcagcagatcaccggccacggcggcctgagaggctacctgagagtgttcttcagaaccaacgacgccaaggtgggcaccctggtgggcgaggacaagtacggcaacaagtactacgaggacaacaagcagttcttcggcagacacagatgggtggtgtacaccaccgagatgaacggcaagaacaccttctgggacgtggacggcagcatggtgccccccgagtggcacagatggctgcacagcatgaccgacgacccccccaccaccaagcccctgaccgccagaaagttcatctggaccaaccacaagttcaacgtgaccggcacccccgagcagtacgtgccctacagcaccaccagaaagaagatccaggagtggatcccccccagcaccccctacaagtag

SEQ ID NO: 200030 - DNA, 438 bp, Artificial Sequence
  derived and/or modified sequence
atggagcttgtccaagtgttgaaaaggggtctccaacagatcaccggccacggcggcttgcggggctacctgcgtgttttttttcggacaaatgacgccaaagtcggaacccttgtaggggaagacaagtacggcaacaagtattatgaagataacaagcagttttttggccggcacagatgggttgtatacacaaccgaaatgaatgggaagaatacattctgggacgtggacgggtccatggtccctcctgaatggcacaggtggttgcacagcatgacagacgatcctcctaccaccaagccattgacggcacggaaatttatatggaccaaccacaaatttaatgttaccggaacgcccgaacagtacgtgccttacagcaccacaaggaaaaagattcaggagtggattccaccatctaccccttacaagtag

SEQ ID NO: 200031 - DNA, 438 bp, Artificial Sequence
  derived and/or modified sequence
atggagctggtgcaggtgctgaagaggggcctgcagcagatcactggacatggaggcctgcggggctacctgcgggtcttcttccgcaccaatgatgccaaggtgggcaccctggtgggggaggacaagtatggcaacaagtactatgaggacaacaagcagttcttcggccgccaccgctgggtggtgtacaccacagagatgaatggcaagaacaccttctgggatgtggatggctccatggtgcccccagagtggcaccgctggctgcacagcatgacagatgatcctcccaccaccaagcccctgacagccaggaagttcatctggaccaaccacaagttcaacgtgacaggcaccccagagcagtatgtgccctacagcaccaccaggaagaagatccaggagtggatcccccccagcaccccctacaagtag

SEQ ID NO: 200032 - DNA, 487 bp, Artificial Sequence
  derived and/or modified sequence
ggcgcacccgggaggcggggccagcgaggcaagatggagttagtgcaggtcctgaaacgcgggctgcagcagatcaccggccacggcggtctccgaggctatctacgggtttttttcaggacaaatgatgcgaaggttggtacattagtgggggaagacaaatatggaaacaaatactatgaagacaacaagcaattttttggcatcgttggcttcacagtatgactgatgatcctccaacaacaaaaccacttactgctcgtaaattcatttggacgaaccataaattcaacgtgactggcaccccagaacaatatgtaccttattctaccactagaaagaagattcaggagtggatcccaccttcaacaccttacaagtaaagacaatgaagaacagttgaaacatgcaaaatatggagcttttcatgtaattactcttttactgtttaccattcactataattcacaattaaaattgtgtgact

SEQ ID NO: 200033 - DNA, 635 bp, Artificial Sequence
  derived and/or modified sequence
ttctgggcgtgggcttcctgcggctgagtggcagcttccatccggtgggttttgctcggcgcacccgggaggcggggccagcgaggcaagatggagttagtgcaggtcctgaaacgcgggctgcagcagatcaccggccacggcggtctccgaggctatctacgggtttttttcaggacaaatgatgcgaaggttggtacattagtgggggaagacaaatatggaaacaaatactatgaagacaacaagcaattttttggccgtcaccgatgggttgtatatactactgaaatgaatggcaaaaacacattctgggatgtggatggaagcatggtgcctcctgaatggcatcgttggcttcacagtatgactgatgatcctccaacaacaaaaccacttactgctcgtaaattcatttggacgaaccataaattcaacgtgactggcaccccagaacaatatgtaccttattctaccactagaaagaagattcaggagtggatcccaccttcaacaccttacaagtaaagacaatgaagaacagttgaaacatgcaaaatatggagcttttcatgtaattactcttttactgtttaccattcactataattcacaattaaaattgtgtgactaaa

SEQ ID NO: 200034 - DNA, 438 bp, Artificial Sequence
  derived and/or modified sequence
atggagctggtgcaggtgctgaagcggggcctgcagcagatcaccggacatggcggcctgaggggctatctccgcgtgttcttccgaactaacgatgctaaagtgggcaccctcgtgggagaggataaatatggcaacaaatactacgaagacaacaaacagttctttggaagacatagatgggttgtttataccaccgaaatgaacggtaaaaatacgttttgggacgttgatgggagcatggtccccccagagtggcacaggtggctccatagtatgaccgatgatcccccaaccacaaagcctttgaccgccagaaaatttatatggactaatcacaagttcaatgtcacagggacccccgagcagtatgtgccatacagtaccacgcgcaagaagatccaggagtggattccgccaagtaccccctacaaatag

SEQ ID NO: 200035 - DNA, 438 bp, Artificial Sequence
  derived and/or modified sequence
atggagctggtccaggtgttaaaaaggggcctgcaacagataacgggccatggcggactaaggggctacctgcgggtgttcttcagaaccaacgacgctaaggtggggaccctggtgggggaagacaaatacggaaataagtattatgaggataataagcagttttttgggcgtcatcgatgggtggtctacactacagaaatgaacggtaaaaacaccttttgggacgtggacggaagcatggtgcccccagagtggcataggtggctacacagcatgacagatgacccgcctaccacaaaaccactgacggccaggaagttcatttggacaaatcataagtttaatgtaactggcactcccgagcagtacgtgccctatagcacaacccggaagaagatccaggaatggatccccccttccactccttacaaatag

SEQ ID NO: 200036 - protein, 339 aa, Artificial Sequence
  derived and/or modified sequence
MAAERQEALREFVAVTGAEEDRARFFLESAGWDLQIALASFYEDGGDEDIVTISQATPSSVSRGTAPSDNRVTSFRDLIHDQDEDEEEEEGQRFYAGGSERSGQQIVGPPRKKSPNELVDDLFKGAKEHGAVAVERVTKSPGETSKPRVHVVLKLWKSGFSLDNGELRSYQDPSNAQFLESIRRGEVPAELRRLAHGGQVNLDMEDHRDEDFVKPKGAFKAFTGEGQKLGSTAPQVLSTSSPAQQAENEAKASSSILIDESEPTTNIQIRLADGGRLVQKFNHSHRISDIRLFIVDARPAMAATSFILMTTFPNKELADESQTLKEANLLNAVIVQRLT

SEQ ID NO: 200037 - DNA, 1020 bp, Artificial Sequence
  derived and/or modified sequence
atggccgccgagagacaggaggccctgagagagttcgtggccgtgaccggcgccgaggaggacagagccagattcttcctggagagcgccggctgggacctgcagatcgccctggccagcttctacgaggacggcggcgacgaggacatcgtgaccatcagccaggccacccccagcagcgtgagcagaggcaccgcccccagcgacaacagagtgaccagcttcagagacctgatccacgaccaggacgaggacgaggaggaggaggagggccagagattctacgccggcggcagcgagagaagcggccagcagatcgtgggcccccccagaaagaagagccccaacgagctggtggacgacctgttcaagggcgccaaggagcacggcgccgtggccgtggagagagtgaccaagagccccggcgagaccagcaagcccagagtgcacgtggtgctgaagctgtggaagagcggcttcagcctggacaacggcgagctgagaagctaccaggaccccagcaacgcccagttcctggagagcatcagaagaggcgaggtgcccgccgagctgagaagactggcccacggcggccaggtgaacctggacatggaggaccacagagacgaggacttcgtgaagcccaagggcgccttcaaggccttcaccggcgagggccagaagctgggcagcaccgccccccaggtgctgagcaccagcagccccgcccagcaggccgagaacgaggccaaggccagcagcagcatcctgatcgacgagagcgagcccaccaccaacatccagatcagactggccgacggcggcagactggtgcagaagttcaaccacagccacagaatcagcgacatcagactgttcatcgtggacgccagacccgccatggccgccaccagcttcatcctgatgaccaccttccccaacaaggagctggccgacgagagccagaccctgaaggaggccaacctgctgaacgccgtgatcgtgcagagactgacctag

SEQ ID NO: 200038 - DNA, 1020 bp, Artificial Sequence
  derived and/or modified sequence
atggcagcagaaagacaagaggctctgcgtgagttcgtggctgtgactggagccgaggaggacagagccagatttttccttgagagcgcaggttgggatttacagatagctctcgccagcttctacgaagacgggggggatgaagacatcgtcaccatcagccaggccactcccagctcagtttcgagaggcacagctccctcagataaccgagtgacatcattcagagacctgatccacgaccaggatgaagacgaagaggaggaggaaggtcagaggttctatgccgggggcagtgagcgctcaggccagcagatcgtggggccgcctagaaagaagtctcccaatgagctagtcgatgacttgtttaaaggtgccaaagagcatggtgccgtcgcagtggaacgcgtgaccaaaagtccaggagaaacctcaaagcctagagtccacgtcgtcctgaagctgtggaagtccggattcagccttgacaacggcgagcttcgctcataccaggacccatctaatgcgcagttccttgaaagtatccggcgcggtgaagtgcctgctgagctgaggcgtctagctcacggcggccaggtgaacttggatatggaagaccaccgggatgaagatttcgtgaaaccaaagggcgctttcaaggccttcaccggggagggccagaagctgggctctacagccccacaggtgctgtcgacctcctcccccgcacagcaggcagaaaacgaagccaaagcctcgagcagcatcctcatcgacgagtccgagcccactactaatatccagatccgtctggcagatggcggaaggctggtgcagaaattcaatcactcccatcggatttccgacattcgcctcttcatcgtggacgcccggccagccatggccgccacctcatttattttgatgacgacatttcccaacaaagagcttgctgatgagtctcagaccttgaaggaagccaacctgctgaatgccgttattgttcaaaggctgacatag

SEQ ID NO: 200039 - DNA, 1020 bp, Artificial Sequence
  derived and/or modified sequence
atggctgctgagcggcaggaggccctgcgggagtttgtggccgtgactggagctgaggaggaccgggcccgcttcttcctggagagcgctggctgggacctgcagatcgccctggccagcttctatgaagatggaggagatgaggacatcgtgaccatcagccaggccacccccagctctgtgtcccggggcacagcccccagcgacaacagagtgaccagcttccgggacctgattcatgaccaggatgaagatgaggaggaggaggagggccagcgcttctacgccggcggcagcgagaggagcggccagcagatcgtgggcccccccaggaagaagagccccaatgagctggtggatgacctcttcaagggggccaaggagcacggggctgtggccgtggagcgggtgaccaagagccctggagagaccagcaagccccgggtgcacgtggtgctgaagctgtggaagagcggcttcagcctggacaacggggagctgcggagctaccaggaccccagcaatgcccagttcctggagagcatcagaagaggagaggtgcctgctgagctgcggcggctggcccacggcggccaggtgaacctggacatggaggaccacagagatgaggactttgtgaagcccaagggggccttcaaggccttcaccggggagggccagaagctgggcagcacagccccccaggtgctgagcaccagcagccctgcccagcaggctgaaaatgaggccaaggccagcagcagcatcctgattgatgaaagtgagcccaccaccaacatccagatccggctggctgatggcggccgcctggtgcagaagttcaaccacagccaccgcatcagtgacatccgcctcttcatcgtggatgcccggcctgccatggccgccaccagcttcatcctgatgaccaccttccccaacaaggagctggctgatgagagccagaccctgaaggaggccaacctgctgaatgctgtgattgtgcagaggctgacctag

SEQ ID NO: 200040 - DNA, 2611 bp, Artificial Sequence
  derived and/or modified sequence
gaagatggcggcggagcgacaggaggcgctgagggagttcgtggcggtgacgggcgccgaggaggaccgggcccgcttctttctcgagtcggccggctgggacttgcagatcgcgctagcgagcttttatgaggacggaggggatgaagacattgtgaccatttcgcaggcaacccccagttcagtgtccagaggcacagcccccagtgataatagagtgacatccttcagagacctcattcatgaccaagatgaagatgaggaggaagaggaaggccagaggttttatgctgggggctcagagagaagtggacagcagattgttggccctcccaggaagaaaagtcccaacgagctggtggatgatctctttaaaggtgccaaagagcatggagctgtagctgtggagcgagtgaccaagagccctggagagaccagtaaaccgagagttcatgtagtattgaaactctggaagagtggattcagcctggataatggagaactcagaagctaccaagacccatccaatgcccagtttctggagtctatccgcagaggggaggtgccagcagagcttcggaggctagctcacggtggacaggtgaacttggatatggaggaccatcgggacgaggactttgtgaagcccaaaggagccttcaaagccttcactggcgagggtcagaaactgggcagcactgccccccaggtgttgagtaccagctctccagcccaacaggcagaaaatgaagccaaagccagctcttccatcttaatcgacgaatcagagcctaccacaaacatccaaattcggcttgcagacggcgggaggctggtgcagaaatttaaccacagccacaggatcagcgacatccgactcttcatcgtggatgcccggccagccatggctgccaccagctttatcctcatgactactttcccgaacaaagagctggctgatgagagccagaccctgaaggaagccaacctgctcaatgctgtcatcgtgcagcggttaacataaccgcccagccagctgcctggcctccctcctgtgtttcccatggccagtggccatgccccatggggatcgcccctcctgcccccttgtgcacacccagcagtccagtgcaacgtctcctccatagctctgggttcttagatcttggttggacgtttgttttctccttagttgcatttcctgggtttttgtgatgatcaatggactttaatgaaaaaaaaaataaaaacaaccaaaaaaattgaaggaatatcaccagcatgttgtacggaaactctcccactgaagcaggctttaattgctttaaaattatatttatcttggggcctgtgggaggaaacttccttccatcttctctgcataaaaacttgtggcacacaatgcttattcactagtgtgtcccacccgccagccccacagatgactggaggaaggaggggaaatgtgtagaaagaggcttcgccaccacttgttcccacgagaatatgtcacttgcccagataaaactgggcggcagccagagttccctgaagtgggaagtcagagctccatgcacacagtgtcttcagaaggtgaaaataaatatttccctgtgctccttttactcaacccctggggtatctaatcttgccaggtcttggccagttgagattctgttccacctgcctgcctggccctttcctccattaccatccagactgctcgcctcctggggattctcaggggctccattatggcttgatttactccacgtgcagaagtcttgagtggacctaggaggtaggtgggatattttttttcactaggatacagctcatgccaacccatcctaagtgagttcagaatcagggtatcttgccctataagataaacagtcaaaatgccaccgagctgttcactagtgatgtgtggcaaatcaaatcaactgttgaagaaggggtgagttttctgtgctacaagcacctgtcactgttggtacttgcaggaggcttctgctgggtatgttttggaagtgagtgtcactacttggctttgcttagcaggttctgcttcacacttgttctttgacctgctgacttgtgacttgcagaaacataggcagtagtcctagcctggtaaagaccctccaccacccctataagtttgattgctatgcaggtttgggagaggaggcctattgggctcttggatggaaccctttcccgtattaaacaaaccagagacagaatcagtgctgactcaggatctcctggtttggaatcgtaatgtgcctcaatcctctttccaagcaggcctcaccagtctctttctctttcctgcttcacccctgcaatgagccaagaaccaacactacatccacctagaactgcagaagggcttgtggtttcaaccaagacccatcctgagcaagggacttggcttggtgcttttgatcccaaagttcccacaccggcagtggcctgctggggcaatggcatctgtcacggtgttttctccagcaggtggagattatggaacctacatatgggtctggaaaaactgtacactgttgtcaccttgaccattaaaaaccagaatgaggacaatgga

SEQ ID NO: 200041 - DNA, 1020 bp, Artificial Sequence
  derived and/or modified sequence
atggccgccgagcggcaggaggccctgcgggagttcgtggccgtgaccggggcagaagaagacagggcccgcttcttcctggaatccgctggatgggatcttcagatcgctctggcttctttctatgaggatgggggggacgaggacatcgtcacgatcagccaggctaccccatcatcagtgtcacgagggaccgcccccagtgataatcgggttacgtcgtttcgggacctgatccacgaccaggacgaggatgaagaagaggaggaggggcaacgcttttacgcagggggttccgaacgtagcggtcagcagatcgtcggtcctccacggaaaaaaagccccaacgagctagtagatgatttattcaaaggggcaaaagaacatggggccgtcgccgtggagagggtgaccaagagcccgggagagacctccaagccacgcgtccatgtcgtgctcaaactgtggaaaagcggctttagcctcgataacggcgagcttcgcagctaccaggacccatctaatgcacaatttttggagtccatccgacgcggggaagttccagccgaactcaggcggctggctcatggcggccaggttaacctcgatatggaagatcacagagacgaggacttcgttaaaccaaagggggcttttaaggcgtttaccggcgaagggcagaagctggggtccactgctccacaggtgttgagtacgtcgtcaccagcccaacaagccgaaaatgaggccaaggcctccagtagcatcctgatagacgagtcagaaccaacaaccaacattcagatcaggttggctgacgggggcaggctggtgcaaaagtttaatcatagccatcgaatctcggatatcaggctattcatagtggacgcacgcccagccatggcagcgacctccttcattttgatgacgaccttccctaacaaggagttggctgatgagtcacagactttgaaggaggccaatctcctcaacgccgtcatcgtgcagcgccttacttag

SEQ ID NO: 200042 - DNA, 1020 bp, Artificial Sequence
  derived and/or modified sequence
atggctgccgaaaggcaggaggcgctgcgggaatttgtggccgtgactggagcagaggaagacagagcacgattttttctggagagtgccggttgggatctgcaaatcgccctagcatcgttttatgaggatggaggggacgaagacattgtcactataagccaggcaaccccttcttcggtttccagagggacggccccaagcgataacagagtcacgtcctttagagatctgatacatgatcaggatgaagacgaggaagaggaggaaggccaaagattttacgctggcggttccgaaaggtctggccagcagatcgttggaccgccaaggaagaagtcacccaacgagctggtggatgatttatttaagggagctaaggagcacggcgcagtggcagtggaaagggtgaccaagtctcctggggaaacctccaagccaagagttcatgtggttttgaagctgtggaagtccggcttttcactcgataacggggaactgcgctcttatcaggacccatctaacgctcaatttctcgaatccattaggcggggtgaggtcccagcggagctcaggcgactcgcacatggcggtcaggtgaaccttgacatggaggaccacagagacgaggactttgtgaaaccaaagggggctttcaaagcatttaccggagaaggccagaagttgggaagcacagcacctcaagtccttagcactagcagtcctgcccagcaagctgagaatgaggccaaagcttctagtagcattttgatcgatgagtcagagccaacaaccaacatccagatacgacttgcggatggcggacggctggttcagaaattcaaccacagccatcggatatccgacatacgcctcttcatcgtggacgccaggcctgcaatggcggcaacaagttttattctgatgacgacattcccaaataaagagctggccgacgaatctcagacactaaaggaagctaatctgcttaatgcagttattgtgcaaagattgacttag

SEQ ID NO: 200043 - protein, 511 aa, Artificial Sequence
  derived and/or modified sequence
MSRGPEEVNRLTESTYRNVMEQFNPGLRNLINLGKNYEKAVNAMILAGKAYYDGVAKIGEIATGSPVSTELGHVLIEISSTHKKLNESLDENFKKFHKEIIHELEKKIELDVKYMNATLKRYQTEHKNKLESLEKSQAELKKIRRKSQGSRNALKYEHKEIEYVETVTSRQSEIQKFIADGCKEALLEEKRRFCFLVDKHCGFANHIHYYHLQSAELLNSKLPRWQETCVDAIKVPEKIMNMIEEIKTPASTPVSGTPQASPMIERSNVVRKDYDTLSKCSPKMPPAPSGRAYTSPLIDMFNNPATAAPNSQRVNNSTGTSEDPSLQRSVSVATGLNMMKKQKVKTIFPHTAGSNKTLLSFAQGDVITLLIPEEKDGWLYGEHDVSKARGWFPSSYTKLLEENETEAVTVPTPSPTPVRSISTVNLSENSSVVIPPPDYLECLSMGAAADRRADSARTTSTFKAPASKPETAAPNDANGTAKPPFLSGENPFATVKLRPTVTNDRSAPIIR

SEQ ID NO: 200044 - DNA, 1536 bp, Artificial Sequence
  derived and/or modified sequence
atgagccgtgggccagaggaggtcaacaggcttacagaaagcacatacagaaacgtcatggagcaattcaaccctggattacgcaacctgattaatctgggcaagaattatgaaaaggccgtcaacgccatgatcttagccggcaaagcctactacgacggagtggccaaaataggtgagatagctacaggctcgccagtctccaccgagctggggcatgtccttattgaaatcagcagtactcacaaaaagctgaacgagtccctggatgaaaatttcaagaagtttcataaggaaatcatccacgaactcgaaaaaaaaatcgaactggacgttaagtatatgaacgccacacttaaacgctatcagacggagcataagaacaagctggaatcccttgaaaagagtcaggccgaacttaaaaagatccgacgtaagtctcaaggtagccgaaacgctctaaaatacgaacacaaagagatcgaatacgttgagacagtgacatcacgccagtctgagatccagaaatttatagccgacgggtgcaaggaagcgcttctggaagaaaaacggcggttctgttttttagttgacaagcactgcggctttgctaaccacatccactattatcacctgcaaagcgcagaactgctgaactctaagctaccgcgctggcaggaaacctgtgttgatgcaattaaagttccggaaaaaattatgaatatgattgaggagattaagactcccgcctcaacccccgtcagtgggacaccgcaagccagccctatgattgagcggagtaacgtggttcggaaggactacgacaccctctctaaatgcagtcctaagatgcctcccgccccctctggccgggcttacacctcccccctgatcgatatgttcaacaaccccgccaccgcggcccctaattctcaacgcgtcaacaactccactggaacgtcagaggacccctctttgcagcggtcagtaagtgtcgctacagggctcaatatgatgaagaagcagaaagtgaagacaattttcccccacactgcaggtagcaataaaactctcctatccttcgcccagggtgacgtgatcactttgctgatcccagaagaaaaggacggctggctctatggtgaacacgatgtgtctaaggcccgggggtggttcccttccagttacaccaaactgcttgaggaaaacgagactgaagccgttaccgtgcccacaccatcccccactccagtcaggagcatttccacagtaaacctttcagaaaactcaagcgttgtaatccccccacccgactacctggagtgcctgtccatgggagcagccgctgacagacgcgccgactccgcaagaaccacatctacttttaaggcaccagcgagcaaacctgagactgcagccccaaacgacgcgaacggaacagccaaaccgcctttcttaagtggtgagaacccattcgcaactgtgaaactccggccgactgtgacaaatgatcgctcagcccctataatccggtag

SEQ ID NO: 200045 - DNA, 1536 bp, Artificial Sequence
  derived and/or modified sequence
atgagccggggccctgaggaggtgaaccggctgacagagagcacctacagaaatgtgatggagcagttcaaccctggcctgaggaacctgatcaacctgggcaagaactatgagaaggctgtgaatgccatgatcctggccggcaaggcctactatgatggagtggccaagatcggggagatcgccaccggcagccctgtgtccacagagctgggccacgtgctgattgagatcagcagcacccacaagaagctgaatgaaagcctggatgagaacttcaagaagttccacaaggagatcatccacgagctggagaagaagattgagctggatgtgaagtacatgaatgccaccctgaagcgctaccagacagagcacaagaacaagctggagagcctggagaagagccaggccgagctgaagaagatccggaggaagagccagggcagcagaaatgccctgaagtatgagcacaaggagattgaatatgtggagaccgtgaccagccggcagagcgagatccagaagttcatcgcagatggctgcaaggaggccctgctggaggagaagaggcgcttctgcttcctggtggacaagcactgcggctttgccaaccacatccactactaccacctgcagagcgctgagctgctgaacagcaagctgccccgctggcaggagacctgtgtggatgccatcaaggtgcctgagaagatcatgaacatgattgaggagatcaagaccccagccagcacccctgtgtctggcaccccccaggccagccccatgattgaaagaagcaatgtggtgaggaaggactatgacaccctgagcaagtgcagccccaagatgcccccagcccccagcggccgggcctacaccagccccctgattgacatgttcaacaacccagccacagctgcccccaacagccagagggtgaacaacagcacaggcaccagcgaggaccccagcctgcagaggtctgtgtctgtggccaccggcctgaacatgatgaagaagcagaaggtgaagaccatcttcccccacacagctggcagcaacaagaccctgctgagctttgcccagggagatgtgatcaccctgctgatccctgaggagaaggatggctggctgtatggagaacatgatgtgtccaaggcccggggctggttccccagcagctacaccaagctgctggaggagaatgaaacagaagctgtgacagtgcccacccccagccccacccctgtgcgcagcatcagcacagtgaacctgtctgagaacagctctgtggtgattcctcctccagactacctggagtgcctgtccatgggcgctgctgctgacagaagagctgacagcgcccggaccaccagcaccttcaaggccccagccagcaagccagagacagctgccccaaatgatgccaacggcacagccaagccacccttcctgtctggagagaacccctttgccaccgtgaagctgcggcccaccgtgaccaatgacagaagtgcccccatcatcagatag

SEQ ID NO: 200046 - DNA, 1536 bp, Artificial Sequence
  derived and/or modified sequence
atgagccggggccccgaggaggtgaaccggctgaccgagagcacctaccggaacgtgatggaacagttcaacccaggtctacgcaatctgatcaacctggggaaaaattatgaaaaagccgttaatgccatgattctggctggcaaggcttactacgatggcgtcgctaagattggggagatcgccaccggtagtcccgtctccaccgagctgggtcacgttctgatcgaaatttcatccacacataagaagctgaatgaatccctggacgagaacttcaagaagtttcacaaggagattattcatgagctggagaaaaaaattgaactggacgtgaagtatatgaacgccaccctgaaacgatatcagaccgagcacaaaaacaagctggagtctcttgagaaaagccaggctgagttgaagaagattcgacggaaatcacaaggttcccgcaatgccctgaagtatgagcataaggaaatcgaatatgtggaaacagtgaccagtaggcagtcggagattcaaaagtttatcgcggatggctgtaaagaagccctactcgaggaaaagcggcgtttctgctttcttgtggataaacactgcggtttcgccaaccatattcattattaccacctgcaaagcgctgagctgctgaattctaagctgcccaggtggcaggaaacctgtgtggacgctataaaagtcccggagaagattatgaatatgatcgaggagataaaaaccccagcatccactcctgtcagcgggaccccacaggcctcccctatgatcgagcgctcaaacgtagtccgtaaggattacgataccctcagtaaatgcagtcccaagatgccccccgccccaagcggcagggcctataccagccccctcatcgacatgttcaataacccagccacggctgcacctaactctcaaagagtcaacaattccaccggcacttctgaggacccaagtctacagcgctccgttagtgtggccacaggtctgaatatgatgaaaaagcagaaggtaaagactatcttcccgcacacggcgggctccaacaaaaccctcctttcctttgcccagggtgacgtgataactctgctgattccagaggagaaggatggctggctgtacggtgagcatgacgtgtccaaggcccgtgggtggttcccgagctcatataccaaactcctggaggaaaacgaaacagaagctgtgacagtgcctaccccttcccccacgcccgtcaggtccatttcaaccgtcaatttatcagagaattcctccgtcgtgatcccgccacccgactacctcgagtgcctaagtatgggagctgcagccgaccggcgagctgatagtgctcgaacaacctcgacctttaaggcccctgcatctaagcccgaaactgccgcccctaacgacgctaacgggaccgctaaaccaccatttttgagtggagaaaacccctttgcaacagtgaaactcaggcccaccgtgactaacgaccggtcagcccctattattagatag

SEQ ID NO: 200047 - DNA, 1536 bp, Artificial Sequence
  derived and/or modified sequence
atgtcacgcggtccagaggaggtaaataggctcacagaatctacataccgcaacgtcatggagcagttcaatcctggattgaggaatctcattaatctcggcaagaactacgagaaggctgtcaatgccatgatcctcgcaggtaaggcttactacgacggtgtggccaaaattggtgaaattgccacgggtagccccgttagcacggagcttggtcacgtgctgatcgagatcagcagtactcacaagaaattgaacgaatcattagacgaaaatttcaaaaagttccataaagaaattattcacgaactggagaagaagatcgaattggatgtcaagtacatgaacgcaacccttaagcgctaccagaccgagcacaaaaataagcttgaaagcttggagaaaagccaggctgaactcaaaaagattcggaggaaaagccagggatcgcgtaatgcactgaaatatgagcataaagagatcgagtacgtggaaactgtgactagcaggcagagcgagatacaaaaattcatcgccgacggatgtaaagaagcactgcttgaggagaagagaagattctgcttcctggtggataagcattgtggatttgccaaccatatacattactatcacctccagtccgcagaattgctgaactctaaacttccacgctggcaagagacttgcgttgatgccatcaaagtgcccgagaagatcatgaacatgatagaggagattaaaacccccgcatctacaccagtgtctgggaccccacaggcgtctccaatgattgagaggtcaaatgtggtgcggaaggactatgatacacttagtaaatgttctccaaagatgccccctgctccctccggacgcgcttacacctctccacttattgatatgttcaataatcctgccactgcagctcctaacagccagagggtgaataattcaactgggacctccgaagaccctagccttcagcggtccgtaagtgtcgccactggcctgaatatgatgaagaaacagaaagtaaagaccatttttccccacaccgctggctcaaataagacactgctttcctttgcccagggggacgtcatcacacttctgatccccgaagagaaggatgggtggttgtatggtgagcacgacgtgagcaaggctcggggatggtttccttcatcatacacaaaacttctggaagagaacgagaccgaagcagttacggttcctaccccgtcccctaccccggtgcggtccatctctaccgtcaatctgtcggagaactcctccgtggttatcccgcctcctgattatctggaatgcctgtcaatgggagcggcagcagatcgtcgagcagactctgccagaaccacttccacttttaaggcccctgcttccaagccagagactgccgctcctaatgatgcaaacggcactgccaagcctcccttcctctcaggcgagaatccatttgcaaccgtcaaacttcgcccaactgtaacgaacgaccgatctgctcccataataagatag

SEQ ID NO: 200048 - DNA, 1536 bp, Artificial Sequence
  derived and/or modified sequence
atgagcagaggtccagaagaagtgaaccgcttgactgagtcaacttaccgcaatgtgatggagcaattcaatcctggcttgaggaacttaattaacttgggaaagaactacgagaaagctgttaacgccatgatcctcgctggtaaagcctactacgatggggtggccaaaattggggagatagctacaggttcacccgtgagcacagaactgggccacgttttaattgaaatcagctccacccataaaaagctgaatgagtctttagatgagaatttcaaaaaattccacaaagagattatacacgagttagagaaaaagattgagctggacgtcaagtatatgaacgctactttgaagaggtatcagacagaacacaagaataagttagagtctttggagaaaagtcaggctgaactgaaaaaaatccgacggaaaagtcagggatctcggaacgccctcaaatatgagcataaggagatagaatacgtggagactgtcacctctcgacaatccgagatacagaagttcatcgccgatgggtgcaaggaggcccttcttgaggagaaacgtcgtttttgctttctggtggacaaacactgtggcttcgctaaccacatacactactaccatctgcaatctgctgagctgctgaattccaaattgcccagatggcaggaaacatgcgtagacgcgatcaaggtgcctgagaaaataatgaacatgatagaagagataaagacccctgcctctaccccagtgagcggcacaccccaagcttctcctatgattgagagaagtaacgtcgtgaggaaagattatgatactctgtccaagtgttccccaaaaatgcccccagccccctccggacgagcctatacttcacctctgatcgacatgtttaacaaccccgctacagccgccccaaactcccagcgtgttaacaactcaactggtacatccgaagacccctctctacagaggagcgtgagtgtcgctacaggcctgaatatgatgaaaaaacagaaagtgaaaaccatcttcccccacaccgcaggttcaaataaaacactgctgtctttcgcgcaaggcgacgtcatcaccctgctgatccctgaggagaaggatggatggttgtacggcgaacacgacgtgtccaaggctcgcggctggttcccatctagctatacaaagctcctggaagagaacgagaccgaagccgtgacagtacctactcccagccccactcccgtgagaagcataagcacagtcaacttaagcgaaaattcaagcgtggtgatcccaccccccgactatctggagtgtcttagtatgggcgccgccgccgacaggagagctgacagtgccagaaccacaagtaccttcaaggccccagcatctaagccagagacagcagctcctaacgacgcgaacggaacggctaagccaccctttctctctggggaaaatcccttcgcaaccgtgaagctgcgtcctacagtcacaaatgatcgcagcgccccgattatccgatag

SEQ ID NO: 200049 - DNA, 1536 bp, Artificial Sequence
  derived and/or modified sequence
atgtctagaggcccagaggaagtaaatcgcctgacagaatctacttatagaaatgtgatggaacagttcaatcctggcctgcgcaatctgatcaacctcggcaagaactatgaaaaggctgtcaacgccatgatactcgccggaaaagcctactatgacggggtggccaagattggtgaaatcgctaccggatcacctgtttctactgagctaggacacgtgttaatcgaaatctcttctacgcacaagaaactcaacgaatcactggacgaaaacttcaaaaaattccacaaggagatcattcacgagcttgaaaagaaaatagagctggacgtcaagtatatgaacgccacccttaaacggtatcagacagagcacaaaaataaattggagagcctggaaaagagtcaagctgaactgaaaaaaattcgcagaaagtcccaaggcagtcgcaacgcactgaagtatgaacacaaggagattgaatatgttgaaactgttacaagtaggcaaagtgaaatacaaaagtttatcgcagatggttgtaaggaagcacttctagaagaaaagcggcgcttttgttttctagtggacaaacactgcggattcgccaatcatatccactactaccacctccagagcgccgaactcctcaattctaagcttccaagatggcaggaaacatgtgttgatgcaattaaagtccctgagaagatcatgaatatgatcgaagagattaagacaccagcttctacccccgttagcggcactcctcaggcctccccaatgattgagagatcaaatgtggtcagaaaagattatgacactctttccaaatgctcaccaaaaatgccaccagctccatccggaagagcctatacatcaccgctcatagatatgtttaacaatccggcgaccgcagcaccaaacagtcagagagtgaataattctaccgggacaagtgaggatccctccctgcagcggtcagtgagcgttgccaccggcctaaatatgatgaaaaaacagaaggtaaaaactatatttcctcacactgccgggtccaataaaacactgctttctttcgcgcaaggagatgtcatcactctcttaattcccgaagagaaggacggttggttatacggagaacatgacgtctctaaggctcgaggctggttcccctcctcctacacaaaacttctggaagaaaatgaaacagaagccgtcactgtgcccacccctagtccaacaccagtcagaagtataagcaccgtcaacctaagcgaaaacagctcagttgtgatccctccccctgattatcttgaatgtctgtcaatgggagctgccgcagatcgtagggccgactcagcaagaactacctcgactttcaaggctccggcatctaagcctgagacagctgcaccaaatgacgctaacggcacagctaagccgcccttcttgtccggtgagaatccatttgccaccgtaaaattgcgacctacagttaccaacgaccgcagcgcacccatcatcagatag

SEQ ID NO: 200050 - DNA, 3622 bp, Artificial Sequence
  derived and/or modified sequence
ctcctctgctcctcgaagaaggccagggcggcgctgccgcaagttttgacattttcgcagcggagacgcgcgcgggcactctcgggccgacggctgcggcggcggccgaccctccagagccccttagtcgcgccccggccctcccgctgcccggagtccggcggccacgaggcccagccgcgtcctcccgcgcttgctcgcccggcggccgcagccatgtcccgggggcccgaggaggtgaaccggctcacggagagcacctaccggaatgttatggaacagttcaatcctgggctgcgaaatttaataaacctggggaaaaattatgagaaagctgtaaacgctatgatcctggcaggaaaagcctactacgatggagtggccaagatcggtgagattgccactgggtcccccgtgtcaactgaactgggacatgtcctcatagagatttcaagtacccacaagaaactcaacgagagtcttgatgaaaattttaaaaaattccacaaagagattatccatgagctggagaagaagatagaacttgacgtgaaatatatgaacgcaactctaaaaagataccaaacagaacacaagaataaattagagtctttggagaaatcccaagctgagttgaagaagatcagaaggaaaagccaaggaagccgaaacgcactcaaatatgaacacaaagaaattgagtatgtggagaccgttacttctcgtcagagtgaaatccagaaattcattgcagatggttgcaaagaggctctgcttgaagagaagaggcgcttctgctttctggttgataagcactgtggctttgcaaaccacatacattattatcacttacagtctgcagaactactgaattccaagctgcctcggtggcaggagacctgtgttgatgccatcaaagtgccagagaaaatcatgaatatgatcgaagaaataaagaccccagcctctacccccgtgtctggaactcctcaggcttcacccatgatcgagagaagcaatgtggttaggaaagattacgacaccctttctaaatgctcaccaaagatgccccccgctccttcaggcagagcatataccagtcccttgatcgatatgtttaataacccagccacggctgccccgaattcacaaagggtaaataattcaacaggtacttccgaagatcccagtttacagcgatcagtttcggttgcaacgggactgaacatgatgaagaagcagaaagtgaagaccatcttcccgcacactgcgggctccaacaagaccttactcagctttgcacagggagatgtcatcacgctgctcatccccgaggagaaggatggctggctctatggagaacacgacgtgtccaaggcgaggggttggttcccgtcgtcgtacacgaagttgctggaagaaaatgagacagaagcagtgaccgtgcccacgccaagccccacaccagtgagaagcatcagcaccgtgaacttgtctgagaatagcagtgttgtcatccccccacccgactacttggaatgcttgtccatgggggcagctgccgacaggagagcagattcggccaggacgacatccacctttaaggccccagcgtccaagcccgagaccgcggctcctaacgatgccaacgggactgcaaagccgccttttctcagcggagaaaacccctttgccactgtgaaactccgcccgactgtgacgaatgatcgctcggcacccatcattcgatgagaggacagccaaggactctcccgggcctctccggttctcccttgcggaatgatgggcgcatcctgtctgccacgtgctgacggtcgggaagcttcagtggagaggcctaactctaatgtcgcctgcttaagcaaatcatgcttctctgtttcacgtagttgggttgacaagtttctgcctttaagataaatgagtaatagtctaatgaccagctcagccatttaaaatattttcttcctattctgttcaagaaacagtaaacttggtttcaatctttactgtattttttaaatgaattttttccttaataacagccagaataagggatagtctatgctttcaggactggctttctgcacctgatatgaatgagaccagttttattttataaagcatgtgctcttaatagcattatgtctaaagaagatatcacgtaagtttgcatcttagcatgcaaatcataattttaagcaatataaattatgaaaatactatataaatgtaatttaacttaaaatgtttaagtgtagagcttccagagatggagaaacccccaccctccctccaaccacgccagagctgtagagtgctaagacgctttgcctgcccttatcacagccacacgtagcactcgacgaaatctcctccgagagctccttttcttggtagttaggagtcgccaacggattcgctgcacacggcccatccaggacacaggcctgggcgtcggagtcacggctccttgtgttctcactcagctagttggccaaagctgcatccattaccagtacactcaaactgctcggggtcctggtttctccgtgtttgaatcaggtacagactctcaaaggatacgtgtaaagccaggatgacctctggtgcctggagaagggcgggtttttcagcctagcagccatgatgccctcggaacctggccctatggtatggatgtgaggactacgcactggctgccctgagcccggggctggaaatcatctttggctgccaaggatctggacctattttggagtggagagtcatggttaaaattcccagcccggcccaggtacgggaatcccagcattttgtgaggccgaggcagggggatcacctgaggtcaggagtctctactaaaaatacaaaaattagacaggtgtggtggtgggcgccactcaggaggctgaggcaggagaatcacttgaacccgggaggcagaggttgcagtgagccagatcatgctgctgcactccagcccggccgctcaccgtgtgtgttgctgggtgctggggctgtgacttatcccctctcctttagccttgccataagtgtagtatcctatgaggctgagattgggaaaggttacatgcaggtaagccagtggacgtggccgatgcttcaggctccttccagccaggtccagcagtgttaccatctgcttctcctgggaggacaaaccaggcacccccaccatgaaggggctgcaggcaccatgaactatgttaacaaccccagtctgtactacagaaagggctgcagccacatgagaattcagtccacacaagccccatggccgtgttccccacttcagccacagggctcagggagccccatctggcgctaaggggaactgctggggtgtgggtgacacctggcctttggcgttctgccttggggaggtttctggttttgttacggggtggaagaataggacctgggggtctcggatgcaacctgcagaccccgtggctcacccaaccccaggttctgcctcccagaccagaacgggcatggcctggtccttggcaccgaggtgcctgctctgtaaatatcaagggattacaactttaataataaagcagaacttgaaaac

SEQ ID NO: 200051 - DNA, 1536 bp, Artificial Sequence
  derived and/or modified sequence
atgagcagaggccccgaggaggtgaacagactgaccgagagcacctacagaaacgtgatggagcagttcaaccccggcctgagaaacctgatcaacctgggcaagaactacgagaaggccgtgaacgccatgatcctggccggcaaggcctactacgacggcgtggccaagatcggcgagatcgccaccggcagccccgtgagcaccgagctgggccacgtgctgatcgagatcagcagcacccacaagaagctgaacgagagcctggacgagaacttcaagaagttccacaaggagatcatccacgagctggagaagaagatcgagctggacgtgaagtacatgaacgccaccctgaagagataccagaccgagcacaagaacaagctggagagcctggagaagagccaggccgagctgaagaagatcagaagaaagagccagggcagcagaaacgccctgaagtacgagcacaaggagatcgagtacgtggagaccgtgaccagcagacagagcgagatccagaagttcatcgccgacggctgcaaggaggccctgctggaggagaagagaagattctgcttcctggtggacaagcactgcggcttcgccaaccacatccactactaccacctgcagagcgccgagctgctgaacagcaagctgcccagatggcaggagacctgcgtggacgccatcaaggtgcccgagaagatcatgaacatgatcgaggagatcaagacccccgccagcacccccgtgagcggcaccccccaggccagccccatgatcgagagaagcaacgtggtgagaaaggactacgacaccctgagcaagtgcagccccaagatgccccccgcccccagcggcagagcctacaccagccccctgatcgacatgttcaacaaccccgccaccgccgcccccaacagccagagagtgaacaacagcaccggcaccagcgaggaccccagcctgcagagaagcgtgagcgtggccaccggcctgaacatgatgaagaagcagaaggtgaagaccatcttcccccacaccgccggcagcaacaagaccctgctgagcttcgcccagggcgacgtgatcaccctgctgatccccgaggagaaggacggctggctgtacggcgagcacgacgtgagcaaggccagaggctggttccccagcagctacaccaagctgctggaggagaacgagaccgaggccgtgaccgtgcccacccccagccccacccccgtgagaagcatcagcaccgtgaacctgagcgagaacagcagcgtggtgatccccccccccgactacctggagtgcctgagcatgggcgccgccgccgacagaagagccgacagcgccagaaccaccagcaccttcaaggcccccgccagcaagcccgagaccgccgcccccaacgacgccaacggcaccgccaagccccccttcctgagcggcgagaaccccttcgccaccgtgaagctgagacccaccgtgaccaacgacagaagcgcccccatcatcagatag

SEQ ID NO: 200052 - protein, 338 aa, Artificial Sequence
  derived and/or modified sequence
MDPETRGQEIIKVTPLQQMLASCTGAILTSVIVTPLDVVKIRLQAQNNPLPKGKCFVYSNGLMDHLCVCEEGGNKLWYKKPGNFQGTLDAFFKIIRNEGIKSLWSGLPPTLVMAVPATVIYFTCYDQLSALLRSKLGENETCIPIVAGIVARFGAVTVISPLELIRTKMQSKKFSYVELHRFVSKKVSEDGWISLWRGWAPTVLRDVPFSAMYWYNYEILKKWLCEKSGLYEPTFMINFTSGALSGSFAAVATLPFDVVKTQKQTQLWTYESHKISMPLHMSTWIIMKNIVAKNGFSGLFSGLIPRLIKIAPACAIMISTYEFGKAFFQKQNVRRQQY

SEQ ID NO: 200053 - DNA, 1017 bp, Artificial Sequence
  derived and/or modified sequence
atggaccccgaaacccgagggcaggagatcattaaggtcacgccgctgcagcagatgttggcatcttgtacaggcgctatcttgacatccgtaatcgtaacaccgctggacgtcgtcaagatccggctccaggctcagaataacccactgcctaaaggaaagtgtttcgtatattctaacggcttgatggaccacctatgcgtgtgcgaagaggggggaaataaactatggtacaagaagccaggaaacttccagggaactttagatgcgttttttaagataatcaggaatgaaggtattaaaagcctctggtccggcctgccgcctacactcgtgatggcagttccagctaccgtaatctactttacttgctacgaccaactttctgcgcttctcagatcaaagctgggggagaatgaaacttgtattcccatcgttgctggtatcgtggcgcgttttggagccgtgaccgttatctcacctctggaactcatcagaaccaaaatgcagtctaagaagttttcctacgtggagcttcatcgcttcgttagcaaaaaggtatcagaagatggatggatctccctctggagaggctgggctcccacggtgctgcgcgatgtgccttttagcgcaatgtactggtacaattatgagatcctgaagaaatggctttgcgagaaaagcggactttatgagcccacatttatgattaactttacttccggcgcactgtctggttctttcgcggccgtagcgacgctgccgtttgatgtggtgaaaactcagaaacaaactcagctgtggacttacgaatcacataagatcagcatgcccctgcacatgtctacatggatcatcatgaaaaacatagtggctaagaacgggttcagcggcctgttctctggcctgatcccaagattgattaagatagcacccgcctgcgccataatgattagtacgtacgagttcggaaaagcatttttccagaagcagaatgtcagacgtcaacagtactag

SEQ ID NO: 200054 - DNA, 1017 bp, Artificial Sequence
  derived and/or modified sequence
atggaccctgagacccggggccaggagatcatcaaggtgacccccctgcagcagatgctggccagctgcaccggggccatcctgaccagcgtcatcgtgacccccctggatgtggtgaagatccggctgcaggcccagaacaaccccctgcccaagggcaagtgctttgtgtacagcaatggcctgatggaccacctgtgtgtgtgtgaggagggcggcaacaagctgtggtacaagaagccaggcaacttccagggcaccctggatgccttcttcaagatcatcagaaatgaaggcatcaagagcctgtggagcggcctgccccccaccctggtgatggctgtgcctgccaccgtcatctacttcacctgctatgaccagctgagcgccctgctgcggagcaagctgggggagaatgagacctgcatccccatcgtggccggcatcgtggccaggtttggagctgtgaccgtcatcagccccctggagctgatccgcaccaagatgcagagcaagaagttctcctatgtggagctgcacagatttgtgtccaagaaggtgtctgaagatggctggatcagcctgtggaggggctgggcccccaccgtgctgagagatgtgcccttcagcgccatgtactggtacaactatgagatcctgaagaagtggctgtgtgagaagagcggcctgtatgagcccaccttcatgatcaacttcaccagcggggccctgagcggcagctttgctgctgtggccaccctgccctttgatgtggtgaagacccagaagcagacccagctgtggacctatgagagccacaagatctccatgcccctgcacatgagcacctggatcatcatgaagaacatcgtggccaagaatggcttcagcggcctcttcagcggcctcatccccaggctcatcaagatcgccccagcctgtgccatcatgatcagcacctatgaatttgggaaggccttcttccagaagcagaatgtgcggcggcagcagtactag

SEQ ID NO: 200055 - DNA, 1017 bp, Artificial Sequence
  derived and/or modified sequence
atggaccccgagacccggggccaggagatcatcaaggtgacccccctgcagcaaatgctggctagttgcaccggagccatcctgacaagcgtaatcgtcacaccgctcgatgtggtgaaaatccggctgcaggcccagaacaacccactacctaagggtaagtgttttgtgtacagtaacgggctgatggaccatctgtgtgtttgcgaagaaggcgggaataaactgtggtataagaagcctggaaatttccaggggaccctggacgcatttttcaagataatccggaacgaaggaatcaaaagcctgtggagcgggcttcccccgacactagtgatggccgtgcctgccacagtcatttactttacttgctatgatcagctctccgcactccttaggagcaaattgggcgaaaatgagacatgcattcctatcgtcgccggaatcgtcgccagattcggcgccgtgaccgtgatcagtccactggaactgatcagaaccaaaatgcagtcaaaaaaattttcctacgttgaattacatcgctttgtgagtaagaaggtgagcgaagacggttggatctcactttggagggggtgggcaccaaccgtgctgcgcgacgtcccattcagcgcgatgtattggtacaactatgagattctgaagaagtggctatgcgagaaaagcggtctgtacgaaccaacatttatgattaattttacgagcggggccctctctgggagcttcgccgccgtggccacattgccctttgacgtcgtgaagacccaaaagcagacccaactgtggacatacgaatcacacaaaatctcaatgccgctgcatatgagcacctggattattatgaaaaatatcgtggccaaaaatggcttttcaggcctcttttctggtttaatacctagacttattaaaatcgcccctgcctgcgcaattatgatcagtacatatgaatttggaaaggccttttttcagaaacagaatgtaaggagacaacagtactag

SEQ ID NO: 200056 - DNA, 1017 bp, Artificial Sequence
  derived and/or modified sequence
atggatcccgaaactcggggacaggaaatcatcaaagtcactcctctgcagcagatgcttgccagctgcacaggcgcaatcttaacctctgtcattgtcacaccactagacgtagttaagattaggctgcaggctcagaataacccactccccaaagggaagtgctttgtgtattctaacggtctcatggaccatctgtgtgtgtgtgaggagggcggtaataaattgtggtacaagaagcctggcaacttccagggtactctggatgctttctttaagattatacggaatgaagggatcaagagcttgtggagcgggcttcctccgactctcgtgatggccgtgccggcaaccgtgatctattttacctgttatgatcagttgtccgctctcctgcggagcaagctgggagagaatgagacctgtattccaatcgtggcagggattgtggcaagatttggagcggtgactgtgatctcccctcttgagctgattcggacaaagatgcagtcaaaaaaattcagctacgtcgaattgcatcgcttcgtaagcaagaaggtatcagaagatggctggatctctctgtggagaggctgggccccaactgtattgagagacgttccattttctgcaatgtattggtataactacgaaatccttaagaagtggctctgtgaaaaatcagggttgtatgagccaacctttatgatcaatttcacatctggagcactcagtggctccttcgcagcggtggctacactgccgttcgatgttgttaagacacagaagcaaactcaattatggacatacgaatctcacaaaatctctatgcctctgcatatgtccacatggataattatgaagaatatcgtcgcaaagaatgggttcagcggcctgttttccggcctcattcccagattgatcaagatcgccccagcctgtgcaatcatgatttccacttacgagttcggaaaggccttttttcagaagcagaatgtgaggcgtcagcagtattag

SEQ ID NO: 200057 - DNA, 4045 bp, Artificial Sequence
  derived and/or modified sequence
gcctcgctctggccctgcaggttgtgtttccgcctctaccccgcctccattccgttgctctctcagtctcagacccgggctctcggtccgccgcttcaggtcttggcgcagcctcagagagttggcgcggctctgtgttgaccaaacctagtggatgcagttagcgccggagcccggccccgcccgtcaccagggttattcccgccttctaggtttgccaggactgccggccctgcagctgccttctgccccaggtttttggctactgatgttacaaacaataaaatattggagcatagagttgaagaacagactcaaaccaggtttttatttaattagttaaaaatatggatcctgagacaaggggacaagagattatcaaagtgacacctcttcaacaaatgcttgcctcatgtactggagctatactgacatcagtaatagtgacacccctggatgttgttaaaattagactccaagcccaaaacaacccactccccaaaggaaaatgttttgtatatagtaatggactcatggatcatctatgtgtctgtgaagagggaggcaacaaactatggtataagaagccaggaaatttccagggaacattggatgcattttttaaaatcattcgaaatgagggcattaaatctctatggagtggccttcctcctaccctagtgatggcagttcctgccacagttatttattttacctgctatgatcaattaagtgctcttctgagatctaagttaggagaaaatgaaacctgcataccaattgttgctggaattgtagccagatttggtgcagtaactgtgataagtccactagaattgattagaaccaagatgcagtccaagaagttttcttacgtggaactgcatcgatttgtcagcaagaaagtatctgaagatggttggatttccctttggaggggctgggctcctactgttcttagagatgtacctttctcagcaatgtactggtataactatgaaattttaaagaagtggttatgtgagaaatctggtttatatgagccaacatttatgatcaactttacttcaggggcattgtctggttcttttgctgctgttgcaactttaccatttgatgtagtaaaaacacaaaagcagacacaactttggacatatgaaagtcataaaatttctatgcctttgcatatgtcaacctggattataatgaagaacattgttgctaaaaatggattttccggattattttcaggcctaattcctcgcttaattaaaattgctcctgcttgtgccattatgatcagtacatatgaatttggaaaggcttttttccagaaacaaaatgttcgaaggcagcaatactagtgatgctgtttcaacttgaaacaacaactatagccaaagaagatggagactcttaggcaagaatgtttttcaccattattctctcacaatgattttatgtctttctttcctataatttaaataaataatttcagctctacctctaaatcataattttaaaataaattttatcttatttttggtgatattgaaaaagatattctagaaatcaccaccattgagcattcttgtaaaaatagattactccttagcatcaaaagcagtctcttgaaagtttaatattatatgtttcagtgtaacataatcttactgggagtgtgttgaatacaccagaactttttgaattgtgtgctgaatgatgtacatagtctagaagaaaaaagcccaagtcttgtgcacatttaaatcgtgtacataagtatttccgtatttcagtaaagtagataaagcactcgttaaatagcattgtttacatcgaccaaatattgcctgtttcctttaattcaaatgcattaggttcccgcctccctctccttccccgccatgttgctgttttaaggcttcatatgtattaacatttctctgatcaaaattgtggctgttttccttatgaaccataatataatcatttgtgtgatgtacattgtgccatttttgatgactaaatgtctatatttctgccattcctgtaagagagggagttttttactgatagtagcaaatgttcacttcagtcaaacttgggtgttcagtggtaaaccatatagtatttagactggtaaaaatagtttgcacacaggaatagcctctgatttttagctctcttgtaatccaagtatcattgttcatggaattctctaggtcatttttattgtgttgttctaacaagacagattattgctacaacaatagttacaagatatttctaaaatatcctttgatttttactctaagtatggtagagtaagaggctaaacaagaagctgtttccttgaagacattgctttcagtcaccatacatgtctaaataatttagcttatcattcattctatgtaggaatgagataagaaaggatatgatggcaggaaaagaaatgctattcattttttatactttagttttattttcttaggatctatatcctatatatatatattttttaaagcactaatttattgcagtctttattttagaaaaatgtgaagcatttttttctcccctaaaatgaatatatttagatgacaagtctttagtgctggtagaggaactaattgattttgtactatagtaggaaagtgtttatatgtttcaccagaaataaaatatgtagggtttgtatgtaatcttctgtgtttatcctatgttgatttaccttaaatttgcaacatacatatccacataaatattcatgactttcttatatttcattaaaatgttttatggcttcttaaaatcatcactgtgcttctaaatatttttacgtaaaatcattgtataatgctatactgtgatatacatgaaagtttatcttgaacagtgctctttaacaatattaaatttaaatttatcttggttttgctatgcttatgggtaattcatagaaaacagaaaaaatactgttcccaaaaggcagttatatatttcagtttaatatcacctataagtatgagaaaggtttccatgtctcctacccctcactgcacttaggaaaattcttatttatgaataaagtaagataagtaaatctaattgcctagtcgtttttttaacacatatacatgcaatgtatctggatgaatagaaggctgaattgaagctttctttatatttaagaggtaaaaagaaatattaatacttttaaaatatactaacaaccaaaaagtgttcagaattttgctataataataatttgtattaaaatagtacctagaaaaattcagtctatggaataggtaaaattttaaaattttaatttgctctcagagttctgtctgataaaataattgaactataattggcatgatgaatattcccaggttttacttcagtatataaatttaactctcagccacatgggctttccagacttttcaatacatatgatgttgcaggaattgcaatatttgcaaacatgtgccacaacagtgttcttggtgatgtttctaaaacagtttttattctattaatgttaaattttctaacataaacatttaattgattaatgtaaaattttaggaaggaacatctttaattttcaatatgagatggttgcaacctttaaagtagtacatatttgattttttttaaaaggcaatatttttttttctaggaaaactattcattatggttatttaactgcatatgttttttaaatttttccctcttggaacaacatgtactggggcctatcaaagggtggagggtgggaggagggagaggaacaggaaaaataactaatgggtactaggcttaatacctgggtgatgaaataatctgtataataaatccccatgacacaaaagtttacctgtgtaacaaacctgcatatgtacccctaaacttaaattcttccctctttttgtcttgggcacaagtttttgggatatggaaaagtttattgtatcccttttgaattttcttctaagatgaactttttaaataaaagatattactgctttta

SEQ ID NO: 200058 - DNA, 1017 bp, Artificial Sequence
  derived and/or modified sequence
atggaccccgagaccagaggccaggagatcatcaaggtgacccccctgcagcagatgctggccagctgcaccggcgccatcctgaccagcgtgatcgtgacccccctggacgtggtgaagatcagactgcaggcccagaacaaccccctgcccaagggcaagtgcttcgtgtacagcaacggcctgatggaccacctgtgcgtgtgcgaggagggcggcaacaagctgtggtacaagaagcccggcaacttccagggcaccctggacgccttcttcaagatcatcagaaacgagggcatcaagagcctgtggagcggcctgccccccaccctggtgatggccgtgcccgccaccgtgatctacttcacctgctacgaccagctgagcgccctgctgagaagcaagctgggcgagaacgagacctgcatccccatcgtggccggcatcgtggccagattcggcgccgtgaccgtgatcagccccctggagctgatcagaaccaagatgcagagcaagaagttcagctacgtggagctgcacagattcgtgagcaagaaggtgagcgaggacggctggatcagcctgtggagaggctgggcccccaccgtgctgagagacgtgcccttcagcgccatgtactggtacaactacgagatcctgaagaagtggctgtgcgagaagagcggcctgtacgagcccaccttcatgatcaacttcaccagcggcgccctgagcggcagcttcgccgccgtggccaccctgcccttcgacgtggtgaagacccagaagcagacccagctgtggacctacgagagccacaagatcagcatgcccctgcacatgagcacctggatcatcatgaagaacatcgtggccaagaacggcttcagcggcctgttcagcggcctgatccccagactgatcaagatcgcccccgcctgcgccatcatgatcagcacctacgagttcggcaaggccttcttccagaagcagaacgtgagaagacagcagtactag

SEQ ID NO: 200059 - protein, 241 aa, Artificial Sequence
  derived and/or modified sequence
MTLQWAAVATFLYAEIGLILIFCLPFIPPQRWQKIFSFNVWGKIATFWNKAFLTIIILLIVLFLDAVREVRKYSSVHTIEKSSTSRPDAYEHTQMKLFRSQRNLYISGFSLFFWLVLRRLVTLITQLAKELSNKGVLKTQAENTNKAAKKFMEENEKLKRILKSHGKDEECVLEAENKKLVEDQEKLKTELRKTSDALSKAQNDVMEMKMQSERLSKEYDQLLKEHSELQDRLERGNKKRL

SEQ ID NO: 200060 - protein, 147 aa, Artificial Sequence
  derived and/or modified sequence
MKLFRSQRNLYISGFSLFFWLVLRRLVTLITQLAKELSNKGVLKTQAENTNKAAKKFMEENEKLKRILKSHGKDEECVLEAENKKLVEDQEKLKTELRKTSDALSKAQNDVMEMKMQSERLSKEYDQLLKEHSELQDRLERGNKKRL

SEQ ID NO: 200061 - DNA, 726 bp, Artificial Sequence
  derived and/or modified sequence
atgaccctgcagtgggccgccgtggccaccttcctgtacgccgagatcggcctgatcctgatcttctgcctgcccttcatccccccccagagatggcagaagatcttcagcttcaacgtgtggggcaagatcgccaccttctggaacaaggccttcctgaccatcatcatcctgctgatcgtgctgttcctggacgccgtgagagaggtgagaaagtacagcagcgtgcacaccatcgagaagagcagcaccagcagacccgacgcctacgagcacacccagatgaagctgttcagaagccagagaaacctgtacatcagcggcttcagcctgttcttctggctggtgctgagaagactggtgaccctgatcacccagctggccaaggagctgagcaacaagggcgtgctgaagacccaggccgagaacaccaacaaggccgccaagaagttcatggaggagaacgagaagctgaagagaatcctgaagagccacggcaaggacgaggagtgcgtgctggaggccgagaacaagaagctggtggaggaccaggagaagctgaagaccgagctgagaaagaccagcgacgccctgagcaaggcccagaacgacgtgatggagatgaagatgcagagcgagagactgagcaaggagtacgaccagctgctgaaggagcacagcgagctgcaggacagactggagagaggcaacaagaagagactgtag

SEQ ID NO: 200062 - DNA, 402 bp, Artificial Sequence
  derived and/or modified sequence
atgaccctgcagtgggccgccgtggccaccttcctgtacgccgagatcggcctgatcctgatcttctgcctgcccttcatccccccccagagatggcagaagatcttcagcttcaacgtgtggggcaagatcgccaccttctggaacaaggccttcctgaccatcatcatcctgctgatcgtgctgttcctggacgccgtgagagaggtgagaaagtacagcagcgtgcacaccatcgagaagagcagcaccagcagacccgacgcctacgagcacacccagatgaagctgttcagaagccagagaaacctgtacatcagcggcttcagcctgttcttctggctggtgctgagaagactggtgaccctgatcacccagctggccaaggagctgagcaactag

SEQ ID NO: 200063 - DNA, 693 bp, Artificial Sequence
  derived and/or modified sequence
atgaccctgcagtgggccgccgtggccaccttcctgtacgccgagatcggcctgatcctgatcttctgcctgcccttcatccccccccagagatggcagaagatcttcagcttcaacgtgtggggcaagatcgccaccttctggaacaaggccttcctgaccatcatcatcctgctgatcgtgctgttcctggacgccgtgagagaggtgagaaagtacagcagcgtgcacaccatcgagaagagcagcaccagcagacccgacgcctacgagcacacccagatgaagctgttcagaagccagagaaacctgtacatcagcggcttcagcctgttcttctggctggtgctgagaagactggtgaccctgatcacccagctggccaaggagctgagcaacaagggcgtgctgaagacccaggccgagaacaccaacaaggccgccaagaagttcatggaggagaacgagaagctgaagagaatcctgaagagccacggcaaggacgaggagtgcgtgctggaggccgagaacaagaagctggtggaggaccaggagaagctgaagaccgagctgagaaagaccagcgacgccctgagcaaggcccagaacgacgtgatggagatgaagatgcagagcgagagactgagcaaggagtacgaccagctgctgaaggagcacagcgagctgcagtag

SEQ ID NO: 200064 - DNA, 444 bp, Artificial Sequence
  derived and/or modified sequence
atgaagctgttcagaagccagagaaacctgtacatcagcggcttcagcctgttcttctggctggtgctgagaagactggtgaccctgatcacccagctggccaaggagctgagcaacaagggcgtgctgaagacccaggccgagaacaccaacaaggccgccaagaagttcatggaggagaacgagaagctgaagagaatcctgaagagccacggcaaggacgaggagtgcgtgctggaggccgagaacaagaagctggtggaggaccaggagaagctgaagaccgagctgagaaagaccagcgacgccctgagcaaggcccagaacgacgtgatggagatgaagatgcagagcgagagactgagcaaggagtacgaccagctgctgaaggagcacagcgagctgcaggacagactggagagaggcaacaagaagagactgtag

SEQ ID NO: 200065 - DNA, 195 bp, Artificial Sequence
  derived and/or modified sequence
atgaccctgcagtgggccgccgtggccaccttcctgtacgccgagatcggcctgatcctgatcttctgcctgcccttcatccccccccagagatggcagaagatcttcagcttcaacgtgtggggcaagatcgccaccttctggaacaaggccttcctgaccatcatcatcctgctgatcgtgctgttcctgtag

SEQ ID NO: 200066 - DNA, 591 bp, Artificial Sequence
  derived and/or modified sequence
atgaccctgcagtgggccgccgtggccaccttcctgtacgccgagatcggcctgatcctgatcttctgcctgcccttcatccccccccagagatggcagaagatcttcagcttcaacgtgtggggcaagatcgccaccttctggaacaaggccttcctgaccatcatcatcctgctgatcgtgctgttcctggacgccgtgagagaggtgagaaagtacagcagcgtgcacaccatcgagaagagcagcaccagcagacccgacgcctacgagcacacccagatgaagctgttcagaagccagagaaacctgtacatcagcggcttcagcctgttcttctggctggtgctgagaagactggtgaccctgatcacccagctggccaaggagctgagcaacaagggcgtgctgaagacccaggccgagaacaccaacaaggccgccaagaagttcatggaggagaacgagaagctgaagagaatcctgaagagccacggcaaggacgaggagtgcgtgctggaggccgagaacaagaagctggtggaggaccaggagaagctgaagaccgagctgagaaagaccagcgactag

SEQ ID NO: 200067 - DNA, 726 bp, Artificial Sequence
  derived and/or modified sequence
atgaccttgcaatgggccgcagtcgctacctttttgtacgcagaaataggcctgatccttatattctgtctcccctttattccaccacaaagatggcagaaaatattctcatttaatgtttggggcaagatcgcgacgttctggaataaagccttcctgaccatcatcattctgctcatcgtgttgttccttgacgctgttagggaagttcgtaagtactcaagtgtccacacaatcgagaagagttccacctcccggccagatgcgtatgaacatactcagatgaagttgttccggagtcagcgcaatctgtacatttctgggttttccttgttcttctggctcgtcctaagaaggttggttaccctgatcacgcaactggcaaaagagctaagcaataaaggcgtcctaaagacccaggccgagaacaccaacaaagccgccaagaagtttatggaggagaacgaaaagctaaagcgtattctgaagagtcacggaaaggacgaagaatgtgtgcttgaggccgagaataagaagctcgtggaggatcaagagaagctgaaaacagaactgaggaagacgagcgatgccctgtccaaggcacagaatgatgtgatggaaatgaaaatgcaatcggaacgcctatcaaaggagtacgatcaactactgaaggaacattccgagctgcaggacagactggaacgcggcaacaaaaaacgtttgtag

SEQ ID NO: 200068 - DNA, 726 bp, Artificial Sequence
  derived and/or modified sequence
atgaccctgcagtgggccgcagtcgcaacgttcttatatgctgagattgggctgattctgatcttctgcctgccgtttatccctccccagcgatggcagaaaatcttctcgtttaatgtgtggggaaagatcgcgaccttctggaataaagcattcctcacaatcatcatcctgttgattgtccttttcttggacgccgtaagagaagtgaggaaatactcttctgtacacacaattgagaagagctcaactagccgacctgatgcctacgaacatacgcagatgaagttgttccggtcccaaagaaatttgtacatttcaggcttcagcctgttcttctggctggtcttgcgccggctggtgaccctgattacacaactcgccaaggagctgagcaataagggggtcctgaagactcaggctgaaaataccaataaagctgccaagaaattcatggaggagaatgagaaacttaaacggatcctcaaaagtcacggcaaagacgaagagtgtgtcctggaggccgaaaataagaaactggtggaggatcaggaaaaactgaaaactgaactgcggaaaacttccgacgctctatccaaggcacagaatgatgtaatggagatgaaaatgcagtctgaaagattaagtaaagagtacgatcagttgctgaaggagcacagcgaactgcaggatcgactcgaacgggggaataaaaagaggctgtag

SEQ ID NO: 200069 - DNA, 402 bp, Artificial Sequence
  derived and/or modified sequence
atgaccttacaatgggctgccgtcgcaacctttctctatgccgaaatcggcttgatcctgattttttgtctacctttcatccctccacagaggtggcagaagattttctcttttaatgtttggggcaagatcgcgactttctggaacaaggctttcctgaccattatcatccttctgattgttctgtttctcgacgccgtccgtgaggtgcggaaatatagtagtgtgcatacaattgagaagagctccacctcacgtcctgatgcttacgagcacacacagatgaagttgtttcgcagccagcggaatctctacatctcagggttttccttgttcttctggctggtacttaggaggctggtcaccctgataacacaactggctaaggaacttagcaactag

SEQ ID NO: 200070 - DNA, 693 bp, Artificial Sequence
  derived and/or modified sequence
atgactctgcagtgggcagcggtcgccacattcctgtatgccgaaattggcctgatactgatcttttgcctgccctttatcccacctcagaggtggcagaagatattttcgttcaacgtgtggggtaaaatcgccacgttctggaataaagccttcctgactatcataattctgcttatcgttttgtttctggatgccgttagagaggtccgcaagtatagcagcgtgcacactattgagaagtcttccacttctagaccagatgcttacgaacacacacaaatgaaactgttccggtcccagagaaatctctatatctctggcttttctctgttcttttggttggtcctacgcaggttggtgactctgatcacacagctcgccaaagagctgtcaaataaaggtgtcctcaagacgcaggccgagaacactaataaagcagcaaaaaagtttatggaggaaaacgagaaactgaagcgcatcctaaagagccatggcaaagatgaagaatgcgtgttggaggctgagaataagaagctggtggaggatcaggagaagctgaagacagagctcagaaaaacaagtgacgctctgagtaaagctcagaatgacgtcatggagatgaaaatgcagtctgagagactgtccaaggagtatgatcagctccttaaagaacattcagaactgcagtag

SEQ ID NO: 200071 - DNA, 444 bp, Artificial Sequence
  derived and/or modified sequence
atgaagctctttcgctcacagagaaacctgtatatatcaggatttagcctgttcttctggttggttctccggcgactggtaaccctcatcacccagcttgctaaagagctaagcaataaaggtgtgctgaagacccaggcagaaaacaccaataaggccgcgaaaaagtttatggaggagaatgagaagcttaagcgtatcctgaagtctcacggaaaagacgaagaatgtgttcttgaggccgagaataagaaattagtggaggaccaggagaagttgaaaactgaattgcgcaagacctccgacgccctcagcaaggcacagaacgacgttatggaaatgaaaatgcagtcggagcgcttgagtaaagaatacgaccagttactcaaggaacattccgagttgcaggataggctggagcgcggtaacaagaaaaggctgtag

SEQ ID NO: 200072 - DNA, 195 bp, Artificial Sequence
  derived and/or modified sequence
atgacactgcagtgggctgctgtggcaacatttctctacgccgagattgggctcatcctgatcttttgcctacctttcatacccccacagcggtggcaaaagatcttcagctttaatgtatgggggaagattgctaccttctggaataaagcattcctgacaatcattattctcctcattgtcctgtttctgtag

SEQ ID NO: 200073 - DNA, 591 bp, Artificial Sequence
  derived and/or modified sequence
atgaccctccaatgggccgcagtggcaacttttctctatgccgagattggccttatcctcatattttgcctacccttcatccctccccagcgctggcagaagattttttcattcaacgtctggggtaagatagctacattctggaataaagcatttctgaccattatcatcctccttatcgttttgttcctggacgcagttagagaagttagaaagtacagctccgtgcacacaatcgagaagagctcgacatcccggcctgacgcctatgagcacactcagatgaagctgttccgcagccagcgtaatctctacattagtggattcagtctatttttctggctggtgctgagacgactggtcacacttattacccaactggctaaagaattgtcaaataagggcgtgctgaagactcaagctgagaacacgaataaggcagcgaagaagttcatggaggaaaacgaaaaactgaagaggatcttaaagagccacggaaaagacgaggaatgcgtactggaagcagagaacaagaaattggtagaggaccaggagaagcttaaaactgaactccggaagacctctgattag

SEQ ID NO: 200074 - DNA, 726 bp, Artificial Sequence
  derived and/or modified sequence
atgaccctgcagtgggccgctgtggccaccttcctgtatgcagagatcggcctcatcctgatcttctgcctgcccttcatccccccccagcgctggcagaagatcttctccttcaacgtgtggggcaagatcgccaccttctggaacaaggccttcctgaccatcatcatcctgctgattgtgctcttcctggatgctgtgcgggaggtgaggaagtacagctctgtgcacaccatcgagaagagcagcaccagcaggccagatgcctatgagcacacccagatgaagctgttccgcagccagaggaacctgtacatcagcggcttcagcctcttcttctggctggtgctgcggcggctggtgaccctcatcacccagctggccaaggagctgagcaacaagggcgtgctgaagacccaggccgagaacaccaacaaggccgccaagaagttcatggaggagaatgagaagctgaagaggatcctgaagagccacggcaaggatgaggagtgtgtgctggaggccgagaacaagaagctggtggaggaccaggagaagctgaagacagagctgaggaagaccagtgatgccctgagcaaggcccagaatgatgtgatggagatgaagatgcagagcgagcggctgagcaaggagtatgaccagctgctgaaggagcacagcgagctgcaggaccggctggagcggggcaacaagaagaggctgtag

SEQ ID NO: 200075 - DNA, 402 bp, Artificial Sequence
  derived and/or modified sequence
atgaccctgcagtgggccgctgtggccaccttcctgtatgcagagatcggcctcatcctgatcttctgcctgcccttcatccccccccagcgctggcagaagatcttctccttcaacgtgtggggcaagatcgccaccttctggaacaaggccttcctgaccatcatcatcctgctgattgtgctcttcctggatgctgtgcgggaggtgaggaagtacagctctgtgcacaccatcgagaagagcagcaccagcaggccagatgcctatgagcacacccagatgaagctgttccgcagccagaggaacctgtacatcagcggcttcagcctcttcttctggctggtgctgcggcggctggtgaccctcatcacccagctggccaaggagctgagcaactag

SEQ ID NO: 200076 - DNA, 693 bp, Artificial Sequence
  derived and/or modified sequence
atgaccctgcagtgggccgctgtggccaccttcctgtatgcagagatcggcctcatcctgatcttctgcctgcccttcatccccccccagcgctggcagaagatcttctccttcaacgtgtggggcaagatcgccaccttctggaacaaggccttcctgaccatcatcatcctgctgattgtgctcttcctggatgctgtgcgggaggtgaggaagtacagctctgtgcacaccatcgagaagagcagcaccagcaggccagatgcctatgagcacacccagatgaagctgttccgcagccagaggaacctgtacatcagcggcttcagcctcttcttctggctggtgctgcggcggctggtgaccctcatcacccagctggccaaggagctgagcaacaagggcgtgctgaagacccaggccgagaacaccaacaaggccgccaagaagttcatggaggagaatgagaagctgaagaggatcctgaagagccacggcaaggatgaggagtgtgtgctggaggccgagaacaagaagctggtggaggaccaggagaagctgaagacagagctgaggaagaccagtgatgccctgagcaaggcccagaatgatgtgatggagatgaagatgcagagcgagcggctgagcaaggagtatgaccagctgctgaaggagcacagcgagctgcagtag

SEQ ID NO: 200077 - DNA, 444 bp, Artificial Sequence
  derived and/or modified sequence
atgaagctgttccgcagccagaggaacctgtacatcagcggcttcagcctcttcttctggctggtgctgcggcggctggtgaccctcatcacccagctggccaaggagctgagcaacaagggcgtgctgaagacccaggccgagaacaccaacaaggccgccaagaagttcatggaggagaatgagaagctgaagaggatcctgaagagccacggcaaggatgaggagtgtgtgctggaggccgagaacaagaagctggtggaggaccaggagaagctgaagacagagctgaggaagaccagtgatgccctgagcaaggcccagaatgatgtgatggagatgaagatgcagagcgagcggctgagcaaggagtatgaccagctgctgaaggagcacagcgagctgcaggaccggctggagcggggcaacaagaagaggctgtag

SEQ ID NO: 200078 - DNA, 195 bp, Artificial Sequence
  derived and/or modified sequence
atgaccctgcagtgggccgctgtggccaccttcctgtatgcagagatcggcctcatcctgatcttctgcctgcccttcatccccccccagcgctggcagaagatcttctccttcaacgtgtggggcaagatcgccaccttctggaacaaggccttcctgaccatcatcatcctgctgattgtgctcttcctgtag

SEQ ID NO: 200079 - DNA, 591 bp, Artificial Sequence
  derived and/or modified sequence
atgaccctgcagtgggccgctgtggccaccttcctgtatgcagagatcggcctcatcctgatcttctgcctgcccttcatccccccccagcgctggcagaagatcttctccttcaacgtgtggggcaagatcgccaccttctggaacaaggccttcctgaccatcatcatcctgctgattgtgctcttcctggatgctgtgcgggaggtgaggaagtacagctctgtgcacaccatcgagaagagcagcaccagcaggccagatgcctatgagcacacccagatgaagctgttccgcagccagaggaacctgtacatcagcggcttcagcctcttcttctggctggtgctgcggcggctggtgaccctcatcacccagctggccaaggagctgagcaacaagggcgtgctgaagacccaggccgagaacaccaacaaggccgccaagaagttcatggaggagaatgagaagctgaagaggatcctgaagagccacggcaaggatgaggagtgtgtgctggaggccgagaacaagaagctggtggaggaccaggagaagctgaagacagagctgaggaagaccagtgactag

SEQ ID NO: 200080 - DNA, 726 bp, Artificial Sequence
  derived and/or modified sequence
atgaccctgcagtgggccgccgtggccaccttcctgtacgccgagatcggtctcatactgattttctgcttgcctttcattcccccccagcgctggcagaaaatcttctcattcaatgtgtggggaaagatagccactttctggaacaaagcatttctgactattatcatcctcttgattgtgttgtttctagacgccgtgagggaagtgagaaagtactcttcagttcacactattgaaaaatcttccacctcccggccggatgcctacgaacatacacagatgaagttgtttcgttcgcaaagaaatctctacatcagtggattctcactgtttttctggctggtgcttcgcaggctggtgacactgatcactcagttagctaaagagctgagcaataagggggtcctcaagactcaggcagaaaataccaataaggcagccaaaaaatttatggaggaaaacgaaaagttaaaaagaattctgaagagccatgggaaggacgaggagtgcgtgctggaggccgagaacaagaaactggtcgaagaccaagagaagctgaagacggagctgagaaagactagcgacgccctgtctaaagcacagaacgacgtgatggagatgaaaatgcaatcggagcgcctgtccaaagagtacgaccagctgctgaaggaacacagcgagctgcaagaccggctggagcgcggcaacaaaaaaaggctctag

SEQ ID NO: 200081 - DNA, 726 bp, Artificial Sequence
  derived and/or modified sequence
atgaccctgcagtgggccgccgtggccaccttcctgtacgccgagataggcctgattttgattttttgcctgccattcatccccccccagaggtggcagaagatcttttcgttcaatgtatgggggaagatagctacattttggaataaagccttccttaccattataatccttttgattgtgctgttcctcgacgctgttcgcgaggttcgcaagtactcgtcggtgcataccatcgaaaagagctctacctcccgacccgatgcatacgaacacactcagatgaagctgttcagaagccaaaggaacctgtatatctcaggtttcagtctgtttttttggctcgtgcttcggaggcttgtgacactaattactcagctcgccaaggaactgagcaacaaaggagtgttaaaaacccaagcggagaataccaataaggcagccaagaagtttatggaggagaacgagaagctcaaacgaatcctgaaatcccatggcaaggatgaagagtgtgtgttagaggcggagaataaaaaattagtcgaagaccaagagaagctaaagacagagcttcgaaaaacgtcagacgccctctccaaggctcaaaacgatgtaatggagatgaaaatgcagagcgaacgcctctcgaaggaatacgaccaattgctgaaggagcacagtgagttacaggacagactcgagcgagggaacaagaagaggttatag

SEQ ID NO: 200082 - DNA, 402 bp, Artificial Sequence
  derived and/or modified sequence
atgaccctgcagtgggccgccgtggccaccttcctgtacgccgagatagggctaattctcatcttctgcctgccttttatcccaccccagaggtggcagaaaattttctcatttaacgtgtggggaaaaatcgcaacattctggaacaaagcatttctcacgatcattatcctcttaattgtgctgttcctagatgcagtacgggaagtccggaaatactcctcagttcatacaattgaaaaaagctctacttcaaggcccgatgcgtatgagcacacccagatgaagttgttcagatcacagcgcaacctgtacatttccggattttctctgttcttctggctggtgctgaggcgattggtgacccttatcacccagctggccaaagagctctctaactag

SEQ ID NO: 200083 - DNA, 693 bp, Artificial Sequence
  derived and/or modified sequence
atgaccctgcagtgggccgccgtggccaccttcctgtacgccgagatcggcctgattttgatcttctgtcttccatttattcctccacagcgttggcagaagattttctcatttaacgtgtggggcaagatcgccactttctggaacaaggcgtttttaaccatcatcatactgctgattgttctctttctcgatgcagttagggaagtgcgtaagtactcgtctgtgcacaccatcgaaaagtccagcaccagtcgccctgatgcttacgagcacacccagatgaagttgtttaggtctcaacgcaatctctatattagtggatttagcctcttcttctggttggtgctccggagattggtaaccttaattactcagttagccaaagagttatcaaacaagggtgtcctcaagacccaggcagaaaataccaacaaagctgccaagaaatttatggaagagaacgaaaagctcaaacgtatcctgaagagtcacggcaaggacgaggagtgtgtgctcgaggccgagaataaaaaattggttgaggaccaggagaaactgaagaccgaactgagaaagacgtctgatgcactcagcaaggctcaaaatgatgtgatggagatgaagatgcagtccgagaggctgagcaaggagtatgatcagctgctcaaggaacattcagaactgcaatag

SEQ ID NO: 200084 - DNA, 444 bp, Artificial Sequence
  derived and/or modified sequence
atgaagctgttccggagccagcggaacctgtacatcagcggcttctcactgtttttctggctggtgctcaggcgactcgttacacttattactcagctggccaaagaactcagcaataaaggggtgttgaagacacaggcagaaaacactaacaaggctgcgaaaaaatttatggaggagaatgagaagctgaaaagaattttgaaaagccacgggaaggacgaggaatgtgtcttagaggctgagaacaagaagctggtagaggatcaggagaaactgaagacagagctccgcaagaccagcgatgccttatcaaaagcgcagaatgatgtgatggagatgaagatgcagtcagaacgactatctaaggagtatgatcagctgctcaaggagcactcggagttgcaggacagactggagcgtggcaataaaaagagactttag

SEQ ID NO: 200085 - DNA, 195 bp, Artificial Sequence
  derived and/or modified sequence
atgaccctgcagtgggccgccgtggccaccttcctgtacgccgagatcggactaattctcattttttgcctgccttttataccaccccagcgttggcaaaagatcttttctttcaacgtgtggggaaagatcgcgactttctggaataaggcttttctcacaattatcatattgctcattgtgctcttcctctag

SEQ ID NO: 200086 - DNA, 591 bp, Artificial Sequence
  derived and/or modified sequence
atgaccctgcagtgggccgccgtggccaccttcctgtacgccgagatagggctcattctaattttctgcctgcctttcatcccaccacagagatggcagaaaattttttctttcaacgtgtggggcaagatagccaccttttggaataaggcatttttgacaatcatcatcctcctgatagtcctgtttctggatgctgtcagggaagtccggaagtactcatccgtgcacaccatagagaagtcctctacatctaggcccgacgcctacgaacatacgcagatgaagctgttccggtcgcaaagaaatttgtatatcagcggattttcattgtttttttggctggtgctgcgtcgacttgtaaccctgataactcagctggcaaaggagcttagcaataagggcgtgctgaagactcaagcagagaacacgaataaagcagctaagaagttcatggaggagaatgagaaactcaaaaggatactcaagagtcacggaaaagatgaggagtgcgtgctcgaggccgagaacaaaaagctggtggaggaccaggagaaattgaagaccgaattgcgcaagacaagcgattag

SEQ ID NO: 200087 - DNA, 726 bp, Artificial Sequence
  derived and/or modified sequence
atgacactccagtgggctgccgtggcaacattcctttacgctgaaattggtcttatcctcattttctgtctgcccttcattccccctcagcgatggcagaaaattttttcctttaacgtttggggcaagatcgcgactttctggaacaaagcttttttaactatcataatattgctgattgtcttgtttctagatgccgtgagggaagtgcgcaaatatagcagcgtccacacaattgagaaatcttctacatctaggcccgacgcatacgaacatacgcagatgaaactattccggagtcagcggaatctttacatcagcggtttctcactttttttttggctcgtgctcaggaggctggtgacactgatcacgcagctcgccaaggaactgagcaacaaaggagtgctcaagacacaagccgagaataccaacaaagccgctaaaaagttcatggaggagaatgagaaattaaaacgaattctaaagtcccacggcaaggacgaagagtgcgtgctcgaagccgagaacaagaaactggtcgaggaccaagagaagctgaaaactgaactgcgtaaaacgtccgacgctttgtctaaggcacagaatgacgtgatggagatgaaaatgcagtctgagagattgtctaaagaatatgatcagctgctgaaggagcacagcgaactgcaggaccgtctggagcgcggaaataagaagagattgtag

SEQ ID NO: 200088 - DNA, 726 bp, Artificial Sequence
  derived and/or modified sequence
atgacactccagtgggctgcagtggccacctttctatacgcggagattggactcatattaatcttttgcttaccatttattccaccgcagcgctggcagaaaatctttagctttaacgtgtggggaaagatcgcaaccttctggaataaagcatttctgacaatcattattcttctgatcgtgctatttttggacgctgttcgcgaagtgcggaaatatagttccgtgcacaccatcgagaaatcctctacttctagacccgacgcctacgaacacacccagatgaagctttttcgaagccagcggaatctgtatatatccggcttcagcttgttcttttggttggtgttaagacgcctggtgactctcatcactcagctcgccaaagaactgtccaataagggcgtattgaaaactcaggcagagaatacaaacaaggccgcaaagaagtttatggaggaaaatgagaagcttaagcggattttaaaatcccatggcaaagacgaagaatgtgtgctggaggcagagaataagaagttggtggaagaccaggaaaaattgaaaaccgaactgcgaaaaacatctgacgctctcagcaaagcgcagaatgatgttatggagatgaagatgcagtctgaacgtctctccaaagagtacgaccaactgttgaaggagcactctgaactccaggacaggcttgaacgcggtaataagaagagactgtag

SEQ ID NO: 200089 - DNA, 402 bp, Artificial Sequence
  derived and/or modified sequence
atgacgttacagtgggccgcagtcgctaccttcctgtatgctgaaattggccttatcttgatcttctgccttccttttattcctccacagcgatggcaaaaaatatttagttttaacgtgtggggcaaaattgcgacattctggaataaggctttcctaaccattatcattcttctcatcgtcttgttcctcgacgccgtcagggaagtgagaaagtattctagcgtgcatactatcgagaaatcaagcacgagcagacctgatgcttacgagcacacacaaatgaaactttttcgcagccagcggaatctctacatctccgggttttctctgttcttctggttggtgttacgacgcttagttaccctgatcactcagctcgccaaggagttatctaactag

SEQ ID NO: 200090 - DNA, 693 bp, Artificial Sequence
  derived and/or modified sequence
atgactctacagtgggccgctgtggccacctttctatatgccgagatcggtttgatcctgattttctgcctgccatttattcctccgcaaaggtggcagaagatcttctcttttaacgtgtggggcaaaatcgcaacattctggaacaaagccttcctcaccatcatcatactcttgatcgtgctgttccttgacgcagtccgggaggttcgcaaatactcgtctgtgcataccatcgagaaatcaagcacgtctcgccctgacgcgtacgaacacactcagatgaaactgttcaggtcacagcgaaacctgtatatttccgggtttagcctgtttttttggctcgtgctccgacggctagttaccctgatcacacagctcgctaaagaactctccaacaagggcgtcctgaaaacacaggctgagaatacaaacaaagctgccaaaaaattcatggaggaaaacgagaagctgaagcgtattctgaaaagccatggtaaggacgaagagtgtgtgctcgaagccgaaaacaaaaagctcgtggaggatcaggagaaactgaagacagaattgcgtaagactagcgacgccttaagcaaggcgcagaatgatgtgatggaaatgaagatgcagtctgagcgtctgagcaaagagtatgaccagctgctcaaggagcattccgagctacagtag

SEQ ID NO: 200091 - DNA, 444 bp, Artificial Sequence
  derived and/or modified sequence
atgaagctgttccgttctcagcgtaacctatatatttcaggcttcagtcttttcttctggcttgttctcaggagactggtaacccttatcacccagttggctaaggagctctctaacaagggggtcctcaagacgcaggcagagaacacaaataaggccgcaaagaagttcatggaggaaaacgagaaacttaagcgcattttgaaaagtcatgggaaggatgaggaatgcgtgctcgaggctgagaacaaaaagctggtcgaagaccaggaaaagcttaagactgaactacgcaaaacttctgatgccctctccaaagctcagaacgacgtaatggagatgaagatgcaatcggaacgtctttcaaaagaatacgatcagcttctcaaagaacactcggagttacaggacagactagaacggggaaacaaaaaaaggctgtag

SEQ ID NO: 200092 - DNA, 195 bp, Artificial Sequence
  derived and/or modified sequence
atgacgctgcagtgggctgcagtcgcaacattcctatacgcagaaataggattaatacttatcttttgtctgccttttatccctccccagcggtggcaaaagatctttagcttcaatgtgtgggggaagattgctaccttctggaataaggcattcttgaccatcatcattctgctcatcgtcctgtttctgtag

SEQ ID NO: 200093 - DNA, 591 bp, Artificial Sequence
  derived and/or modified sequence
atgacactccagtgggcagcagtcgccacgttcctgtacgccgagattggactgatccttatcttttgcctgccattcatcccgcctcagcgatggcagaagattttctcgttcaacgtgtggggcaagatcgctacattctggaataaggcttttctgacgattataatcctgctgatcgtactgtttcttgacgcggtgcgcgaggtgcgcaagtattctagtgtgcataccattgagaagagtagcaccagtagaccggatgcttatgagcacacacagatgaaactcttccgatcgcagcgcaacttgtatatcagtgggttcagcctctttttctggcttgtccttaggcgactagtaaccttaattacgcaactggctaaggagctgagcaataaaggtgtactgaagacgcaggccgagaataccaacaaggccgctaaaaagtttatggaggaaaacgaaaagctgaagaggatactcaaatcacatggcaaggacgaggagtgcgtactggaggccgaaaataaaaaactcgtcgaagaccaggagaagctgaagacagagcttcgtaagacctccgactag

SEQ ID NO: 200094 - DNA, 726 bp, Artificial Sequence
  derived and/or modified sequence
atgactcttcaatgggccgcagtggccactttcctgtatgctgagatcgggcttatcctgatcttttgcttgccgttcatccctccgcagcgatggcagaaaatattttctttcaacgtgtggggcaaaattgcaactttttggaataaagcctttctgacaattatcatactccttattgtgctctttttggacgctgttcgggaagtgagaaaatattcgtctgtgcatacaatagagaagagttcaacttctcggcccgacgcttatgaacatacccagatgaagctcttcagatcccagcggaacctgtatatatcaggatttagtttatttttttggttagtactacggagacttgttaccctgattacccagctggcgaaggagctatctaataaaggcgtcctgaaaactcaggcagaaaatacaaataaagccgctaaaaagtttatggaagaaaacgagaagctcaaaagaattctgaaatcccacgggaaagacgaagaatgcgtcctggaggcagagaataagaaactggtggaggaccaggaaaagctgaagacggagctgcgcaagacctctgacgccttaagcaaagcccaaaatgatgtgatggaaatgaagatgcaaagcgagaggttaagcaaggaatatgaccagctattaaaagagcactccgaacttcaggaccgcctagagagagggaataaaaaaagactgtag

SEQ ID NO: 200095 - DNA, 726 bp, Artificial Sequence
  derived and/or modified sequence
atgaccctgcagtgggctgccgttgccacatttctttacgccgaaatcgggctgattctcattttctgtctgccattcatccccccgcagcgctggcagaagatattctcgttcaacgtatggggcaaaatagcaaccttttggaacaaagctttcctcacaatcatcatcctcttgatagttcttttccttgacgcagtcagggaagtcagaaagtacagcagcgtgcacactatcgaaaaaagctctacctcaagacccgacgcttatgaacacacccaaatgaaactcttcagatcacagaggaacttatatatctcaggattctccctctttttttggttggtgcttcgcagactagtgaccctcataactcagctagctaaggaactctcgaataaaggtgtgcttaaaacccaggctgaaaacactaacaaagcggcaaagaagtttatggaagagaatgagaagctgaagagaatactgaaaagccatggaaaagatgaggaatgcgtgttggaggcggagaataagaaacttgtggaggaccaggaaaaattgaaaactgaactgcgcaaaacatccgacgcactcagtaaggcccaaaatgatgtgatggaaatgaagatgcaaagcgagaggttaagcaaggaatatgaccagctattaaaagagcactccgaacttcaggaccgcctagagagagggaataaaaaaagactgtag

SEQ ID NO: 200096 - DNA, 474 bp, Artificial Sequence
  derived and/or modified sequence
gggcttctgcgacccggggacccgtggggcgtaggccgcggagggagagcgccgctgcctggtgtgaagaaaaaaatgacactccaatgggctgcagtggcaacctttctttatgccgaaataggactcattttaatcttctgcctaccttttattcctcctcagagatggcagaagattttttcatttaatgtctggggtaaaattgcaactttttggaacaaggctttccttaccattatcatcctattgattgttctatttctagatgctgtgagagaagtaaggaaatattcctcagttcataccattgagaagagctccaccagcagacctgatgcctatgaacacacacagatgaaactttttaggtctcaaagaaatctttacatttctggattttccctatttttttggctagttttgagacgtctggttacgcttattactcaactggcaaaagaactgtcaaac

SEQ ID NO: 200097 - DNA, 998 bp, Artificial Sequence
  derived and/or modified sequence
gagcgccgctgcctggtctggagaaccccgcggagctggcctggcccgacccggcccggcccggtccgcggcgcggtggtcgagggcccgcggcgccttctgggagcgggagggccgggaagccgggcgttggtggagggaggcgttgggcttctgtcgccgcgaagctggcggaaaaggcagtggccagcgagccgcctcgccagttcccacgactcccagggaggtggcgacacccgcttcccgggccacccttttccccttcctgaccggggtccgtgcttgccttcccaggtgtgaagaaaaaaatgacactccaatgggctgcagtggcaacctttctttatgccgaaataggactcattttaatcttctgcctaccttttattcctcctcagagatggcagaagattttttcatttaatgtctggggtaaaattgcaactttttggaacaaggctttccttaccattatcatcctattgattgttctatttctagatgctgtgagagaagtaaggaaatattcctcagttcataccattgagaagagctccaccagcagacctgatgcctatgaacacacacagatgaaactttttaggtctcaaagaaatctttacatttctggattttccctatttttttggctagttttgagacgtctggttacgcttattactcaactggcaaaagaactgtcaaacaaaggtgtacttaaaactcaagcagaaaatactaacaaggctgccaaaaaatttatggaagaaaacgaaaaactaaaaaggattttgaaaagccatggtaaagatgaagaatgtgttttggaagcagaaaataaaaaactagtagaagaccaggagaaactgaaaactgaattaaggaagacttcagatgccctttctaaggcacaaaatgatgtgatggaaatgaagatgcagtcagagagactttcgaaagaatatgatcaactcctgaaagaacactctgaacttcag

SEQ ID NO: 200098 - DNA, 498 bp, Artificial Sequence
  derived and/or modified sequence
gggaagccgggcgttggtggagggaggcgttgggcttctgtcgccgcgaagctggcggaaaaggcagtggccagcgagccgcctcgccagttcccacgactcccagggaggtggcgacacccgcttcccgggccacccttttccccttcctgaccggggtccgtgcttgccttcccaggtgggggaaggtggaacactgtccatcccctggacaaaaacgctgcgcctcggggccttgaacccggttttgtttgaaaggaagcaagagaaaataagtgtttttccatttaggtgtgaagaaaaaaatgacactccaatgggctgcagtggcaacctttctttatgccgaaataggactcattttaatcttctgcctaccttttattcctcctcagagatggcagaagattttttcatttaatgtctggggtaaaattgcaactttttggaacaaggctttccttaccattatcatcctattgattgttctatttctag

SEQ ID NO: 200099 - DNA, 746 bp, Artificial Sequence
  derived and/or modified sequence
agcgcagggagccaggcgggctgccggcgggtgggggaaggtggaacactgtccatcccctggacaaaaacgctgcgcctcggggccttgaacccggttttgtttgaaaggaagcaagagaaaataagtgtttttccatttaggtgtgaagaaaaaaatgacactccaatgggctgcagtggcaacctttctttatgccgaaataggactcattttaatcttctgcctaccttttattcctcctcagagatggcagaagattttttcatttaatgtctggggtaaaattgcaactttttggaacaaggctttccttaccattatcatcctattgattgttctatttctagatgctgtgagagaagtaaggaaatattcctcagttcataccattgagaagagctccaccagcagacctgatgcctatgaacacacacagatgaaactttttaggtctcaaagaaatctttacatttctggattttccctatttttttggctagttttgagacgtctggttacgcttattactcaactggcaaaagaactgtcaaacaaaggtgtacttaaaactcaagcagaaaatactaacaaggctgccaaaaaatttatggaagaaaacgaaaaactaaaaaggattttgaaaagccatggtaaagatgaagaatgtgttttggaagcagaaaataaaaaactagtagaagaccaggagaaactgaaaactgaattaaggaagacttcagatg

SEQ ID NO: 200100 - RNA, 726 nt, Artificial Sequence
  derived and/or modified sequence
augacucuucaaugggccgcaguggccacuuuccuguaugcugagaucgggcuuauccugaucuuuugcuugccguucaucccuccgcagcgauggcagaaaauauuuucuuucaacguguggggcaaaauugcaacuuuuuggaauaaagccuuucugacaauuaucauacuccuuauugugcucuuuuuggacgcuguucgggaagugagaaaauauucgucugugcauacaauagagaagaguucaacuucucggcccgacgcuuaugaacauacccagaugaagcucuucagaucccagcggaaccuguauauaucaggauuuaguuuauuuuuuugguuaguacuacggagacuuguuacccugauuacccagcuggcgaaggagcuaucuaauaaaggcguccugaaaacucaggcagaaaauacaaauaaagccgcuaaaaaguuuauggaagaaaacgagaagcucaaaagaauucugaaaucccacgggaaagacgaagaaugcguccuggaggcagagaauaagaaacugguggaggaccaggaaaagcugaagacggagcugcgcaagaccucugacgccuuaagcaaagcccaaaaugaugugauggaaaugaagaugcaaagcgagagguuaagcaaggaauaugaccagcuauuaaaagagcacuccgaacuucaggaccgccuagagagagggaauaaaaaaagacuguag

SEQ ID NO: 200101 - RNA, 726 nt, Artificial Sequence
  derived and/or modified sequence
augacccugcagugggcugccguugccacauuucuuuacgccgaaaucgggcugauucucauuuucugucugccauucauccccccgcagcgcuggcagaagauauucucguucaacguauggggcaaaauagcaaccuuuuggaacaaagcuuuccucacaaucaucauccucuugauaguucuuuuccuugacgcagucagggaagucagaaaguacagcagcgugcacacuaucgaaaaaagcucuaccucaagacccgacgcuuaugaacacacccaaaugaaacucuucagaucacagaggaacuuauauaucucaggauucucccucuuuuuuugguuggugcuucgcagacuagugacccucauaacucagcuagcuaaggaacucucgaauaaaggugugcuuaaaacccaggcugaaaacacuaacaaagcggcaaagaaguuuauggaagagaaugagaagcugaagagaauacugaaaagccauggaaaagaugaggaaugcguguuggaggcggagaauaagaaacuuguggaggaccaggaaaaauugaaaacugaacugcgcaaaacauccgacgcacucaguaaggcccaaaaugaugugauggaaaugaagaugcaaagcgagagguuaagcaaggaauaugaccagcuauuaaaagagcacuccgaacuucaggaccgccuagagagagggaauaaaaaaagacuguag

SEQ ID NO: 200102 - protein, 221 aa, Artificial Sequence
  derived and/or modified sequence
MEAGGFLDSLIYGACVVFTLGMFSAGLSDLRHMRMTRSVDNVQFLPFLTTEVNNLGWLSYGALKGDGILIVVNTVGAALQTLYILAYLHYCPRKRVVLLQTATLLGVLLLGYGYFWLLVPNPEARLQQLGLFCSVFTISMYLSPLADLAKVIQTKSTQCLSYPLTIATLLTSASWCLYGFRLRDPYIMVSNFPGIVTSFIRFWLFWKYPQEQDRNYWLLQT

SEQ ID NO: 200103 - DNA, 666 bp, Artificial Sequence
  derived and/or modified sequence
atggaggccggcggcttcctggacagcctgatctacggcgcctgcgtggtgttcaccctgggcatgttcagcgccggcctgagcgacctgagacacatgagaatgaccagaagcgtggacaacgtgcagttcctgcccttcctgaccaccgaggtgaacaacctgggctggctgagctacggcgccctgaagggcgacggcatcctgatcgtggtgaacaccgtgggcgccgccctgcagaccctgtacatcctggcctacctgcactactgccccagaaagagagtggtgctgctgcagaccgccaccctgctgggcgtgctgctgctgggctacggctacttctggctgctggtgcccaaccccgaggccagactgcagcagctgggcctgttctgcagcgtgttcaccatcagcatgtacctgagccccctggccgacctggccaaggtgatccagaccaagagcacccagtgcctgagctaccccctgaccatcgccaccctgctgaccagcgccagctggtgcctgtacggcttcagactgagagacccctacatcatggtgagcaacttccccggcatcgtgaccagcttcatcagattctggctgttctggaagtacccccaggagcaggacagaaactactggctgctgcagacctag

SEQ ID NO: 200104 - DNA, 666 bp, Artificial Sequence
  derived and/or modified sequence
atggaggccggaggttttcttgatagtctgatttatggagcctgcgtggtatttacactgggcatgttttcggcaggcctgagcgatctaagacatatgcggatgacgagaagtgtagataacgtccagttccttccattcctgacaacagaagtgaacaacctcggctggctctcttacggagctctgaagggggatggaattctaatcgtggtgaacaccgtgggcgcagccctgcagacattatacattctggcttatctgcactactgcccgagaaaacgagtagtcctcttgcagactgcaacactactgggagttctgctcctgggctatggatacttctggctattagtgcccaatccagaggcgcgattgcagcagctgggattgttctgtagcgtgtttaccatctcaatgtacctctcccccctggcggacctggccaaagtgatacagacgaagtccacccagtgtttatcctacccacttaccatagccactctcctgacatctgcaagttggtgtctgtacgggttcaggctcagggacccttacatcatggtcagcaactttccaggaattgtgacctccttcatccgcttttggctgttttggaagtacccccaagagcaggataggaattattggttgctgcagacctag

SEQ ID NO: 200105 - DNA, 666 bp, Artificial Sequence
  derived and/or modified sequence
atggaggccggcggcttcctggacagcctcatctacggggcctgtgtggtgttcaccctgggcatgttttctgctggcctgagtgacctgcggcacatgaggatgaccaggtctgtggacaacgtgcagttcctgcccttcctgaccacagaggtgaacaacctgggctggctgtcctatggagccctgaagggagatggcatcctgattgtggtgaacacagtgggcgccgccctgcagaccctgtacatcctggcctacctgcactactgccccaggaagagggtggtgctgctgcagacagccaccctgctgggcgtgctgctgctgggctacggctacttctggctgctggtgcccaaccctgaggcccggctgcagcagctgggcctcttctgcagcgtcttcaccatctccatgtacctgagccccctggccgacctggccaaggtgatccagaccaagagcacccagtgcctgagctaccccctgaccatcgccaccctgctgaccagcgcctcctggtgcctgtatggcttccggctgcgggacccctacatcatggtgagcaacttccctggcatcgtgaccagcttcatccgcttctggctgttctggaagtacccccaggagcaggacaggaactactggctgctgcagacctag

SEQ ID NO: 200106 - DNA, 666 bp, Artificial Sequence
  derived and/or modified sequence
atggaggccggcggcttcctggacagcctgatctacggcgcctgcgttgtgttcaccctgggcatgttttcggccggactgagcgatctgcgacatatgcgcatgaccagatcggtcgacaatgttcagttccttccgtttctcacgaccgaggtaaataatctcgggtggctgagttacggcgcactgaagggagacggaatattaattgtggttaacactgttggcgccgccctccaaaccctgtacattctggcttacttgcattactgccccagaaagagagtcgtgctgctccagacagctacgctgctgggcgtgctgctcctaggttatggatatttttggctgctagttcctaatccagaggcaaggctgcaacaactgggactgttttgttctgtcttcaccatctctatgtacctttcaccactggctgatctggctaaggtcatccagacgaagtctacgcagtgtctgagctaccctctgaccatagcaacactcctcacttccgccagctggtgcctctatggtttccgtttgcgggacccttacattatggtctctaactttccgggcatagtgacatctttcattcgattctggctgttctggaaatacccacaggaacaggacaggaactactggttactgcagacgtag

SEQ ID NO: 200107 - DNA, 666 bp, Artificial Sequence
  derived and/or modified sequence
atggaggctggcggttttctggatagtctgatttacggagcctgtgtggtgtttaccctggggatgttctctgctggcctctccgacttgcggcatatgagaatgactcgatcagtggataacgtacagtttctgccttttcttactacagaggtgaataaccttggttggcttagttacggagctctgaagggtgatggcattctcattgtggtcaataccgtgggagcagccctgcaaaccctctacattttggcttacttgcattattgtcctcggaaacgcgtggtgctcctgcagaccgctaccttactgggcgtcttgctgttgggttacggatacttttggctactggtgcccaatcccgaggcccgactgcagcagctgggattattctgttctgtgttcacaatttctatgtacttgtcaccgctggcagacctggccaaggtgattcaaaccaagagcacacagtgcctgagttaccctctaaccattgctacactgttaacttctgctagctggtgtttgtatgggttcaggctgagggacccctacatcatggtgtcgaactttccagggatcgtgaccagcttcatcaggttctggttgttctggaaatatccacaggagcaggatcggaactactggttgcttcaaacgtag

SEQ ID NO: 200108 - DNA, 1300 bp, Artificial Sequence
  derived and/or modified sequence
gtaggtcccggcaaccgcaggctcgcggcgggcgctgggcgcgggatccgactctagtcgtaatggaggcgggcggctttctggactcgctcatttacggagcatgcgtggtcttcacccttggcatgttctccgccggcctctcggacctcaggcacatgcgaatgacccggagtgtggacaacgtccagttcctgccctttctcaccacggaagtcaacaacctgggctggctgagttatggggctttgaagggagacgggatcctcatcgtcgtcaacacagtgggtgctgcgcttcagaccctgtatatcttggcatatctgcattactgccctcggaagcgtgttgtgctcctacagactgcaaccctgctaggggtccttctcctgggttatggctacttttggctcctggtacccaaccctgaggcccggcttcagcagttgggcctcttctgcagtgtcttcaccatcagcatgtacctctcaccactggctgacttggctaaggtgattcaaactaaatcaacccaatgtctctcctacccactcaccattgctacccttctcacctctgcctcctggtgcctctatgggtttcgactcagagatccctatatcatggtgtccaactttccaggaatcgtcaccagctttatccgcttctggcttttctggaagtacccccaggagcaagacaggaactactggctcctgcaaacctgaggctgctcatctgaccactgggcaccttagtgccaacctgaaccaaagagacctccttgtttcagctgggcctgctgtccagcttcccaggtgcagtgggttgtgggaacaagagatgactttgaggataaaaggaccaaagaaaaagctttacttagatgattgattggggcctaggagatgaaatcactttttattttttagagatttttttttttaattttggaggttggggtgcaatctttagaatatgccttaaaaggccgggcgcggtggctcacgcctgtaatcccagcactttgggaggccaaggtgggcggatcgcctgaggtcaggagttcaagaccaacctgactaacatggtgaaaccccatctctactaaaaatacaaaattagccaggcatgatggcacatgcctgtaatcccagatacttgggaggctgaggcaggagaattgcttgaacccaggaggtggaggttgcagtgagctgagatcgtgccattgtgatatgaatatgccttatatgctgatatgaatatgccttaaaataaagtgttccccacccctgcc

SEQ ID NO: 200109 - DNA, 1284 bp, Artificial Sequence
  derived and/or modified sequence
atggccgccagcggcgtggaaaagtcttccaagaagaagacggaaaagaagctggccgctcgcgaggaggcaaagcttctggccggattcatgggcgtgatgaataacatgagaaagcagaagactctgtgtgatgtgattctcatggtgcaagagcggaaaatccctgcccacagggtcgtcttagctgccgctagccacttttttaacctcatgtttacaacgaacatgctggaatccaagaattttttgagcaagactgttcaggcagagccgttgatacaggacaaccccgagtgcctgaagatggtgatctccggcatgcgttatcatttactctccccagaagatagagaggagctcgtggacggtactaggccgcggcgaaagaagcacgactaccggattgctctgtttggcgggagccaacctcagagctgccggtacttcaaccccaaggattacagttggactgatataagatgtccattcgaaaaaagaagggacgccgcttgtgtattttgggacaatgtcgtgtacatcttgggcggcagtcagttattccccattaaacgtatggattgctataatgtggtcaaagattcttggtactctaagttgggccctccaacgccacgcgatagcttggccgcgtgtgctgcggagggtaagatttacacgtccggcggatcagaggtcgggaattccgctctttatctgttcgaatgctacgacacccggacagagagttggcatacaaagccatcaatgctcacccagcgttgctcccatggaatggttgaagctaatggtctgatttacgtctgtggcggcagtctcgggaataatgtgagcggcagggtcctgaacagttgtgaagtgtacgatcctgctactgagacttggaccgagctgtgtcctatgatagaagcacgaaaaaaccacggacttgtcttcgttaaggataaaattttcgctgtggggggtcaaaacggactagggggactagataatgtcgaatactacgacattaagctaaacgaatggaagatggtaagccccatgccctggaaaggcgtgaccgttaagtgtgcagctgtgggctctattgtctatgtacttgctgggttccagggggtgggacggttgggccacattctggagtataataccgagaccgataagtgggtagccaatagcaaggtacgggcattccccgtcacaagctgcctgatctgcgttgtggacacatgtggcgccaatgaggaaacccttgagacatag

SEQ ID NO: 200110 - DNA, 1086 bp, Artificial Sequence
  derived and/or modified sequence
atggtggatattttggcaaaagtccgattccctctgatatccaagaatttcctgtctaagactgtccaggccgagcccctcattcaggacaatcccgagtgcttaaagatggtcatcagcgggatgcgttaccacctgctctcacctgaagaccgagaagagctagtggatggtacccggccccgcagaaagaagcatgactaccgcattgccctctttggtggctctcagcctcagtcatgccggtacttcaatcctaaagactacagttggactgacattaggtgtccctttgagaaaaggagagatgcagcatgcgtcttctgggacaatgttgtatatatcctagggggcagccagttgtttccgattaagcggatggattgctacaacgtggtaaaagatagctggtactccaagctggggcctcccacacccagggactccctggctgcgtgcgccgcggaaggtaagatctatacctctggaggaagcgaggtgggaaactctgctctgtacctttttgaatgttatgataccaggaccgaaagctggcacactaaaccaagcatgctcacacagcggtgtagccacggcatggtggaagcaaatggtctcatctatgtctgtggcggctccttgggaaacaacgttagcggcagagttctcaattcgtgtgaggtgtacgacccggcgacagagacttggaccgaactttgtcctatgatagaagctaggaagaaccacggcctggtgttcgtgaaggacaaaattttcgccgttggcgggcagaacgggctgggcggccttgacaacgtagaatactatgacatcaagctgaatgagtggaagatggtgtcccccatgccctggaagggcgtgacggtgaagtgtgcagcagttggatcaatagtctatgtgttagccgggttccaaggcgtgggtaggctggggcatatactggaatacaataccgagactgataaatgggtcgctaatagcaaggtgagagccttccccgttacttcttgcctgatttgtgtcgtggacacatgcggggctaacgaggagacgctcgagacatag

SEQ ID NO: 200111 - DNA, 2696 bp, Artificial Sequence
  derived and/or modified sequence
atagtgcccccgcctccttgcgcgaagtgcgcaggctcctgggcagggctcgggttctgcccggggacgcagcccagttggtagcgtcgctccctgagcgtttctaagggggccgcccggccttgtctttcggcagtggccgagccaccgccgcctgccgcgcgttccagagctgggcgctgcagctgcactgccgatcgccgtgtttggtcgatagaatccccagtgtgcccagagagtgcgacccctcgcccggcccggcgagccccgggcgtgaaccgagctgagggaggatggcagcctctggggtggagaagagcagcaagaagaagaccgagaagaaacttgctgctcgggaagaagctaaattgttggcgggtttcatgggcgtcatgaataacatgcggaaacagaaaacgttgtgtgacgtgatcctcatggtccaggaaagaaagatacctgctcatcgtgttgttcttgctgcagccagtcatttttttaacttaatgttcacaactaacatgcttgaatcaaagaatttcttaagtaaaacggtacaagctgaaccacttattcaagacaatcctgaatgccttaagatggtgataagtggaatgaggtaccatctactgtctccagaggaccgagaagaacttgtagatggcacaagacctagaagaaagaaacatgactaccgcatagccctatttggaggctctcaaccacagtcttgtagatattttaacccaaaggattatagctggacagacatccgctgcccctttgaaaaacgaagagatgcagcatgcgtgttttgggacaatgtagtatacattttgggaggctctcagcttttcccaataaagcgaatggactgctataatgtagtgaaggatagctggtattcgaaactgggtcctccgacacctcgagacagccttgctgcatgtgctgcagaaggcaaaatttatacatctggaggttcagaagtaggaaactcagctctgtatttatttgagtgctatgatacgagaactgaaagctggcacacaaagcccagcatgctgacccagcgctgcagccatgggatggtggaagccaatggcctaatctatgtttgtggtggaagtttaggaaacaatgtttctgggagagtgcttaattcctgtgaagtttatgatcctgccacagaaacatggactgagctgtgtccaatgattgaagccaggaagaatcatgggctggtatttgtaaaagacaagatatttgctgtgggtggtcagaatggtttaggtggtctggacaatgtggaatattacgatattaagttgaacgaatggaagatggtctcaccaatgccatggaagggtgtaacagtgaaatgtgcagcagttggctctatagtttatgtcttggctggttttcagggtgttggtcgattaggacacattctcgaatataataccgaaacagacaaatgggttgccaactccaaagttcgtgcttttccagtcacaagttgtttaatttgtgttgtcgatacttgtggagcaaatgaagagacccttgaaacatgaaaaatgagtggacttcagactcatcagagactctaaaatatagccaccagtgctttgttccaggagtttggtgacaaagttttggtttggtgttttggtaaagaaagtttcaagtgaaatgaggttcctataaaatagatgtttcttttatatggatttccttaattcaaagatcatattttagctggccacaaaaccaagaacatatctagcaagaaaacttgaaaaagtataagcatttgttaaaaatgtgaatttcttgaatgaatttcacatttgtaactatgattttggcagaatagaagattggctcatcagtgaagcgcagtatcttagctctagattctattttcatgcatcacagaagtgctatacggttaggtctgtttgtgctcagtcaagaactaagaaatagtatgaattgtaagtcaagatgggcaactcagatggagcagcttagtctcacagtttgcttgtctatttattttatttagtgccaaatgtattccattttaaaagtaagccagagtgagtcaaggcatatacacactttctcacaaaacttcctaaacagatttgggggtttaatatgtccaactcctcatgaaatatattcaatccacttaaatatattccatctttttaacataaaatgtaaagcttagcacccatcattaatttatgtctctgttttatccagtggttaaaaaaggattctgcctctttagtcctcactgttaaataaaacccaatcatagtaagtgattaactagcaaaaagtaaagctatttatagcaaatttctagatcattagaaaagcactggtagttgtacaatatcagtgttgactttgaacttctttaacgagatcatgaattcttttcccttagccaaaacatgaaatatttaacctagttgtctctaaaagttttgtaatcatgagttagatatatgtcatctcctattcattgcttttatgtgatcaataaatcttttacaaacccaactactcatttccttcctagtaatactttgcctttttcactgtgtatggaatgaaacatgtaaagctgtcacaatcaatgtttttatctgataatattaaatattttttaactt

SEQ ID NO: 200112 - DNA, 1284 bp, Artificial Sequence
  derived and/or modified sequence
atggccgccagcggcgtggagaagagcagcaagaagaagacagagaagaagctggccgcccgggaggaggccaagctgctggccggcttcatgggcgtgatgaacaacatgaggaagcagaagaccctgtgtgatgtgatcctgatggtgcaggagaggaagatcccagcccaccgggtggtgctggccgccgccagccacttcttcaacctgatgttcaccaccaacatgctggagagcaagaacttcctgagcaagacagtgcaggccgagcccctcatccaggacaacccagaatgtctgaagatggtgatcagcggcatgagataccacctgctgagccctgaggaccgggaggagctggtggatggcacccggcccaggaggaagaagcatgactaccgcatcgccctgtttggaggcagccagccccagagctgccgctacttcaaccccaaggactacagctggacagacatccgctgcccctttgagaagagaagagatgctgcctgtgtgttctgggacaacgtggtgtacatcctgggcggcagccagctgttccccatcaagaggatggactgctacaacgtggtgaaggacagctggtacagcaagctgggcccccccaccccccgggacagcctggccgcctgtgccgctgagggcaagatctacaccagcggcggcagcgaggtgggcaacagcgccctgtacctgtttgagtgctatgacaccaggacagagagctggcacaccaagcccagcatgctgacccagcgctgcagccacggcatggtggaggccaacggcctcatctacgtgtgtggcggcagcctgggcaacaacgtgtctggccgggtgctgaacagctgtgaggtgtatgaccctgccacagagacctggacagagctgtgccccatgattgaggccaggaagaaccacggcctggtgtttgtgaaggacaagatctttgctgtgggcggccagaatggcctgggcggcctggacaacgtggagtactatgacatcaagctgaatgagtggaagatggtgagccccatgccctggaagggcgtgacagtgaagtgtgccgctgtgggcagcatcgtgtatgtgctggccggcttccagggcgtgggccgcctgggccacatcctggagtacaacacagaaacagacaagtgggtggccaacagcaaggtgcgggccttccctgtgaccagctgcctgatctgtgtggtggacacctgtggggccaatgaggagaccctggagacctag

SEQ ID NO: 200113 - DNA, 1086 bp, Artificial Sequence
  derived and/or modified sequence
atggtggacatcctggccaaggtgcgcttccccctcatcagcaagaacttcctgagcaagacagtgcaggccgagcccctcatccaggacaacccagaatgtctgaagatggtgatcagcggcatgagataccacctgctgagccctgaggaccgggaggagctggtggatggcacccggcccaggaggaagaagcatgactaccgcatcgccctgtttggaggcagccagccccagagctgccgctacttcaaccccaaggactacagctggacagacatccgctgcccctttgagaagagaagagatgctgcctgtgtgttctgggacaacgtggtgtacatcctgggcggcagccagctgttccccatcaagaggatggactgctacaacgtggtgaaggacagctggtacagcaagctgggcccccccaccccccgggacagcctggccgcctgtgccgctgagggcaagatctacaccagcggcggcagcgaggtgggcaacagcgccctgtacctgtttgagtgctatgacaccaggacagagagctggcacaccaagcccagcatgctgacccagcgctgcagccacggcatggtggaggccaacggcctcatctacgtgtgtggcggcagcctgggcaacaacgtgtctggccgggtgctgaacagctgtgaggtgtatgaccctgccacagagacctggacagagctgtgccccatgattgaggccaggaagaaccacggcctggtgtttgtgaaggacaagatctttgctgtgggcggccagaatggcctgggcggcctggacaacgtggagtactatgacatcaagctgaatgagtggaagatggtgagccccatgccctggaagggcgtgacagtgaagtgtgccgctgtgggcagcatcgtgtatgtgctggccggcttccagggcgtgggccgcctgggccacatcctggagtacaacacagaaacagacaagtgggtggccaacagcaaggtgcgggccttccctgtgaccagctgcctgatctgtgtggtggacacctgtggggccaatgaggagaccctggagacctag

SEQ ID NO: 200114 - DNA, 1284 bp, Artificial Sequence
  derived and/or modified sequence
atggccgccagcggcgtggagaagagcagcaagaagaagaccgagaaaaagctcgccgccagggaggaggccaagctgcttgctggattcatgggagtgatgaacaatatgcggaagcagaagacactgtgcgatgttatcttaatggtacaggaacgaaaaatccccgcccaccgggttgtgctggcagcagctagccatttcttcaacctgatgtttacaaccaacatgcttgaatcaaaaaatttcctttccaagacagtgcaggccgagcccctgatccaggataatcccgaatgtctgaagatggtgatttcaggtatgaggtaccatctactctcccccgaggacagagaggaattggtggacggaacccgacctcggagaaagaagcacgattatcgcatcgcgctgttcggtggaagccagcctcagagttgccgctactttaatcctaaggactacagttggactgacatccggtgcccatttgaaaagcgcagagacgcggcttgcgttttctgggataacgtggtttacatattagggggctcccagctttttcctatcaagagaatggactgctataacgtcgtgaaagacagctggtatagcaaactggggccccccaccccccgggactcactcgccgcttgtgctgccgaggggaaaatctataccagcggcgggagcgaagtggggaacagtgccttatacctctttgagtgctatgacacccggaccgaatcatggcatactaagccctcgatgctgactcagcggtgtagccacggcatggtggaggcgaacggcttgatctatgtctgtggtggctctctaggaaacaatgtgtctgggcgagtactgaacagctgcgaagtgtatgacccagctaccgagacctggaccgaactatgcccaatgatcgaagcccgcaaaaaccatggacttgtgtttgttaaagataaaattttcgctgtcggggggcagaatggcctgggtggcctggataatgtagagtactatgacatcaagctcaatgagtggaaaatggtgagtccgatgccctggaaaggagtgactgtcaagtgcgccgcagtcggctccattgtctacgttctcgctggctttcagggcgtgggccgcctcggccatatactggagtacaacacagaaactgacaaatgggtcgctaactctaaggtcagagcgttccccgtaacatcttgtctgatctgcgttgttgacacatgtggggccaacgaagaaacccttgagacctag

SEQ ID NO: 200115 - DNA, 1086 bp, Artificial Sequence
  derived and/or modified sequence
atggtggacatcctggccaaggtgcggttccccctgatcagcaagaatttcctgtcaaagactgtgcaggccgagccactgattcaagataatcctgaatgtcttaagatggtgatcagcggcatgcgctaccatctacttagccccgaagatagggaagagctggtcgatgggactagaccccgacggaagaaacacgactaccgaattgctctgtttggaggctcacagccccagagttgtcgttacttcaatccaaaggactactcttggaccgatatacgctgcccgttcgagaaaaggcgagacgccgcttgtgttttctgggataacgttgtatatatattagggggctcccaactgtttcctattaagcggatggattgttataatgttgttaaggatagctggtactccaaactgggaccccctacgcctagagatagtctcgccgcctgcgctgcagaaggaaagatctacacaagtgggggcagcgaggtggggaatagcgccctatatctctttgagtgctatgatactcgaacagaatcctggcacacaaagccttcaatgcttactcagcgatgttctcatggtatggtagaagctaacgggcttatctacgtctgcggcggcagtctggggaacaacgtcagcggccgggtgctcaactcatgtgaggtttacgatcccgccacggaaacttggacagagctgtgccccatgattgaagcaagaaagaaccacggtctagtatttgtgaaggataagatattcgccgtgggcggtcagaacggtctgggcggacttgataacgtggagtactacgacattaagttgaatgagtggaaaatggtcagccctatgccctggaagggcgtgaccgttaaatgtgcagctgtgggcagcattgtttacgtgctggcaggatttcagggggtggggcggttgggtcatatcctggagtacaacacagaaaccgacaaatgggttgccaatagtaaggtgagggcctttccagtcacatcctgtctgatatgcgtcgtggacacctgcggtgcaaatgaggagaccctggaaacttag

SEQ ID NO: 200116 - DNA, 1284 bp, Artificial Sequence
  derived and/or modified sequence
atggccgcatctggagtggagaagagttcgaaaaaaaaaactgagaagaaactggctgccagggaagaggccaaactactggctggatttatgggcgtgatgaacaacatgcggaagcaaaagacgctttgtgatgttattctcatggttcaggaacggaagatcccagctcatcgagtggtgcttgccgctgcatctcactttttcaacctcatgtttactacaaatatgcttgagtctaagaatttcttaagcaaaaccgtacaagccgaacctctgattcaggataacccagaatgcctaaagatggtgataagtggcatgcgataccatctgctcagccctgaagacagggaagaattggtcgacggcaccaggcctagacgtaagaagcacgattacaggatagccctgttcggcggaagtcagcctcaaagttgtcggtacttcaaccccaaagattattcatggaccgacattcgttgcccattcgagaagcggagggacgccgcttgcgtcttctgggacaatgtcgtctacattctgggtggcagccagctgttccctattaaacgcatggactgctacaatgtcgtaaaagactcatggtattcaaagttgggacctcccacgcccagagactcactcgctgcatgtgccgctgagggcaaaatctataccagcggcggttccgaggtgggaaattccgcactatatctgttcgaatgctacgatacccggacggaatcatggcatacgaagccctctatgctaactcaaaggtgctcacacggaatggtcgaggcgaacggcctcatttatgtgtgtggcggtagcctgggaaataatgtgagcggcagagtactcaatagctgtgaggtatacgacccggctaccgaaacctggacagaactttgccctatgatcgaggccagaaaaaaccacggcctcgtcttcgtgaaggataagatctttgccgtggggggtcagaacggcttggggggtttggacaacgtggagtactatgacatcaagctgaatgagtggaaaatggtaagtcctatgccgtggaagggggtgaccgttaagtgtgccgctgtaggctctatcgtgtacgtcctcgctggttttcaaggggtcggccgactgggacacattttggaatacaacacagaaactgataaatgggtggcaaattcaaaggtgagagcgtttcctgtgacctcctgtctgatttgcgttgttgatacctgcggcgctaatgaggagactctggaaacatag

SEQ ID NO: 200117 - DNA, 1086 bp, Artificial Sequence
  derived and/or modified sequence
atggttgacattctggccaaagtgcgctttccactcatttctaaaaacttcctgagcaaaacagtgcaagccgagccgttaatacaagacaatcccgaatgcctgaaaatggtgatctctgggatgagatatcatctcctgagcccagaggacagagaggagctggtggacggcacccgtccccgacgcaagaaacatgactatcgcattgccctgttcggtggaagccagccgcagtcgtgtaggtactttaatcctaaggactatagctggaccgatatccggtgcccattcgaaaagaggcgagatgcggcttgtgtgttctgggacaacgtggtttacatcctggggggaagtcagctttttcccatcaagcggatggattgttacaacgtggtcaaggactcctggtattcaaagctgggtcctccgacccccagggactcgctggcggcttgtgctgccgaaggtaaaatatacacctctggcggaagtgaggtaggaaactctgccctctatctgtttgaatgttatgatacaagaaccgaatcttggcacacaaaaccttctatgctgacacagcgctgctcccatggaatggtggaggccaatggcctgatttacgtttgcggaggtagcctcggtaataacgtgagtggacgcgttctgaattcatgcgaggtgtatgatcccgctacagagacgtggacagagttatgtccaatgatagaggccagaaagaaccacggactagtgttcgtgaaggacaagatctttgctgttgggggacagaatggcctcggaggcctggataacgtcgagtattacgatatcaaattgaatgagtggaagatggtgagtcccatgccgtggaagggtgtgaccgtcaagtgcgcagctgttgggagtatcgtttacgtgttggctggcttccagggagtcggccgtctcggacacatccttgaatataatacagagactgataagtgggtggctaacagtaaagttagagccttcccggttacttcctgcctcatctgcgtggttgacacctgcggcgctaacgaagaaacactggagacgtag

SEQ ID NO: 200118 - DNA, 1284 bp, Artificial Sequence
  derived and/or modified sequence
atggccgccagcggcgtggagaagagcagcaagaagaagaccgagaagaagctggccgccagagaggaggccaagctgctggccggcttcatgggcgtgatgaacaacatgagaaagcagaagaccctgtgcgacgtgatcctgatggtgcaggagagaaagatccccgcccacagagtggtgctggccgccgccagccacttcttcaacctgatgttcaccaccaacatgctggagagcaagaacttcctgagcaagaccgtgcaggccgagcccctgatccaggacaaccccgagtgcctgaagatggtgatcagcggcatgagataccacctgctgagccccgaggacagagaggagctggtggacggcaccagacccagaagaaagaagcacgactacagaatcgccctgttcggcggcagccagccccagagctgcagatacttcaaccccaaggactacagctggaccgacatcagatgccccttcgagaagagaagagacgccgcctgcgtgttctgggacaacgtggtgtacatcctgggcggcagccagctgttccccatcaagagaatggactgctacaacgtggtgaaggacagctggtacagcaagctgggcccccccacccccagagacagcctggccgcctgcgccgccgagggcaagatctacaccagcggcggcagcgaggtgggcaacagcgccctgtacctgttcgagtgctacgacaccagaaccgagagctggcacaccaagcccagcatgctgacccagagatgcagccacggcatggtggaggccaacggcctgatctacgtgtgcggcggcagcctgggcaacaacgtgagcggcagagtgctgaacagctgcgaggtgtacgaccccgccaccgagacctggaccgagctgtgccccatgatcgaggccagaaagaaccacggcctggtgttcgtgaaggacaagatcttcgccgtgggcggccagaacggcctgggcggcctggacaacgtggagtactacgacatcaagctgaacgagtggaagatggtgagccccatgccctggaagggcgtgaccgtgaagtgcgccgccgtgggcagcatcgtgtacgtgctggccggcttccagggcgtgggcagactgggccacatcctggagtacaacaccgagaccgacaagtgggtggccaacagcaaggtgagagccttccccgtgaccagctgcctgatctgcgtggtggacacctgcggcgccaacgaggagaccctggagacctag

SEQ ID NO: 200119 - DNA, 1086 bp, Artificial Sequence
  derived and/or modified sequence
atggtggacatcctggccaaggtgagattccccctgatcagcaagaacttcctgagcaagaccgtgcaggccgagcccctgatccaggacaaccccgagtgcctgaagatggtgatcagcggcatgagataccacctgctgagccccgaggacagagaggagctggtggacggcaccagacccagaagaaagaagcacgactacagaatcgccctgttcggcggcagccagccccagagctgcagatacttcaaccccaaggactacagctggaccgacatcagatgccccttcgagaagagaagagacgccgcctgcgtgttctgggacaacgtggtgtacatcctgggcggcagccagctgttccccatcaagagaatggactgctacaacgtggtgaaggacagctggtacagcaagctgggcccccccacccccagagacagcctggccgcctgcgccgccgagggcaagatctacaccagcggcggcagcgaggtgggcaacagcgccctgtacctgttcgagtgctacgacaccagaaccgagagctggcacaccaagcccagcatgctgacccagagatgcagccacggcatggtggaggccaacggcctgatctacgtgtgcggcggcagcctgggcaacaacgtgagcggcagagtgctgaacagctgcgaggtgtacgaccccgccaccgagacctggaccgagctgtgccccatgatcgaggccagaaagaaccacggcctggtgttcgtgaaggacaagatcttcgccgtgggcggccagaacggcctgggcggcctggacaacgtggagtactacgacatcaagctgaacgagtggaagatggtgagccccatgccctggaagggcgtgaccgtgaagtgcgccgccgtgggcagcatcgtgtacgtgctggccggcttccagggcgtgggcagactgggccacatcctggagtacaacaccgagaccgacaagtgggtggccaacagcaaggtgagagccttccccgtgaccagctgcctgatctgcgtggtggacacctgcggcgccaacgaggagaccctggagacctag

SEQ ID NO: 200120 - protein, 617 aa, Artificial Sequence
  derived and/or modified sequence
MKVSLGNGEMGVSAHLQPCKAGTTRFFTSNTHSSVVLQGFDQLRIEGLLCDVTLVPGDGDEIFPVHRAMMASASDYFKAMFTGGMKEQDLMCIKLHGVNKVGLKKIIDFIYTAKLSLNMDNLQDTLEAASFLQILPVLDFCKVFLISGVSLDNCVEVGRIANTYNLIEVDKYVNNFILKNFPALLSTGEFLKLPFERLAFVLSSNSLKHCTELELFKAACRWLRLEDPRMDYAAKLMKNIRFPLMTPQDLINYVQTVDFMRTDNTCVNLLLEASNYQMMPYMQPVMQSDRTAIRSDSTHLVTLGGVLRQQLVVSKELRMYDERAQEWRSLAPMDAPRYQHGIAVIGNFLYVVGGQSNYDTKGKTAVDTVFRFDPRYNKWMQVASLNEKRTFFHLSALKGHLYAVGGRSAAGELATVECYNPRMNEWSYVAKMSEPHYGHAGTVYGGLMYISGGITHDTFQNELMCFDPDTDKWMQKAPMTTVRGLHCMCTVGDKLYVIGGNHFRGTSDYDDVLSCEYYSPTLDQWTPIAAMLRGQSDVGVAVFENKIYVVGGYSWNNRCMVEIVQKYDPEKDEWHKVFDLPESLGGIRACTLTVFPPEENPGSPSRESPLSAPSDHS

SEQ ID NO: 200121 - protein, 549 aa, Artificial Sequence
  derived and/or modified sequence
MMASASDYFKAMFTGGMKEQDLMCIKLHGVNKVGLKKIIDFIYTAKLSLNMDNLQDTLEAASFLQILPVLDFCKVFLISGVSLDNCVEVGRIANTYNLIEVDKYVNNFILKNFPALLSTGEFLKLPFERLAFVLSSNSLKHCTELELFKAACRWLRLEDPRMDYAAKLMKNIRFPLMTPQDLINYVQTVDFMRTDNTCVNLLLEASNYQMMPYMQPVMQSDRTAIRSDSTHLVTLGGVLRQQLVVSKELRMYDERAQEWRSLAPMDAPRYQHGIAVIGNFLYVVGGQSNYDTKGKTAVDTVFRFDPRYNKWMQVASLNEKRTFFHLSALKGHLYAVGGRSAAGELATVECYNPRMNEWSYVAKMSEPHYGHAGTVYGGLMYISGGITHDTFQNELMCFDPDTDKWMQKAPMTTVRGLHCMCTVGDKLYVIGGNHFRGTSDYDDVLSCEYYSPTLDQWTPIAAMLRGQSDVGVAVFENKIYVVGGYSWNNRCMVEIVQKYDPEKDEWHKVFDLPESLGGIRACTLTVFPPEENPGSPSRESPLSAPSDHS

SEQ ID NO: 200122 - DNA, 1854 bp, Artificial Sequence
  derived and/or modified sequence
atgaaggtgagcctgggcaacggcgagatgggcgtgagcgcccacctgcagccctgcaaggccggcaccaccagattcttcaccagcaacacccacagcagcgtggtgctgcagggcttcgaccagctgagaatcgagggcctgctgtgcgacgtgaccctggtgcccggcgacggcgacgagatcttccccgtgcacagagccatgatggccagcgccagcgactacttcaaggccatgttcaccggcggcatgaaggagcaggacctgatgtgcatcaagctgcacggcgtgaacaaggtgggcctgaagaagatcatcgacttcatctacaccgccaagctgagcctgaacatggacaacctgcaggacaccctggaggccgccagcttcctgcagatcctgcccgtgctggacttctgcaaggtgttcctgatcagcggcgtgagcctggacaactgcgtggaggtgggcagaatcgccaacacctacaacctgatcgaggtggacaagtacgtgaacaacttcatcctgaagaacttccccgccctgctgagcaccggcgagttcctgaagctgcccttcgagagactggccttcgtgctgagcagcaacagcctgaagcactgcaccgagctggagctgttcaaggccgcctgcagatggctgagactggaggaccccagaatggactacgccgccaagctgatgaagaacatcagattccccctgatgaccccccaggacctgatcaactacgtgcagaccgtggacttcatgagaaccgacaacacctgcgtgaacctgctgctggaggccagcaactaccagatgatgccctacatgcagcccgtgatgcagagcgacagaaccgccatcagaagcgacagcacccacctggtgaccctgggcggcgtgctgagacagcagctggtggtgagcaaggagctgagaatgtacgacgagagagcccaggagtggagaagcctggcccccatggacgcccccagataccagcacggcatcgccgtgatcggcaacttcctgtacgtggtgggcggccagagcaactacgacaccaagggcaagaccgccgtggacaccgtgttcagattcgaccccagatacaacaagtggatgcaggtggccagcctgaacgagaagagaaccttcttccacctgagcgccctgaagggccacctgtacgccgtgggcggcagaagcgccgccggcgagctggccaccgtggagtgctacaaccccagaatgaacgagtggagctacgtggccaagatgagcgagccccactacggccacgccggcaccgtgtacggcggcctgatgtacatcagcggcggcatcacccacgacaccttccagaacgagctgatgtgcttcgaccccgacaccgacaagtggatgcagaaggcccccatgaccaccgtgagaggcctgcactgcatgtgcaccgtgggcgacaagctgtacgtgatcggcggcaaccacttcagaggcaccagcgactacgacgacgtgctgagctgcgagtactacagccccaccctggaccagtggacccccatcgccgccatgctgagaggccagagcgacgtgggcgtggccgtgttcgagaacaagatctacgtggtgggcggctacagctggaacaacagatgcatggtggagatcgtgcagaagtacgaccccgagaaggacgagtggcacaaggtgttcgacctgcccgagagcctgggcggcatcagagcctgcaccctgaccgtgttcccccccgaggagaaccccggcagccccagcagagagagccccctgagcgcccccagcgaccacagctag

SEQ ID NO: 200123 - DNA, 1650 bp, Artificial Sequence
  derived and/or modified sequence
atgatggccagcgccagcgactacttcaaggccatgttcaccggcggcatgaaggagcaggacctgatgtgcatcaagctgcacggcgtgaacaaggtgggcctgaagaagatcatcgacttcatctacaccgccaagctgagcctgaacatggacaacctgcaggacaccctggaggccgccagcttcctgcagatcctgcccgtgctggacttctgcaaggtgttcctgatcagcggcgtgagcctggacaactgcgtggaggtgggcagaatcgccaacacctacaacctgatcgaggtggacaagtacgtgaacaacttcatcctgaagaacttccccgccctgctgagcaccggcgagttcctgaagctgcccttcgagagactggccttcgtgctgagcagcaacagcctgaagcactgcaccgagctggagctgttcaaggccgcctgcagatggctgagactggaggaccccagaatggactacgccgccaagctgatgaagaacatcagattccccctgatgaccccccaggacctgatcaactacgtgcagaccgtggacttcatgagaaccgacaacacctgcgtgaacctgctgctggaggccagcaactaccagatgatgccctacatgcagcccgtgatgcagagcgacagaaccgccatcagaagcgacagcacccacctggtgaccctgggcggcgtgctgagacagcagctggtggtgagcaaggagctgagaatgtacgacgagagagcccaggagtggagaagcctggcccccatggacgcccccagataccagcacggcatcgccgtgatcggcaacttcctgtacgtggtgggcggccagagcaactacgacaccaagggcaagaccgccgtggacaccgtgttcagattcgaccccagatacaacaagtggatgcaggtggccagcctgaacgagaagagaaccttcttccacctgagcgccctgaagggccacctgtacgccgtgggcggcagaagcgccgccggcgagctggccaccgtggagtgctacaaccccagaatgaacgagtggagctacgtggccaagatgagcgagccccactacggccacgccggcaccgtgtacggcggcctgatgtacatcagcggcggcatcacccacgacaccttccagaacgagctgatgtgcttcgaccccgacaccgacaagtggatgcagaaggcccccatgaccaccgtgagaggcctgcactgcatgtgcaccgtgggcgacaagctgtacgtgatcggcggcaaccacttcagaggcaccagcgactacgacgacgtgctgagctgcgagtactacagccccaccctggaccagtggacccccatcgccgccatgctgagaggccagagcgacgtgggcgtggccgtgttcgagaacaagatctacgtggtgggcggctacagctggaacaacagatgcatggtggagatcgtgcagaagtacgaccccgagaaggacgagtggcacaaggtgttcgacctgcccgagagcctgggcggcatcagagcctgcaccctgaccgtgttcccccccgaggagaaccccggcagccccagcagagagagccccctgagcgcccccagcgaccacagctag

SEQ ID NO: 200124 - DNA, 1854 bp, Artificial Sequence
  derived and/or modified sequence
atgaaggtgtcattaggaaacggagagatgggagtatccgcacacctgcaaccatgtaaggcgggcacaacacggttttttactagcaacacgcattcttccgtagtgctccaaggcttcgaccagctcagaattgagggactgctgtgcgacgttactcttgttccaggcgatggtgacgagatatttccagtccaccgcgccatgatggccagcgcttctgattacttcaaagccatgtttactggcgggatgaaggagcaggacctaatgtgcatcaaactgcatggagttaataaggtgggcctgaagaagatcatcgatttcatctacacggcaaaactgtcactgaacatggacaatctgcaggacactctcgaagccgcatcctttctccagatcttgcccgtcctggacttctgcaaggtcttcctgatatcaggcgtttcattggacaattgcgtcgaagtaggccggatagcgaacacgtataatctgatagaagttgacaaatacgtcaacaatttcatcctgaaaaatttcccagcgcttctgtctacaggtgagtttctcaagctaccttttgagaggctagcattcgtgttgagcagcaattccctaaaacactgcacagagctggaactttttaaagccgcatgcaggtggttacggctggaggacccacgcatggactacgcagctaagctgatgaagaacatccggttccctcttatgacccctcaggatctcattaattatgtccagactgtagattttatgcgaaccgacaacacttgcgtaaaccttctgctcgaagccagcaactaccagatgatgccatacatgcagcccgtaatgcagagcgatcgcaccgctattaggagtgattctacccatctggttacattgggcggtgtgctgcgtcagcagctggtagtgtctaaggagctgaggatgtacgacgagcgagcacaggagtggcgctctctggccccaatggacgccccccggtaccaacacggcattgctgtgattggtaattttctttacgtggtcggcggccaaagcaattatgacaccaaggggaagactgccgtcgacacagtgttccgattcgacccgcgctataacaaatggatgcaggtggcttcgctaaacgagaagcggacatttttccatttaagtgccctgaagggacatctgtacgccgtgggcggcaggagcgccgcaggcgagctggccacggtggagtgctacaatcctcgaatgaatgagtggagctacgtggccaagatgtcagagccgcactacgggcacgccggaactgtgtacggaggacttatgtacatttccggcgggattacccacgatacttttcagaacgagctgatgtgctttgatcctgacactgataagtggatgcagaaagcccccatgactactgtccgtggtctgcattgtatgtgtaccgtaggcgataaactatatgtcataggggggaatcactttcgtggcacatcagattacgatgacgtactgtcttgtgaatactattcccctaccctcgatcagtggacacccatcgccgcaatgttgcggggccagagtgacgtgggagtcgctgtctttgaaaacaaaatatacgtggtcggaggctatagctggaacaaccggtgcatggtcgagatcgtacaaaagtacgaccctgaaaaggacgaatggcacaaagtgtttgacttacctgagagcctggggggtattcgagcctgtaccctgacagtgttcccgccggaagagaacccagggtcgccctcaagagagagccccctcagcgctccttctgatcattcttag

SEQ ID NO: 200125 - DNA, 1650 bp, Artificial Sequence
  derived and/or modified sequence
atgatggcgtccgcttctgactatttcaaggccatgttcactggaggtatgaaggagcaggacctgatgtgcattaaattacatggcgttaataaggttggtctcaagaagatcattgacttcatctacactgccaaattgtctttaaatatggataacttacaggacaccctcgaggcagcaagtttcctgcaaatcttacctgtcctggacttttgtaaggtgtttctgatctccggtgtatctcttgacaattgtgtcgaagtcggacggatcgcaaatacttacaatctaatcgaggtcgacaagtatgtgaataattttatcctgaaaaattttccagcccttctatccaccggtgagtttctgaaactgccgtttgaacgcctcgcttttgtgctctcaagcaactctcttaagcactgcacggaactcgagctcttcaaagctgcctgtagatggttgaggcttgaagaccctcggatggattacgccgctaaactgatgaagaacataaggttcccactgatgacaccgcaggatctgattaactatgtgcagaccgtggattttatgagaacagacaacacttgtgtcaaccttctcttagaggcgtctaattatcagatgatgccttacatgcaaccggtgatgcagagcgaccgcaccgcaatccgttcggacagcacgcaccttgtgacactgggcggggtcctgcgacagcagctcgtcgtgtccaaggagctcaggatgtatgatgagcgcgcccaggaatggcgcagtctggcccccatggacgcaccaagatatcagcacggaattgccgtgattggcaacttcctgtatgtcgtcggtggacagtcgaattatgacactaagggaaaaacagcggtcgatacggtatttagatttgatcccaggtacaacaaatggatgcaggtcgcgtcattgaacgagaaaagaacttttttccacttgagtgcacttaaggggcacttgtacgcagtaggaggacgtagcgccgcgggggaactggcaacagtggagtgctacaacccgcgcatgaacgagtggtcttacgtggcgaagatgtctgaacctcactacggccacgcggggacagtctacgggggactcatgtatataagtgggggaataacacatgataccttccagaatgagcttatgtgctttgaccccgacaccgacaagtggatgcaaaaagctccaatgacaacagtccgtggcttgcactgtatgtgcaccgtgggggataaactatatgtgataggcggcaaccactttcgggggacatctgactatgacgatgtgttgtcttgcgagtactactcacccaccctcgatcagtggactcctattgccgcaatgctgagaggccagtccgatgtgggcgttgccgtcttcgaaaacaaaatttacgtggtggggggttactcttggaataataggtgcatggtggagattgtgcaaaagtacgaccctgagaaagacgaatggcacaaagttttcgaccttcctgaatccctgggcggtattagggcttgtaccctgacagttttcccacctgaggagaatccgggttccccaagtagggaatctccactgtctgccccttcagatcactcttag

SEQ ID NO: 200126 - DNA, 1854 bp, Artificial Sequence
  derived and/or modified sequence
atgaaggtgtccctgggcaatggagagatgggcgtgtctgcccacctgcagccctgcaaggccggcaccacccgcttcttcaccagcaacacccacagctctgtggtgctgcagggctttgaccagctgagaattgagggcctgctgtgtgatgtgaccctggtgcctggagatggagatgagatcttccctgtgcaccgggccatgatggccagcgccagtgactacttcaaggccatgttcaccggcggcatgaaggagcaggacctgatgtgcatcaagctgcacggcgtgaacaaggtgggcctgaagaagatcatcgacttcatctacacagccaagctgagcctgaacatggacaacctgcaggacaccctggaggccgccagcttcctgcagatcctgcctgtgctggacttctgcaaggtgttcctgatctctggagtgtccctggacaactgtgtggaggtgggccgcatcgccaacacctacaacctgattgaggtggacaagtatgtgaacaacttcatcctgaagaacttccctgccctgctgagcactggagagttcctgaagctgccctttgagcggctggcctttgtgctgagcagcaacagcctgaagcactgcacagagctggagctgttcaaggccgcctgccgctggctgcggctggaggaccccaggatggactatgctgccaagctgatgaagaacatccgcttccccctgatgaccccccaggacctgatcaactacgtgcagacagtggacttcatgaggacagacaacacctgtgtgaacctgctgctggaggccagcaactaccagatgatgccctacatgcagcctgtgatgcagagcgacagaacagccatccgcagtgacagcacccacctggtgaccctgggcggcgtgctgcggcagcagctggtggtgtccaaggagctgaggatgtatgatgagcgggcccaggagtggaggagcctggcccccatggatgccccccgctaccagcacggcattgctgtgattggcaacttcctgtatgtggtgggcggccagagcaactatgacaccaagggcaagacagctgtggacaccgtcttccgctttgacccccgctacaacaagtggatgcaggtggccagcctgaatgagaagaggaccttcttccacctgagcgccctgaagggccacctgtatgctgtgggcggccgctctgctgctggggagctggccaccgtggagtgctacaaccccaggatgaatgagtggagctatgtggccaagatgtctgagccccactacggccacgccggcaccgtgtatggaggcctgatgtacatcagcggcggcatcacccatgacaccttccagaatgagctgatgtgctttgatcctgacacagacaagtggatgcagaaggcccccatgaccaccgtgcggggcctgcactgcatgtgcaccgtgggggacaagctgtatgtgattggaggcaaccacttccggggcaccagtgactatgatgatgtgctgagctgtgagtactacagccccaccctggaccagtggacccccatcgccgccatgctgcggggccagagtgatgtgggcgtggccgtgtttgagaacaagatctacgtggtgggcggctacagctggaacaaccgctgcatggtggagatcgtgcagaagtatgaccctgagaaggatgagtggcacaaggtgtttgacctgcctgagagcctgggcggcatccgggcctgcaccctgactgtgttccccccagaagaaaatcctggcagccccagccgggagagccccctgagcgcccccagcgaccacagctag

SEQ ID NO: 200127 - DNA, 1650 bp, Artificial Sequence
  derived and/or modified sequence
atgatggccagcgccagtgactacttcaaggccatgttcaccggcggcatgaaggagcaggacctgatgtgcatcaagctgcacggcgtgaacaaggtgggcctgaagaagatcatcgacttcatctacacagccaagctgagcctgaacatggacaacctgcaggacaccctggaggccgccagcttcctgcagatcctgcctgtgctggacttctgcaaggtgttcctgatctctggagtgtccctggacaactgtgtggaggtgggccgcatcgccaacacctacaacctgattgaggtggacaagtatgtgaacaacttcatcctgaagaacttccctgccctgctgagcactggagagttcctgaagctgccctttgagcggctggcctttgtgctgagcagcaacagcctgaagcactgcacagagctggagctgttcaaggccgcctgccgctggctgcggctggaggaccccaggatggactatgctgccaagctgatgaagaacatccgcttccccctgatgaccccccaggacctgatcaactacgtgcagacagtggacttcatgaggacagacaacacctgtgtgaacctgctgctggaggccagcaactaccagatgatgccctacatgcagcctgtgatgcagagcgacagaacagccatccgcagtgacagcacccacctggtgaccctgggcggcgtgctgcggcagcagctggtggtgtccaaggagctgaggatgtatgatgagcgggcccaggagtggaggagcctggcccccatggatgccccccgctaccagcacggcattgctgtgattggcaacttcctgtatgtggtgggcggccagagcaactatgacaccaagggcaagacagctgtggacaccgtcttccgctttgacccccgctacaacaagtggatgcaggtggccagcctgaatgagaagaggaccttcttccacctgagcgccctgaagggccacctgtatgctgtgggcggccgctctgctgctggggagctggccaccgtggagtgctacaaccccaggatgaatgagtggagctatgtggccaagatgtctgagccccactacggccacgccggcaccgtgtatggaggcctgatgtacatcagcggcggcatcacccatgacaccttccagaatgagctgatgtgctttgatcctgacacagacaagtggatgcagaaggcccccatgaccaccgtgcggggcctgcactgcatgtgcaccgtgggggacaagctgtatgtgattggaggcaaccacttccggggcaccagtgactatgatgatgtgctgagctgtgagtactacagccccaccctggaccagtggacccccatcgccgccatgctgcggggccagagtgatgtgggcgtggccgtgtttgagaacaagatctacgtggtgggcggctacagctggaacaaccgctgcatggtggagatcgtgcagaagtatgaccctgagaaggatgagtggcacaaggtgtttgacctgcctgagagcctgggcggcatccgggcctgcaccctgactgtgttccccccagaagaaaatcctggcagccccagccgggagagccccctgagcgcccccagcgaccacagctag

SEQ ID NO: 200128 - DNA, 5710 bp, Artificial Sequence
  derived and/or modified sequence
ggaaggagcggctcggtgttggggctaggccggtattctaggcccaagcccaggcccaggcctgtgttcccggcccttgctcaaagacaggccggtggccgctgcgacactctaggtacagcggagggcgcagcgggccgttcgctgaggtgtccggacccgccgccgagcgggccgtggagccacagtacgtggcggcgcctcttccttgcccgaagcggaactgctgaaggagcggcagcgcaggccggacgaggtgaaccaggtcatttaaccgccttcaggtgatgaatcatctgtctaataatcagatttgaggtccacagccctttgtggtcctgctacagggtgattttcagtggatgactgactggcgtggcccgaggggtgccgcagtgactgccttcccttgataaggaaacgagctttctgttctttctggacacctcgttacctgtaaaacattccggttataacttctttatccggcttgcatctctgtgcaagaggaaagctttcacatgaaagtgtcccttggtaacggcgaaatgggcgtctctgcccatttgcagccttgtaaggcaggaaccacacgcttttttaccagcaatactcacagttcggtggtattgcaaggctttgatcagcttagaatagaaggattgctttgtgatgtgaccctggtaccaggtgatggagatgaaatcttccctgttcacagagctatgatggcgtctgctagtgattatttcaaagccatgttcacaggtggaatgaaagaacaagatttgatgtgcattaagcttcatggggtgaacaaggttggtctgaagaaaatcattgattttatttatactgcaaaactttctcttaatatggacaatcttcaggacacacttgaagctgctagctttttacaaatattacccgttttggatttctgtaaagtatttcttatatcaggagtctctttggataactgtgttgaggttggacgaattgctaacacctacaatcttatagaagtggataaatatgttaataatttcatcctgaagaactttcctgctttattgagtactggggagtttctaaaactcccttttgaacgacttgcatttgtgctttccagtaatagtcttaagcactgtaccgaacttgaactctttaaggcagcctgtcgctggctaaggttggaagaccctcggatggattatgctgcaaagttaatgaagaatattcgatttccactgatgacaccacaggatctcatcaattacgtgcagacagtagatttcatgagaacagacaatacctgcgtgaatttgcttttggaagctagcaattaccaaatgatgccatatatgcagccagtgatgcagtcagatagaactgccattcgatctgactccactcacttggttacattaggaggagttttgaggcagcagctggttgtcagtaaagaattacggatgtatgatgaaagggcacaagaatggagatctttagccccaatggatgctccccgttaccagcatggtattgctgtcattggaaactttctttatgtagttggtggtcagagtaattatgatacaaaaggaaaaactgctgttgatacagttttcagatttgatcctcggtataataaatggatgcaggttgcatcattaaatgaaaagcgcacattctttcacttgagtgccctcaaaggacatttgtatgcagttggtgggcgcagtgcagctggtgaactggccacagtagaatgttacaacccaagaatgaatgagtggagctatgttgcaaaaatgagtgaaccccactatggtcatgctggaacagtatatggaggcttaatgtatatttcaggaggaattacccatgacactttccaaaatgagctcatgtgttttgacccagatacagataaatggatgcaaaaggctccaatgactacagtcagaggtctgcattgcatgtgtacagttggagataagctctatgtcattggtggcaatcacttcagaggaacaagtgattatgatgatgttctaagctgtgaatactattcaccaacccttgaccagtggaccccaattgccgccatgttaagaggccaaagtgatgttggagttgccgtctttgaaaataaaatctatgttgttggtggatattcttggaataatcgttgtatggtagaaattgtccagaaatatgacccagaaaaagatgagtggcataaagtttttgatcttccagagtcacttggtggcattcgagcctgtacactcacagtttttccacctgaagaaaaccctgggtcaccttctagagaatcacctctttcagcaccttcagatcattcttaggtctaaggtgtaacacctttgcagtacgtcatgggtgatctaatacttccccttcagttgtatcttcttacagtgattggtacagttattagatataaaggtaactgatgttattcgtcttgtatggcttttagtatgtttatcaagtggctaacaaatgcattctgaaaatgtatttaacatagctgttttaacaaatgaaaaaaagacgtagaaaaatgtttagatgtctttttgtgatgttatataaaattgtagatgactgtggtaaatgtgtaattatgtccattatgcttcaaagttgagttttcatctttgactccaaaatgtcagagggaggccgctctaaactaaaaataacgaaaggttgccaagtattaatactagttacctccctcttttcgtagtttttgtcatgtctgtcaacttactcgattgtgtggttgcattcagaatatttgaagtttcttacgtagacagaaataataaaaatattaactaggaaaaaacagtatagcaccaagccagtatttggtatctctctctagagcgagcaagagagggagagaggaggaaaaaatacacataatacaaacatacatgcatgcacacatacatacatatgtatacacacacataatttgaaaactgattggcacttcaacgatgctgaaattgtttttaaattgaagtttctttcttccacaaagcagccgtttctattcaaatggaaattcagtaccagagaataaatgtctatgtagtcatactgaatttagatagataagggctacagcatactaaatcgacaaccaaatttgtcatgtgactaaaccgttacttcagatgaagcttacattactgttttctgcttgtgtattttctgtagagtacttttacacagattggtaaagttcaggtttcagagaactgcttttgtgcagaaaatttaggttcttttttccacctttttggtcagtaaaacttaatgaaaaaagcaaagaaaaaaatattctgaacaaagctatagggttttaagttcagcctcccaacttagtcatcctaacatgattattttgtgatttggggtgcttgccctggtgctgttccagtccatgtgcatcctgagctgtgtgatctgcctcgaggctatgatctgagcaagcaggagataacattttcttctgcatcaagtgaggaaaaatgtgcttttggccatgtctcaaagacaggaccaacttcagattcccaaagaagccagctacagagcctctggaacactatggtcttacaagcagtactaaaatcaaccctcagcctcttcaatgccaaaggtatccctattggttgagaaccacatggtaatttttaatgggacttttatcagcaaatggagttacaggaattctctgtaatgagtgattctgaagaggtactttcctggaataattgtctacctgaagaaaaaaaatttatatatacattgtgtgtgtgtgtaatacacacacacaaccccctatacctggaagattgtcagcatgtaaatcaggaacaactttctccttattgacaatcccataataaaactcaggaaccaaggcaaaatgaattggcttctaggggtctgaaccttactgcccatacaagtgttgattcattttaatgctgtttatgatttctgcattggcagaaattttcatactttctatgtttttttaattactcagttttttattactaaaaatagcacatttgagtacatttgaaaagtagaaaaattagaaattattaactttattgaataagcaagaagtgcatcctaatcctttgattattaatgaggttgaatatttgtgtgctatcggtagctgtgtttctttgatcagatgttcctgtccttttgcccttctgttatctgttggagttgctttgtttttcgtatcaagttataggatctctttatataataaatgtaatttaacttgcatttgcttgcatttatttcttccctcaatctgttgtagttttacaaaggcaacgctgttcagttaatttttgagatcaaatttgtctttttttttttttgagacagggtctcactgttgtgcagtctggagtgcaatggcacgatgtgtgctcactgaaacctctgcctctcatgttcaggcgattctcccacctcagcctcccgattagctgggattacaggcatgtaccaccaagcccggctaattttgtatttttagtagagatggggttaggggataattttgatatggtttattttttatgtagtatttcagtgcttattctgacatatcaaggtgatactgccctgcctctattttgtacaggcttttccttttattgaaaaaaagtactttttattacatcttatgtctgaacctggtgcttcctattgaaataagtattgctttactaggtaaactgctctatctacatcccccacctccagcttcacccaccctgcctctcatttttttactttcccgtattctgcagttgacagttctcttggtaatcatacaggtagctgactaatgctatgctaatacaggttgagcagccctaatccaaaaatccaaattgctccaaaatttaaaactttttgagggccaacaggatgccacaagtagaaaattccacaccagagctcatgtgacaggttacactcaaaacacagtgaagacttgtttcatgcacaacattattaagactattataattaccttcagactacgtgtctgaaacgtgaaatataaccgaagttttaagtaatattgtttagacttgggtccctcccccaggatacgtcatgtacatgcaaatattccaaaatccaaaacacttctggtcccaagcatttcagataagggatattcaatctgtactgctcattaaacctggagtttcttatagagagaaattttaggtggttgaaatgattaaatggaaagagatttattttcataagctggtaattttttaaagaaagttcagactggaaaaatatttagaggataaaaactaaaagcacataaagcattatgttaacatttcttgttttagtttttcggaaagtattcaaaaattaacatttgttagcttttttgatatgtctattatagaacgtacaggaaaataaaagcaaactaatttatcagtgattccacatgttgaagataatttctattaatagtatattatatatatatatatacgtacatatgtgcaggcatttgtcaaatatttttcaagtatgccagaccttaggctaaaagctggataatgaaaataaatccaccttccaaaga

SEQ ID NO: 200129 - DNA, 3259 bp, Artificial Sequence
  derived and/or modified sequence
gttcgctgaggtgtccggacccgccgccgagcgggccgtggagccacagtacgtggcggcgcctcttccttgcccgaagcggaactgctgaaggagcggcagcgcaggccggacgaggtgaaccaggtcatttaaccgccttcagagctatgatggcgtctgctagtgattatttcaaagccatgttcacaggtggaatgaaagaacaagatttgatgtgcattaagcttcatggggtgaacaaggttggtctgaagaaaatcattgattttatttatactgcaaaactttctcttaatatggacaatcttcaggacacacttgaagctgctagctttttacaaatattacccgttttggatttctgtaaagtatttcttatatcaggagtctctttggataactgtgttgaggttggacgaattgctaacacctacaatcttatagaagtggataaatatgttaataatttcatcctgaagaactttcctgctttattgagtactggggagtttctaaaactcccttttgaacgacttgcatttgtgctttccagtaatagtcttaagcactgtaccgaacttgaactctttaaggcagcctgtcgctggctaaggttggaagaccctcggatggattatgctgcaaagttaatgaagaatattcgatttccactgatgacaccacaggatctcatcaattacgtgcagacagtagatttcatgagaacagacaatacctgcgtgaatttgcttttggaagctagcaattaccaaatgatgccatatatgcagccagtgatgcagtcagatagaactgccattcgatctgactccactcacttggttacattaggaggagttttgaggcagcagctggttgtcagtaaagaattacggatgtatgatgaaagggcacaagaatggagatctttagccccaatggatgctccccgttaccagcatggtattgctgtcattggaaactttctttatgtagttggtggtcagagtaattatgatacaaaaggaaaaactgctgttgatacagttttcagatttgatcctcggtataataaatggatgcaggttgcatcattaaatgaaaagcgcacattctttcacttgagtgccctcaaaggacatttgtatgcagttggtgggcgcagtgcagctggtgaactggccacagtagaatgttacaacccaagaatgaatgagtggagctatgttgcaaaaatgagtgaaccccactatggtcatgctggaacagtatatggaggcttaatgtatatttcaggaggaattacccatgacactttccaaaatgagctcatgtgttttgacccagatacagataaatggatgcaaaaggctccaatgactacagtcagaggtctgcattgcatgtgtacagttggagataagctctatgtcattggtggcaatcacttcagaggaacaagtgattatgatgatgttctaagctgtgaatactattcaccaacccttgaccagtggaccccaattgccgccatgttaagaggccaaagtgatgttggagttgccgtctttgaaaataaaatctatgttgttggtggatattcttggaataatcgttgtatggtagaaattgtccagaaatatgacccagaaaaagatgagtggcataaagtttttgatcttccagagtcacttggtggcattcgagcctgtacactcacagtttttccacctgaagaaaaccctgggtcaccttctagagaatcacctctttcagcaccttcagatcattcttaggtctaaggtgtaacacctttgcagtacgtcatgggtgatctaatacttccccttcagttgtatcttcttacagtgattggtacagttattagatataaaggtaactgatgttattcgtcttgtatggcttttagtatgtttatcaagtggctaacaaatgcattctgaaaatgtatttaacatagctgttttaacaaatgaaaaaaagacgtagaaaaatgtttagatgtctttttgtgatgttatataaaattgtagatgactgtggtaaatgtgtaattatgtccattatgcttcaaagttgagttttcatctttgactccaaaatgtcagagggaggccgctctaaactaaaaataacgaaaggttgccaagtattaatactagttacctccctcttttcgtagtttttgtcatgtctgtcaacttactcgattgtgtggttgcattcagaatatttgaagtttcttacgtagacagaaataataaaaatattaactaggaaaaaacagtatagcaccaagccagtatttggtatctctctctagagcgagcaagagagggagagaggaggaaaaaatacacataatacaaacatacatgcatgcacacatacatacatatgtatacacacacataatttgaaaactgattggcacttcaacgatgctgaaattgtttttaaattgaagtttctttcttccacaaagcagccgtttctattcaaatggaaattcagtaccagagaataaatgtctatgtagtcatactgaatttagatagataagggctacagcatactaaatcgacaaccaaatttgtcatgtgactaaaccgttacttcagatgaagcttacattactgttttctgcttgtgtattttctgtagagtacttttacacagattggtaaagttcaggtttcagagaactgcttttgtgcagaaaatttaggttcttttttccacctttttggtcagtaaaacttaatgaaaaaagcaaagaaaaaaatattctgaacaaagctatagggttttaagttcagcctcccaacttagtcatcctaacatgattattttgtgatttggggtgcttgccctggtgctgttccagtccatgtgcatcctgagctgtgtgatctgcctcgaggctatgatctgagcaagcaggagataacattttcttctgcatcaagtgaggaaaaatgtgcttttggccatgtctcaaagacaggaccaacttcagattcccaaagaagccagctacagagcctctggaacactatggtcttacaagcagtactaaaatcaaccctcagcctcttcaatgccaaaggtatccctattggttgagaaccacatggtaatttttaatgggacttttatcagcaaatggagttacaggaattctctgtaatgagtgattctgaagaggtactttcctggaataattgtctacctg

SEQ ID NO: 200130 - DNA, 1854 bp, Artificial Sequence
  derived and/or modified sequence
atgaaggtgagcctgggcaacggcgagatgggcgtgagcgcccacctacagccttgcaaagctgggaccacaaggtttttcacttccaatacacactcatccgtggtactccagggatttgaccagttgcgaattgagggattgttgtgtgacgtgaccctagtgcctggggatggtgatgagatcttccccgtacacagggcaatgatggcttcagcctctgattacttcaaagccatgtttaccggaggcatgaaagagcaggacctgatgtgtattaaactccacggcgtgaataaagttgggttgaagaagataatcgattttatctacacagctaaacttagtctgaatatggataatttgcaggacaccttggaagccgcgagtttcctgcagattctccctgtgctggatttttgcaaggttttcttgatctctggggtctctctcgataattgcgttgaagttggtcgaatagccaacacctataacttgatcgaagtggacaagtatgtgaacaatttcatactgaaaaacttcccagccctcttgtcaaccggcgaattcttaaagcttccattcgaacgcctggcattcgtgctcagttctaatagcttaaaacactgtactgaactggagctgtttaaggctgcttgccgatggttgcgcctggaagatccccgtatggactatgccgcaaaactgatgaagaacattaggtttcctctgatgaccccccaggacctgatcaattacgttcagacagtcgacttcatgagaaccgacaacacctgcgtcaatcttttgcttgaagcttcgaactatcagatgatgccatacatgcagccagttatgcagtccgatagaaccgctatcaggtcggattccactcacctggtgactctggggggagtgctacgccagcaactggtcgtttccaaggagctgcgcatgtacgatgaaagggcccaggaatggagaagtctggctccaatggacgcacctaggtaccagcacggcatcgcagtaatcggcaactttctttacgtggtgggcgggcagagtaactacgataccaaaggcaagaccgctgtagacaccgttttccgattcgatccgcgttataacaagtggatgcaggtggcctctttaaatgagaagagaactttcttccacctgtcagccctgaaggggcacctgtacgcggtggggggaaggtcagccgctggagaattggctactgttgagtgttataaccctagaatgaacgagtggtcatacgtggcaaaaatgtcagaacctcactatgggcatgccgggacagtctacgggggtctgatgtatatcagtggcgggattacacacgatacatttcagaacgaactgatgtgcttcgaccccgacacagataaatggatgcagaaggcgccaatgacaacggtaagaggactgcactgtatgtgcacagttggtgacaaactgtacgtgatcggaggcaaccactttagaggtacatctgattacgatgacgtcctcagctgcgagtactactccccaacactggatcagtggacacctattgctgccatgcttcggggccaaagcgacgtcggcgtggctgtgtttgagaataaaatttacgttgtcggcggatattcttggaataatagatgtatggttgaaattgttcagaaatacgacccggagaaagacgaatggcataaagtgtttgatctccccgagtcactgggcggaattcgcgcctgtaccctcactgtattccctccagaggaaaaccctgggagccctagtcgcgagagccctctcagtgccccatcggaccattcttag

SEQ ID NO: 200131 - DNA, 1650 bp, Artificial Sequence
  derived and/or modified sequence
atgatggccagcgccagcgactacttcaaggccatgttcaccggcggcatgaaagagcaagacctcatgtgcataaagcttcacggggttaacaaagttgggctcaagaaaattattgactttatttacaccgcaaagttaagcctcaacatggacaaccttcaggacactctcgaagccgcaagcttcctgcaaatactgcctgtcctggacttttgcaaggtgttcctgatttcgggagtgtctttggataactgtgtggaagtgggccggatcgccaatacatacaatctaatcgaggtcgacaaatatgtcaacaattttatactgaagaacttcccggcactcttgagcactggcgaattcctgaagctcccctttgagcgcctggcattcgtgttgtccagcaatagccttaaacactgcaccgaactcgagctctttaaagccgcctgtcggtggctgcgcttagaggacccaagaatggactacgccgcaaaacttatgaaaaatatacggtttcccctgatgacgccacaagatttaatcaactatgtgcagactgtggactttatgaggacggacaatacctgcgtgaacctcctactcgaagcatccaactaccagatgatgccgtacatgcagccagtaatgcaaagcgacaggacagctatcaggtccgactcaacccatctcgtgacactgggcggtgtattgcggcagcagcttgtggtctctaaggagctgcggatgtacgacgaaagggctcaggaatggcggtcattggcccccatggatgcgcccagatatcagcacggaattgccgtgatcggaaattttctgtacgtcgtcggtgggcaaagcaattatgacaccaaaggtaagaccgccgtggatactgtgttcaggtttgatccaaggtacaacaagtggatgcaggtagctagtctgaatgaaaaaaggaccttctttcacctcagcgccctgaaaggacacttgtacgcggtgggcggacggagtgcagcaggcgaattagccaccgtggagtgctataatcctagaatgaacgagtggtcgtatgttgccaagatgtccgagccccactacggacacgccgggactgtctacggcggcctgatgtacatttcagggggtataactcacgacacgtttcagaatgagctgatgtgctttgaccctgacacagataaatggatgcagaaggctcccatgaccaccgtgaggggtcttcactgcatgtgcactgtcggggataaactgtacgtgatcgggggcaatcattttagaggcacctccgattacgacgacgtgttgtcatgtgaatattacagccctaccctggaccagtggacccccatcgctgccatgttacgcggccaaagcgatgttggggttgcggtgttcgaaaataagatttatgtcgtgggaggctacagctggaataaccggtgcatggtggagattgtgcaaaagtacgatcccgagaaggatgagtggcataaagttttcgacctccctgagagcctggggggaatcagggcctgtaccctgaccgtgttccctccagaggagaaccccgggagcccaagccgagaaagcccattaagcgctccctccgaccattcgtag

SEQ ID NO: 200132 - DNA, 1854 bp, Artificial Sequence
  derived and/or modified sequence
atgaaggtgagcctggggaatggagagatgggagtgtccgctcacttgcagccctgcaaagccggaacaactagattcttcacgagtaatacccatagctctgtcgttctgcaggggttcgatcagctgcgcatcgaggggctgctctgtgatgtgaccctcgtgcccggtgatggagacgagatctttccagtgcatagggctatgatggcaagtgcgtcggactactttaaagcaatgttcaccggcggtatgaaggagcaggatctgatgtgtataaagctgcatggtgtcaataaagtcgggcttaaaaagatcattgactttatatatactgcaaagctgagcctcaacatggataacctgcaagacaccctcgaggccgcttcattcttgcagatccttcccgttttggacttttgtaaggttttcctgatctctggcgtctcactggataactgtgtggaggtaggtagaattgcaaatacttacaatttaattgaggtggataagtacgttaataacttcatcttaaaaaacttccctgccttactgtccaccggcgagttcctcaagttaccatttgaaaggcttgctttcgtgctgagcagcaattctttaaagcactgcactgagctggagctgtttaaggccgcttgccgatggcttagattggaggatccgaggatggactacgctgctaaactcatgaaaaacatccgcttcccgctgatgacaccccaggacctgatcaactacgtccagacggtagatttcatgagaacagacaatacgtgtgtcaacctgctgctcgaggcaagcaactaccaaatgatgccttatatgcagccagtgatgcagagtgatcgtacagcaatcaggtccgactccacccacctcgtaactcttggcggagttctgagacagcagctggtggtgagtaaggagctgaggatgtacgacgagcgtgcccaggagtggcgctcacttgcccctatggatgcaccccgttaccagcatggaatcgccgtaatcgggaactttttgtacgtggtgggcggacagtcgaactatgatactaaggggaaaacagccgttgacaccgtttttaggttcgatccgagatacaataagtggatgcaggtcgcttccttgaacgagaagcggactttcttccatctctcagccctcaaaggccatctatacgcagtgggtggcagaagtgctgctggagaattggccacagtggagtgttacaaccctcgaatgaacgagtggtcttatgtagctaagatgagcgagcctcattatggacacgccggtacggtgtacgggggactgatgtacatttccgggggaattacacatgatacttttcagaacgagcttatgtgcttcgacccagacacggacaagtggatgcagaaagccccaatgaccaccgtcagaggcctgcactgcatgtgtactgtgggggacaagctatatgtgataggcggaaatcactttcggggaaccagtgattacgacgatgtcctttcttgtgaatactatagccctacgctggaccagtggacaccaattgccgctatgttgcggggacagtctgatgtgggcgtcgcagtgttcgaaaataagatatacgtggtcggtggttatagctggaacaatcggtgtatggtggagattgtgcagaagtacgacccggagaaagatgagtggcacaaagtgttcgatttacctgaaagcttagggggtattagggcatgcactcttacagtgttccctccagaagagaaccctgggtctcctagtcgcgaatcccccctgagcgcccctagcgatcattcttag

SEQ ID NO: 200133 - DNA, 1650 bp, Artificial Sequence
  derived and/or modified sequence
atgatggctagcgcatccgactacttcaaggccatgtttacaggaggtatgaaggagcaagaccttatgtgtatcaaattgcatggcgtgaacaaggtaggactaaagaagattatcgattttatatacacagcaaagctcagcctaaatatggataacctgcaggacacgttggaagcagcctcttttcttcagatcctcccagtgcttgatttctgcaaggtatttctgattagcggggtgagtctcgacaactgtgtggaggttggccgtattgccaatacatacaatctcattgaggtggataaatacgtcaataactttattctgaagaattttcctgccttgctctccacgggagagtttctcaagctgcccttcgagcgcctggctttcgtgttaagctctaacagtctgaagcattgtaccgagctggaactgtttaaggcagcttgcagatggctgaggctggaagatccacgtatggactacgccgctaaacttatgaagaatatccgctttcctttgatgaccccccaagatctgatcaactatgtccagacagtggatttcatgcgaacagataacacttgtgtcaatttgttgctagaggcctccaactatcagatgatgccttacatgcaaccggtaatgcagagcgacaggactgccatccggtccgacagtacccatttggtgactttaggaggcgtgctccggcagcagctggtcgtttcaaaagagctgaggatgtatgatgagcgagctcaggaatggcgctcgttagctcccatggacgctcctcgctaccaacacggtatcgccgttattggtaacttcctgtatgttgtgggtggccaatccaactacgacaccaagggcaagacagctgtagacaccgtttttcgctttgacccccgatataacaagtggatgcaggtggcatctttgaatgagaagcgaacttttttccatttgtccgctttaaaggggcatctctacgctgtagggggtcgatcagcagcgggtgaactagctaccgtggaatgttacaaccctaggatgaacgagtggtcatacgtcgccaagatgagtgagcctcactatggccacgccggaaccgtgtatggtggcctgatgtatatatccggagggattacccacgatactttccaaaatgaactgatgtgcttcgatccagataccgacaagtggatgcagaaagcgcctatgaccaccgtaagaggcctgcactgtatgtgcaccgttggagacaagctgtatgtgattggaggaaatcattttcgcggtacctccgactacgacgatgtgctgagttgcgaatactacagccccaccctggatcaatggactcccattgccgctatgttacgaggacaatcagacgtcggagtggctgttttcgaaaacaaaatttatgttgtggggggatatagttggaataacagatgcatggtggagatcgtccagaaatacgacccagagaaagacgaatggcataaggtcttcgacttaccagaaagtctgggcggaattagggcgtgtacgctgaccgtgttccctccggaggaaaatcccggtagcccatctagggagagtcccttgtctgcaccgtccgaccattcttag

SEQ ID NO: 200134 - protein, 570 aa, Artificial Sequence
  derived and/or modified sequence
MSRLEAKKPSLCKSEPLTTERVRTTLSVLKRIVTSCYGPSGRLKQLHNGFGGYVCTTSQSSALLSHLLVTHPILKILTASIQNHVSSFSDCGLFTAILCCNLIENVQRLGLTPTTVIRLNKHLLSLCISYLKSETCGCRIPVDFSSTQILLCLVRSILTSKPACMLTRKETEHVSALILRAFLLTIPENAEGHIILGKSLIVPLKGQRVIDSTVLPGILIEMSEVQLMRLLPIKKSTALKVALFCTTLSGDTSDTGEGTVVVSYGVSLENAVLDQLLNLGRQLISDHVDLVLCQKVIHPSLKQFLNMHRIIAIDRIGVTLMEPLTKMTGTQPIGSLGSICPNSYGSVKDVCTAKFGSKHFFHLIPNEATICSLLLCNRNDTAWDELKLTCQTALHVLQLTLKEPWALLGGGCTETHLAAYIRHKTHNDPESILKDDECTQTELQLIAEAFCSALESVVGSLEHDGGEILTDMKYGHLWSVQADSPCVANWPDLLSQCGCGLYNSQEELNWSFLRSTRRPFVPQSCLPHEAVGSASNLTLDCLTAKLSGLQVAVETANLILDLSYVIEDKN

SEQ ID NO: 200135 - DNA, 1713 bp, Artificial Sequence
  derived and/or modified sequence
atgagtagactggaagccaaaaaaccatctctgtgcaagtcagaacctctgaccacagaacgggtcaggacaaccctgtcagtactaaaacggatcgtcacatcctgctatggaccatccggacggttgaaacagctgcataatggctttggtggctacgtgtgtaccactagtcagtcgagtgccctgcttagccacctgctggttacacaccccattcttaagatacttaccgcctcaatccagaaccatgtgtccagctttagcgactgtggactgttcaccgccatactttgttgcaacctcattgagaatgtgcagcggctggggcttacaccgacaactgtgattcggctaaataagcatctgctttcactctgtatctcctacctgaaaagtgaaacctgtggttgccgcattcccgtagatttttctagcactcagatattgttgtgcctggttagatctatactgactagcaaacccgcctgtatgcttacaagaaaggagaccgagcatgtctccgctctgatactgcgtgccttccttctcacaatccccgaaaatgcagagggtcatattatcttgggcaagagcctcatcgtgccgctcaaaggccaaagagtgattgatagtactgtgctccccgggatcctcattgagatgtccgaggtccagctaatgcggctgttacccatcaaaaagagtactgctctgaaagtcgctttattctgcactaccttaagcggagacacctccgacactggtgagggcactgtcgtggtcagttatggtgtaagcctcgagaatgcagtgctagaccagctactgaatcttgggagacagctaattagcgaccatgtcgacctggtcctatgtcagaaggttattcatccctcactcaaacagtttctgaacatgcaccgtatcatcgctatcgaccgcattggtgttacgcttatggagccattgacgaagatgacaggcactcagcctataggtagcctcggctcaatctgcccgaatagctacggatctgtgaaggacgtctgtactgctaagttcggctccaagcacttctttcacctaattcctaacgaagctaccatctgctcgctcctcctttgcaatcgcaacgataccgcttgggacgaactgaagctgacttgtcaaacagcattgcatgtccttcagctgactctgaaagagccctgggcgctcttaggcggcgggtgcaccgagacccatctggccgcttacattcgccacaagacccataacgatccggagtccatcctaaaggacgatgaatgcacacagactgagctgcaattaatcgctgaagcattctgctctgccctggaaagcgtggttggctcgctggagcatgacggcggggagattttgactgacatgaaatacggccatctttggtcagtgcaagctgacagcccttgcgtcgcaaactggcccgatttgctcagtcagtgtgggtgcggcctatacaacagtcaggaggagctaaactggagcttcctccgttcaacaaggcggccatttgtgccacaatcctgcctaccccacgaggctgtgggctccgccagcaatctgacattggattgtctcaccgcaaagcttagtggcctgcaggttgctgtagaaaccgctaacctgattctagatctctcatatgtgatagaggacaaaaattag

SEQ ID NO: 200136 - DNA, 1713 bp, Artificial Sequence
  derived and/or modified sequence
atgtccagactcgaagcgaagaagccgagcctgtgcaaatccgaaccattgactaccgagcgagtgagaaccaccctcagcgtattaaagcgaatcgtgacctcttgctacggcccctccggccgtctcaagcagctacataacgggtttggcggatacgtgtgtaccacgtcccagagttctgcactgttaagccatttgctggtcacacatccaatcctgaagattctcacggccagcatccagaaccacgtgtcttcgttttctgactgcggcctcttcacagccattctttgctgtaaccttatagaaaacgttcagcgtttgggattgacacctaccactgtaatcagactgaacaagcacttgctgagcttatgcatctcatacctgaaatcagagacatgcggctgccgtattcctgtggactttagtagtacacaaatcctcttatgcctcgtacggtctatcctcacgtccaaacccgcctgcatgctgacgcgcaaggaaacggagcacgtgtctgcactgatcttgagagccttcctgctgaccattccagaaaacgcagagggacacattattctcggcaagagcctgatcgtacccctcaaggggcagcgagtcatcgatagtacagtgctccctggaatcctgatcgaaatgtctgaggtacagctgatgagactgctaccgattaagaaatccaccgcgctgaaggtcgcactattttgtacaacactcagcggcgatacgagcgacaccggagagggaaccgtggtcgtatcgtacggagtcagcttggaaaacgcagtgctcgaccagctgctgaatctgggcaggcaactcatctcagatcacgtggatttggttctatgtcagaaagtgattcaccctagccttaaacagtttttgaatatgcacagaataatcgccatcgaccggatcggggtcactttgatggagccactgacgaagatgaccggcacgcaacctatcggtagtctgggtagcatctgccccaattcctatggcagcgtgaaagacgtgtgtacggcgaagttcggaagcaagcacttttttcacctgatccctaatgaagctactatctgttccctgctcctctgtaaccgaaatgacactgcttgggacgaattgaagctgacctgccagactgctctgcacgtgctgcagctgaccttgaaagagccctgggccctcctgggtggcggctgtacggaaacccacctcgccgcctacatcagacacaagacacataacgatcctgagagtatactgaaggatgacgagtgcacccagaccgagctgcagctcattgctgaggccttctgctccgcacttgaatctgtagtgggctcactggaacacgatgggggcgaaatccttaccgatatgaagtacggacacctatggtcagttcaggccgattccccttgtgtggcgaattggccagacctcctaagccagtgcggctgcgggctgtacaattcacaggaggaactgaattggtctttccttcggtccacacgacggcccttcgttccgcaatcgtgcttaccccacgaggcagtaggttctgccagcaatctgactcttgattgcttgactgctaaactgtccgggctgcaggtggcggtggagacagctaacctgatcctcgacctgagttatgtcatcgaggataaaaattag

SEQ ID NO: 200137 - DNA, 1713 bp, Artificial Sequence
  derived and/or modified sequence
atgagccggctggaggccaagaagcccagcctgtgcaagtctgagcccctgaccacagagcgggtgaggaccaccctgtctgtgctgaagagaattgtgaccagctgctacggccccagcggccgcctgaagcagctgcacaacggctttggaggctacgtgtgcaccaccagccagagcagcgccctgctgagccacctgctggtgacccaccccatcctgaagatcctgacagccagcatccagaaccacgtgtcctccttcagtgactgtggcctcttcaccgccatcctgtgctgcaacctgattgaaaatgtgcagaggctgggcctgacccccaccaccgtcatccggctgaacaagcacctgctgagcctgtgcatctcctacctgaagtctgagacctgtggctgccgcatccctgtggacttcagcagcacccagatcctgctgtgcctggtgcgcagcatcctgaccagcaagccagcctgcatgctgaccaggaaggagacagaacatgtgtctgccctgatcctgcgggccttcctgctgaccatcccagaaaatgctgagggccacatcatcctgggcaagagcctgattgtgcccctgaagggccagagggtcatcgacagcacagtgctgcccggcatcctgattgagatgtctgaggtgcagctgatgaggctgctgcccatcaagaagagcacagccctgaaggtggccctcttctgcaccaccctgagcggggacaccagtgacacaggagagggcaccgtggtggtgtcctatggagtgtccctggagaatgctgtgctggaccagctgctgaacctgggccggcagctgatcagtgaccacgtggacctggtgctgtgccagaaggtgatccaccccagcctgaagcagttcctgaacatgcaccgcatcatcgccatcgaccgcatcggcgtgaccctgatggagcccctgaccaagatgacaggcacccagcccatcggcagcctgggcagcatctgccccaacagctatggctctgtgaaggatgtgtgcacagccaagtttggcagcaagcacttcttccacctgatccccaatgaggccaccatctgcagcctgctgctgtgcaacagaaatgacacagcctgggatgagctgaagctgacctgccagacagccctgcacgtgctgcagctgaccctgaaggagccctgggccctgctgggcggcggctgcacagagacccacctggccgcctacatccgccacaagacccacaatgaccctgagagcatcctgaaggatgatgaatgtacccagacagagctgcagctgattgctgaggccttctgcagcgccctggagagcgtggtgggcagcctggagcatgatggaggagagatcctgacagacatgaagtatggccacctgtggagcgtgcaggccgacagcccctgtgtggccaactggccagacctgctgagccagtgtggctgcggcctgtacaacagccaggaggagctgaactggagcttcctgcggagcacccggcggccctttgtgccccagagctgcctgccccatgaggccgtgggcagcgccagcaacctgaccctggactgcctgacagccaagctgagcggcctgcaggtggccgtggagacagccaacctgatcctggacctgtcctatgtgattgaggacaagaactag

SEQ ID NO: 200138 - DNA, 2539 bp, Artificial Sequence
  derived and/or modified sequence
gtgccctcgcgcgacgcgaaggttgtcgggatccgcggcagcagcggctgcttgagatctgtttctggggcctctggcggtggcggcctggggcggcgcgacggctggtgcgcaggtacactgatgctgaagtactatgagccttcggaacttgtggagagactacaaagttttggttgttatggtccctttagttgggctcatacatttggggtggtacagaatcaaaagcagccctgttttccaaatacctaaaaacgacgacattcctgagcaagatagtctgggactttcaaatcttcagaagagccaaatccaggggaagtagcaggcttgcaatcttcaggtaaagaagcagctttgaatctgagcttcatatcgaaagaagagatgaaaaataccagttggattagaaagaactggcttcttgtagctgggatatctttcataggtgtccatcttggaacatactttttgcagaggtctgcaaagcagtctgtaaaatttcagtctcaaagcaaacaaaagagtattgaagagtgaagtaaaataaatatttggaattactaatttgtcattaaatcattctatgctgattagcttcataaacattgaactttttgattttatagccacaatgctgcatattcatactttaattcctaaagaataatttttaatgttaaaacgtgataatgcaataaatagaaaaatgtggtttacaaaataaaaacggtcttcactagttaccacctgaagtaagatgtctcgtttggaagctaagaagccatcattgtgtaagagtgaaccactgacaactgagagagtcaggaccacactttctgtcttgaaaagaattgtaacatcatgctatggcccctcaggtaggctgaagcagctgcacaatggctttggaggttacgtgtgtacaacctcacagtcctcagctctgctcagtcaccttttggtcacacatcccattttaaagatcctgacagcctccatacagaatcatgtgtcaagcttcagtgattgtggcttattcacagctattctttgctgcaacctgattgaaaatgttcagagattaggcttgacacccaccactgtcattagattaaataaacatcttttgagtctttgcatcagttatctcaagtctgagacctgtggttgtcgaatcccagtggactttagtagtactcagatcctcctttgtttggtgcgtagtatattaacaagtaaacctgcctgtatgctcaccagaaaggaaacagagcatgtcagtgctttgatcctgagagcctttttgcttacaattccagaaaatgctgaaggccacatcattttaggaaagagtttaattgtacctttaaaaggtcaaagagttatagattccactgtattacctgggatactcattgaaatgtcagaagttcaattaatgaggctattacctatcaaaaaatcaactgccctcaaggtggcactcttttgtacaactttatccggagacacttctgacactggagaaggaactgtggtggtcagttatggggtttctcttgaaaatgcagtcttggaccagctgcttaacctaggaaggcagctaatcagtgaccacgtagatcttgtcctgtgccaaaaagttatacatccatctttgaagcagtttctcaatatgcatcgtattattgccatagacagaattggagtgactctgatggaacccctgactaaaatgacaggaacacagcctattggatccctaggctcaatatgtcctaatagttatggaagtgtgaaagatgtgtgcactgcaaaatttggctccaaacatttttttcatcttattcctaatgaagcaacaatctgcagcttgcttctctgcaacagaaatgacactgcctgggatgagctgaagctcacgtgtcagacggcactgcatgtcctgcagttaacactcaaggaaccatgggctttgttgggaggtggctgtactgaaactcatttggctgcatatatcagacacaagactcacaacgacccagaaagcattctcaaagatgatgaatgtactcaaacagaacttcaattaattgctgaagcattttgcagtgccctagaatctgttgttggctctttagaacatgatggaggtgaaattctcactgacatgaagtatggacacctttggtcagttcaggcagattctccctgtgttgctaactggccagatttgctttcacagtgtggctgtggattatacaatagccaggaagaactcaactggtctttcttaagaagcacacgtcgtccatttgtgccacaaagctgccttccacatgaagctgtgggctcagccagcaacctgaccttggactgtttgactgcaaagcttagtggcctacaggtggctgtagagacagccaatttgattttggatctttcatatgttattgaagataaaaactaagagaatagcatgttcgtattacaagagaaacaaataaactagtctgttggcaattgagaaaaa

SEQ ID NO: 200139 - DNA, 2663 bp, Artificial Sequence
  derived and/or modified sequence
gggaaaacactttaggttgagtgctgagagaaaggctctctgagtaggtgacatctgaactaagagctgaagcagaagaataagccatcctctgtggaccaaaggggacaagattctctacttttctgctacgcactaggaatatagcagagaagacaagtggctgctaccttctgttatcgtgggtggcagtgactagtttttctagatcttgactccctgccgtaactaaagatggagtacactgatgctgaagtactatgagccttcggaacttgtggagagactacaaagttttggttgttatggtccctttagttgggctcatacatttggggtggtacagaatcaaaagcagccctgttttccaaatacctaaaaacgacgacattcctgagcaagatagtctgggactttcaaatcttcagaagagccaaatccaggggaagtagcaggcttgcaatcttcaggtaaagaagcagctttgaatctgagcttcatatcgaaagaagagatgaaaaataccagttggattagaaagaactggcttcttgtagctgggatatctttcataggtgtccatcttggaacatactttttgcagaggtctgcaaagcagtctgtaaaatttcagtctcaaagcaaacaaaagagtattgaagagtgaagtaaaataaatatttggaattactaatttgtcattaaatcattctatgctgattagcttcataaacattgaactttttgattttatagccacaatgctgcatattcatactttaattcctaaagaataatttttaatgttaaaacgtgataatgcaataaatagaaaaatgtggtttacaaaataaaaacggtcttcactagttaccacctgaagtaagatgtctcgtttggaagctaagaagccatcattgtgtaagagtgaaccactgacaactgagagagtcaggaccacactttctgtcttgaaaagaattgtaacatcatgctatggcccctcaggtaggctgaagcagctgcacaatggctttggaggttacgtgtgtacaacctcacagtcctcagctctgctcagtcaccttttggtcacacatcccattttaaagatcctgacagcctccatacagaatcatgtgtcaagcttcagtgattgtggcttattcacagctattctttgctgcaacctgattgaaaatgttcagagattaggcttgacacccaccactgtcattagattaaataaacatcttttgagtctttgcatcagttatctcaagtctgagacctgtggttgtcgaatcccagtggactttagtagtactcagatcctcctttgtttggtgcgtagtatattaacaagtaaacctgcctgtatgctcaccagaaaggaaacagagcatgtcagtgctttgatcctgagagcctttttgcttacaattccagaaaatgctgaaggccacatcattttaggaaagagtttaattgtacctttaaaaggtcaaagagttatagattccactgtattacctgggatactcattgaaatgtcagaagttcaattaatgaggctattacctatcaaaaaatcaactgccctcaaggtggcactcttttgtacaactttatccggagacacttctgacactggagaaggaactgtggtggtcagttatggggtttctcttgaaaatgcagtcttggaccagctgcttaacctaggaaggcagctaatcagtgaccacgtagatcttgtcctgtgccaaaaagttatacatccatctttgaagcagtttctcaatatgcatcgtattattgccatagacagaattggagtgactctgatggaacccctgactaaaatgacaggaacacagcctattggatccctaggctcaatatgtcctaatagttatggaagtgtgaaagatgtgtgcactgcaaaatttggctccaaacatttttttcatcttattcctaatgaagcaacaatctgcagcttgcttctctgcaacagaaatgacactgcctgggatgagctgaagctcacgtgtcagacggcactgcatgtcctgcagttaacactcaaggaaccatgggctttgttgggaggtggctgtactgaaactcatttggctgcatatatcagacacaagactcacaacgacccagaaagcattctcaaagatgatgaatgtactcaaacagaacttcaattaattgctgaagcattttgcagtgccctagaatctgttgttggctctttagaacatgatggaggtgaaattctcactgacatgaagtatggacacctttggtcagttcaggcagattctccctgtgttgctaactggccagatttgctttcacagtgtggctgtggattatacaatagccaggaagaactcaactggtctttcttaagaagcacacgtcgtccatttgtgccacaaagctgccttccacatgaagctgtgggctcagccagcaacctgaccttggactgtttgactgcaaagcttagtggcctacaggtggctgtagagacagccaatttgattttggatctttcatatgttattgaagataaaaactaagagaatagcatgttcgtattacaagagaaacaaataaactagtctgttggcaattgagaaaaa

SEQ ID NO: 200140 - DNA, 1713 bp, Artificial Sequence
  derived and/or modified sequence
atgagccggctggaggccaagaagcccagcctgtgcaagagcgagcctctcactacagagagagtccgaactacactgagtgtgttgaaacggattgtgacatcttgttacggaccctctggccgcctgaaacaactgcataatggcttcggtggatatgtctgtaccacatcccagtcaagcgcattgctgtcacacctgttagtgacacaccccatcctcaagatattgaccgccagtattcagaatcacgttagttccttttctgattgtgggttatttacggcaatcctgtgttgcaacctgattgaaaacgtgcagcgactgggactcacgcccacgacagtaataaggctgaacaaacaccttctcagtctgtgtatctcatatctgaagtcggagacctgcgggtgcagaattcccgtggatttttcaagcactcagattctactatgtctggttcgctccattctcacctctaaaccagcctgcatgctcacaaggaaagagacagagcacgttagcgccttgatcctccgtgctttccttcttacaatccccgaaaacgctgagggacacataatactgggaaagagtcttatcgtgcccctaaaggggcaaagagtgatagattcaaccgtgctcccgggcatcctcatcgagatgtcagaagtccaattaatgaggctgctgcccatcaaaaaatccacagcacttaaagtggcccttttctgtacaactctgtctggcgacacatcagataccggcgaggggaccgtggttgtgagctatggtgtctccctagaaaatgcggtccttgaccagctgttgaacctggggcggcaactcatttcagatcacgtagacttggtgttgtgccagaaggtgatacatcccagcctcaaacagtttctaaatatgcatcgcatcatcgcaatagaccgcattggcgtcacactgatggagccgctcactaagatgacgggtacacagccaatcggatcacttgggtctatttgccccaactcctatggttccgttaaagatgtgtgcactgccaagttcggcagcaaacactttttccaccttatccccaatgaagctaccatctgctcgctgctgctctgtaatcgtaacgacaccgcctgggacgaacttaaactcacctgtcagaccgccctgcacgttctgcagttgacactgaaggaaccttgggccctgttagggggcgggtgtaccgagacacatctcgccgcatatattcgtcataagactcacaatgacccggaaagcatcttgaaagacgatgaatgcacacagacagagctgcaactgatcgctgaggcgttctgtagcgccctggaatccgtggttggatctctcgagcacgatgggggcgagatactaacagatatgaagtatggacacctctggagtgttcaggctgacagcccttgcgtagcaaattggccagacctgctctcccagtgcggatgcggcctatacaattctcaggaggagttgaattggtcttttctgcggtcaacaagaaggccattcgtgccgcagtcgtgcctgccgcacgaggccgtgggctcagcttcaaacctcaccctcgactgcctgacagcaaagctctcagggctgcaggtagccgtggagactgctaacctcatcctcgacctgtcatacgtcatcgaggataagaattag

SEQ ID NO: 200141 - DNA, 1713 bp, Artificial Sequence
  derived and/or modified sequence
atgagccggctggaggccaagaagcccagcctgtgcaagagcgagccactcacaacggagagggtgcgcaccaccctgtcggtgttgaagcggatcgttaccagttgttacgggcctagcggccgcctgaagcaactgcacaacggttttggaggttacgtttgcaccacatcacagagctcggccttactgtcacatttactagtcactcatccgattctaaagattcttactgcttccatccagaaccatgtatctagcttcagcgactgcggcctgtttactgccattctgtgttgtaatttgattgaaaatgtacaacggcttggcctcacacccactaccgtgattcgattgaataaacacctcctctcgctgtgcatttcatatttaaagtccgagacctgcgggtgtaggatacccgtggatttttcttcgacccaaatactgctgtgcctcgtcaggtctatccttacctcgaaacccgcctgtatgttgactagaaaagaaacggagcacgtgtctgccctgatcctccgtgcatttctactgacaattcctgaaaatgctgaggggcatatcattttaggcaagagcctgatagtaccattgaaaggacagcgtgtcatcgactcaactgtactgccaggaatacttatcgagatgagcgaagtgcagttaatgcggcttctgcccattaaaaaatccactgctcttaaggtggctctgttttgcaccacactgtccggtgacacaagcgacaccggggagggaactgtggtggtgtcgtacggcgtgagtctggagaacgccgtcctcgaccagctgttaaacctgggcaggcagctgataagcgaccatgtggatctggtcttatgtcagaaagtgattcatcccagcctgaaacagttcctgaacatgcatcggatcatcgctattgatagaatcggtgtcacactgatggagcctcttaccaagatgaccgggactcaacccattggcagcttggggtccatctgtcctaactcctatgggtctgtcaaagatgtgtgtaccgccaaattcggctcgaagcacttttttcacctgattcccaacgaagcgacaatttgtagtctcctgctatgcaaccgaaacgatactgcctgggacgagctgaagctcacttgtcaaaccgcgctccacgtgctccagttgactttgaaggagccatgggcactcttgggcgggggttgcacggagacgcacttagccgcttatatcagacacaaaactcacaatgaccctgagagcatcctcaaggatgatgagtgcacacagaccgagctgcaactgattgctgaggcgttttgttctgctctcgaatctgttgttggctctctggagcacgacggcggcgaaattcttactgatatgaagtacggccacttgtggagtgttcaggcagacagcccctgtgtagcaaattggcctgatctgctgagccagtgcggctgtggcctgtataatagccaggaggagctgaattggtcatttcttcgatccaccaggcgaccgttcgtgccacaaagctgtctgcctcacgaggccgtcggctccgcttccaacctcacattggattgtctgacagccaagctcagcggcctgcaagtcgcggtagaaaccgcgaacttaattctcgacctctcatatgtgattgaagacaagaactag

SEQ ID NO: 200142 - DNA, 1713 bp, Artificial Sequence
  derived and/or modified sequence
atgagccgattggaagctaagaagccaagtctctgtaaaagcgagccactgacaacagagcgggttcgcaccactctgagcgttctaaaacgcatcgttacctcatgctacgggccatctggacgattgaaacagctgcacaatggcttcgggggatacgtgtgcactacctctcagagttctgccttgctcagtcacctgctcgtgacccatcctattttgaaaatcctgacagcctccatccagaatcatgtgtctagcttttctgactgcgggctgtttacagccattctttgctgtaacctgatcgagaatgtgcagagattgggtttgacgcctactaccgtgattcggctgaacaaacatctgttaagcctctgcattagttacctaaagagtgagacttgtgggtgtcgtatccctgtggatttttctagtacgcagatcctgctgtgcctagttcggagcatcttgacgtcgaaacccgcatgcatgttgaccagaaaggagacggaacacgtctctgccctcatactgagggcgttccttctcacaataccagagaatgcggagggccatatcatcctcggaaagtcactgatagttcctctgaagggacagagggtaatcgacagtaccgttttgcccggaattctcatcgagatgtccgaggttcagctcatgaggctcctacccatcaagaagtccaccgccctaaaggtggcccttttttgcactacccttagcggggacacatccgacactggagaagggacagttgttgtctcgtacggcgtctccctggagaacgcagttctggatcagcttcttaatctgggaagacagctgatctccgaccacgtcgatctggtcctctgtcagaaggtaatacatccctcactaaagcagtttttgaacatgcataggattatagccatagatcgcatcggggtgaccctgatggagcccctgaccaagatgacaggcactcagccaattggatcattgggttcgatttgtcccaattcctacggcagtgttaaggacgtgtgcaccgccaagttcgggtcgaagcattttttccaccttatcccaaacgaagctaccatctgcagtctacttctgtgcaaccgaaacgatacggcatgggatgaactaaagctgacatgtcagacggccctgcacgtcttgcaactgactttgaaggaaccgtgggccctgctgggcggagggtgcaccgaaacgcaccttgctgcgtatatcagacacaaaacacacaacgaccccgaatctattcttaaggacgacgagtgcactcaaaccgaactccagctgatcgccgaggcattttgtagtgcactcgaaagcgtggtcggcagtctggagcacgacggtggggagattctcacggacatgaagtatgggcacctctggtctgtgcaggctgattctccttgtgtcgctaactggcccgatttgctttctcagtgtggctgcggattgtacaactcacaagaagaactgaactggagcttcctgcgctccacacgcagaccatttgtgcctcaatcatgtctgccccatgaagctgttggctctgctagcaatctgacacttgactgcctgaccgccaaattgagtggcctgcaagtcgctgtggagacggccaatctgatcttggacctgtcttacgtgattgaggataaaaactag

SEQ ID NO: 200143 - DNA, 1713 bp, Artificial Sequence
  derived and/or modified sequence
atgagtcgtttggaagcgaaaaaaccaagcctgtgcaaaagcgagcctcttaccaccgaacgagtgagaacaacactgagcgtcctcaagcgcatcgtcacatcttgctatggcccatccggccgtttaaagcaactgcataatgggtttggtgggtacgtctgtactacgtcccagagttccgccctgctgagccacctgctggtcacacatcctattttgaaaattctgactgcctcaatccagaaccatgtgtcatccttcagcgattgtgggctctttacggcaattctttgttgtaacctgattgagaacgtccaacggctcggcctgacaccaaccaccgtgatccggcttaataagcaccttctgtccctgtgtatttcttatttgaaatccgagacctgtgggtgcagaataccagtggatttttcttccacccagatcctcctgtgcttagtccgaagtatactgacttctaaaccagcttgcatgctcacgaggaaagagaccgagcatgtctctgccctgattctcagagccttccttctgacaattcccgaaaatgccgaagggcatattattctcggcaaatcactgatcgtgccgctcaaaggacagagagttattgacagcactgtgctgccgggaatcttaattgagatgagcgaggttcaactgatgcgactgctacccattaaaaaatcaaccgcgctgaaggtggccctgttttgcacgaccctttccggtgatacttctgataccggcgaggggactgtcgtggtttcttatggggtgtccctggaaaatgctgtgctcgaccagttactcaatttaggtcgacaactcataagcgaccacgtggatcttgtactctgtcagaaagtgattcaccccagtctcaaacagttcctcaatatgcatcggattatcgcgattgatcgtattggcgtcaccctgatggaacctctcacaaagatgaccgggacccagccaatcggaagtctgggatcgatttgtccaaatagttacgggtctgttaaagacgtgtgtacagcaaagttcggttcaaaacacttcttccatctgatccccaatgaggcaacaatatgttcgctacttctgtgtaacaggaacgacacagcctgggatgaattgaagctgacctgtcaaacagctctgcacgtcttacagctaaccctgaaggagccctgggctctcctgggaggtgggtgcactgagacgcaccttgctgcttatatccgacacaagacccacaacgaccctgaatcaattctcaaagacgatgaatgtacccagaccgagcttcagctcattgcggaggctttctgtagcgccttagaatcagtcgtggggtcgcttgagcacgacggaggagaaatcctgacagacatgaaatacgggcatctgtggtccgttcaggccgactcaccatgtgtcgcgaattggcccgaccttctgtctcagtgcggatgtgggctttacaacagccaggaagagcttaattggagtttcctccgatcgacccggcgaccctttgtccctcaatcctgcctgccacacgaggcagtcggatccgcctctaatcttactcttgactgtcttaccgcaaagctgagcggactacaagtcgccgtagagacagctaacctgatcctggacttatcatacgtgatcgaggataaaaactag

SEQ ID NO: 200144 - DNA, 1713 bp, Artificial Sequence
  derived and/or modified sequence
atgagcagactggaggccaagaagcccagcctgtgcaagagcgagcccctgaccaccgagagagtgagaaccaccctgagcgtgctgaagagaatcgtgaccagctgctacggccccagcggcagactgaagcagctgcacaacggcttcggcggctacgtgtgcaccaccagccagagcagcgccctgctgagccacctgctggtgacccaccccatcctgaagatcctgaccgccagcatccagaaccacgtgagcagcttcagcgactgcggcctgttcaccgccatcctgtgctgcaacctgatcgagaacgtgcagagactgggcctgacccccaccaccgtgatcagactgaacaagcacctgctgagcctgtgcatcagctacctgaagagcgagacctgcggctgcagaatccccgtggacttcagcagcacccagatcctgctgtgcctggtgagaagcatcctgaccagcaagcccgcctgcatgctgaccagaaaggagaccgagcacgtgagcgccctgatcctgagagccttcctgctgaccatccccgagaacgccgagggccacatcatcctgggcaagagcctgatcgtgcccctgaagggccagagagtgatcgacagcaccgtgctgcccggcatcctgatcgagatgagcgaggtgcagctgatgagactgctgcccatcaagaagagcaccgccctgaaggtggccctgttctgcaccaccctgagcggcgacaccagcgacaccggcgagggcaccgtggtggtgagctacggcgtgagcctggagaacgccgtgctggaccagctgctgaacctgggcagacagctgatcagcgaccacgtggacctggtgctgtgccagaaggtgatccaccccagcctgaagcagttcctgaacatgcacagaatcatcgccatcgacagaatcggcgtgaccctgatggagcccctgaccaagatgaccggcacccagcccatcggcagcctgggcagcatctgccccaacagctacggcagcgtgaaggacgtgtgcaccgccaagttcggcagcaagcacttcttccacctgatccccaacgaggccaccatctgcagcctgctgctgtgcaacagaaacgacaccgcctgggacgagctgaagctgacctgccagaccgccctgcacgtgctgcagctgaccctgaaggagccctgggccctgctgggcggcggctgcaccgagacccacctggccgcctacatcagacacaagacccacaacgaccccgagagcatcctgaaggacgacgagtgcacccagaccgagctgcagctgatcgccgaggccttctgcagcgccctggagagcgtggtgggcagcctggagcacgacggcggcgagatcctgaccgacatgaagtacggccacctgtggagcgtgcaggccgacagcccctgcgtggccaactggcccgacctgctgagccagtgcggctgcggcctgtacaacagccaggaggagctgaactggagcttcctgagaagcaccagaagacccttcgtgccccagagctgcctgccccacgaggccgtgggcagcgccagcaacctgaccctggactgcctgaccgccaagctgagcggcctgcaggtggccgtggagaccgccaacctgatcctggacctgagctacgtgatcgaggacaagaactag

SEQ ID NO: 200145 - protein, 1286 aa, Artificial Sequence
  derived and/or modified sequence
MDLEAAKNGTAWRPTSAEGDFELGISSKQKRKKTKTVKMIGVLTLFRYSDWQDKLFMSLGTIMAIAHGSGLPLMMIVFGEMTDKFVDTAGNFSFPVNFSLSLLNPGKILEEEMTRYAYYYSGLGAGVLVAAYIQVSFWTLAAGRQIRKIRQKFFHAILRQEIGWFDINDTTELNTRLTDDISKISEGIGDKVGMFFQAVATFFAGFIVGFIRGWKLTLVIMAISPILGLSAAVWAKILSAFSDKELAAYAKAGAVAEEALGAIRTVIAFGGQNKELERYQKHLENAKEIGIKKAISANISMGIAFLLIYASYALAFWYGSTLVISKEYTIGNAMTVFFSILIGAFSVGQAAPCIDAFANARGAAYVIFDIIDNNPKIDSFSERGHKPDSIKGNLEFNDVHFSYPSRANVKILKGLNLKVQSGQTVALVGSSGCGKSTTVQLIQRLYDPDEGTINIDGQDIRNFNVNYLREIIGVVSQEPVLFSTTIAENICYGRGNVTMDEIKKAVKEANAYEFIMKLPQKFDTLVGERGAQLSGGQKQRIAIARALVRNPKILLLDEATSALDTESEAEVQAALDKAREGRTTIVIAHRLSTVRNADVIAGFEDGVIVEQGSHSELMKKEGVYFKLVNMQTSGSQIQSEEFELNDEKAATRMAPNGWKSRLFRHSTQKNLKNSQMCQKSLDVETDGLEANVPPVSFLKVLKLNKTEWPYFVVGTVCAIANGGLQPAFSVIFSEIIAIFGPGDDAVKQQKCNIFSLIFLFLGIISFFTFFLQGFTFGKAGEILTRRLRSMAFKAMLRQDMSWFDDHKNSTGALSTRLATDAAQVQGATGTRLALIAQNIANLGTGIIISFIYGWQLTLLLLAVVPIIAVSGIVEMKLLAGNAKRDKKELEAAGKIATEAIENIRTVVSLTQERKFESMYVEKLYGPYRNSVQKAHIYGITFSISQAFMYFSYAGCFRFGAYLIVNGHMRFRDVILVFSAIVFGAVALGHASSFAPDYAKAKLSAAHLFMLFERQPLIDSYSEEGLKPDKFEGNITFNEVVFNYPTRANVPVLQGLSLEVKKGQTLALVGSSGCGKSTVVQLLERFYDPLAGTVFVDFGFQLLDGQEAKKLNVQWLRAQLGIVSQEPILFDCSIAENIAYGDNSRVVSQDEIVSAAKAANIHPFIETLPHKYETRVGDKGTQLSGGQKQRIAIARALIRQPQILLLDEATSALDTESEKVVQEALDKAREGRTCIVIAHRLSTIQNADLIVVFQNGRVKEHGTHQQLLAQKGIYFSMVSVQAGTQNL

SEQ ID NO: 200146 - DNA, 3858 bp, Artificial Sequence
  derived and/or modified sequence
atggacctggaggccgccaagaacggcaccgcctggcgccccaccagcgccgagggcgacttcgagctgggcatcagcagcaagcagaagcgcaagaagaccaagaccgtgaagatgatcggcgtgctgaccctgttccgctacagcgactggcaggacaagctgttcatgagcctgggcaccatcatggccatcgcccacggcagcggcctgcccctgatgatgatcgtgttcggcgagatgaccgacaagttcgtggacaccgccggcaacttcagcttccccgtgaacttcagcctgagcctgctgaaccccggcaagatcctggaggaggagatgacccgctacgcctactactacagcggcctgggcgccggcgtgctggtggccgcctacatccaggtgagcttctggaccctggccgccggccgccagatccgcaagatccgccagaagttcttccacgccatcctgcgccaggagatcggctggttcgacatcaacgacaccaccgagctgaacacccgcctgaccgacgacatcagcaagatcagcgagggcatcggcgacaaggtgggcatgttcttccaggccgtggccaccttcttcgccggcttcatcgtgggcttcatccgcggctggaagctgaccctggtgatcatggccatcagccccatcctgggcctgagcgccgccgtgtgggccaagatcctgagcgccttcagcgacaaggagctggccgcctacgccaaggccggcgccgtggccgaggaggccctgggcgccatccgcaccgtgatcgccttcggcggccagaacaaggagctggagcgctaccagaagcacctggagaacgccaaggagatcggcatcaagaaggccatcagcgccaacatcagcatgggcatcgccttcctgctgatctacgccagctacgccctggccttctggtacggcagcaccctggtgatcagcaaggagtacaccatcggcaacgccatgaccgtgttcttcagcatcctgatcggcgccttcagcgtgggccaggccgccccctgcatcgacgccttcgccaacgcccgcggcgccgcctacgtgatcttcgacatcatcgacaacaaccccaagatcgacagcttcagcgagcgcggccacaagcccgacagcatcaagggcaacctggagttcaacgacgtgcacttcagctaccccagccgcgccaacgtgaagatcctgaagggcctgaacctgaaggtgcagagcggccagaccgtggccctggtgggcagcagcggctgcggcaagagcaccaccgtgcagctgatccagcgcctgtacgaccccgacgagggcaccatcaacatcgacggccaggacatccgcaacttcaacgtgaactacctgcgcgagatcatcggcgtggtgagccaggagcccgtgctgttcagcaccaccatcgccgagaacatctgctacggccgcggcaacgtgaccatggacgagatcaagaaggccgtgaaggaggccaacgcctacgagttcatcatgaagctgccccagaagttcgacaccctggtgggcgagcgcggcgcccagctgagcggcggccagaagcagcgcatcgccatcgcccgcgccctggtgcgcaaccccaagatcctgctgctggacgaggccaccagcgccctggacaccgagagcgaggccgaggtgcaggccgccctggacaaggcccgcgagggccgcaccaccatcgtgatcgcccaccgcctgagcaccgtgcgcaacgccgacgtgatcgccggcttcgaggacggcgtgatcgtggagcagggcagccacagcgagctgatgaagaaggagggcgtgtacttcaagctggtgaacatgcagaccagcggcagccagatccagagcgaggagttcgagctgaacgacgagaaggccgccacccgcatggcccccaacggctggaagagccgcctgttccgccacagcacccagaagaacctgaagaacagccagatgtgccagaagagcctggacgtggagaccgacggcctggaggccaacgtgccccccgtgagcttcctgaaggtgctgaagctgaacaagaccgagtggccctacttcgtggtgggcaccgtgtgcgccatcgccaacggcggcctgcagcccgccttcagcgtgatcttcagcgagatcatcgccatcttcggccccggcgacgacgccgtgaagcagcagaagtgcaacatcttcagcctgatcttcctgttcctgggcatcatcagcttcttcaccttcttcctgcagggcttcaccttcggcaaggccggcgagatcctgacccgccgcctgcgcagcatggccttcaaggccatgctgcgccaggacatgagctggttcgacgaccacaagaacagcaccggcgccctgagcacccgcctggccaccgacgccgcccaggtgcagggcgccaccggcacccgcctggccctgatcgcccagaacatcgccaacctgggcaccggcatcatcatcagcttcatctacggctggcagctgaccctgctgctgctggccgtggtgcccatcatcgccgtgagcggcatcgtggagatgaagctgctggccggcaacgccaagcgcgacaagaaggagctggaggccgccggcaagatcgccaccgaggccatcgagaacatccgcaccgtggtgagcctgacccaggagcgcaagttcgagagcatgtacgtggagaagctgtacggcccctaccgcaacagcgtgcagaaggcccacatctacggcatcaccttcagcatcagccaggccttcatgtacttcagctacgccggctgcttccgcttcggcgcctacctgatcgtgaacggccacatgcgcttccgcgacgtgatcctggtgttcagcgccatcgtgttcggcgccgtggccctgggccacgccagcagcttcgcccccgactacgccaaggccaagctgagcgccgcccacctgttcatgctgttcgagcgccagcccctgatcgacagctacagcgaggagggcctgaagcccgacaagttcgagggcaacatcaccttcaacgaggtggtgttcaactaccccacccgcgccaacgtgcccgtgctgcagggcctgagcctggaggtgaagaagggccagaccctggccctggtgggcagcagcggctgcggcaagagcaccgtggtgcagctgctggagcgcttctacgaccccctggccggcaccgtgttcgtggacttcggcttccagctgctggacggccaggaggccaagaagctgaacgtgcagtggctgcgcgcccagctgggcatcgtgagccaggagcccatcctgttcgactgcagcatcgccgagaacatcgcctacggcgacaacagccgcgtggtgagccaggacgagatcgtgagcgccgccaaggccgccaacatccaccccttcatcgagaccctgccccacaagtacgagacccgcgtgggcgacaagggcacccagctgagcggcggccagaagcagcgcatcgccatcgcccgcgccctgatccgccagccccagatcctgctgctggacgaggccaccagcgccctggacaccgagagcgagaaggtggtgcaggaggccctggacaaggcccgcgagggccgcacctgcatcgtgatcgcccaccgcctgagcaccatccagaacgccgacctgatcgtggtgttccagaacggccgcgtgaaggagcacggcacccaccagcagctgctggcccagaagggcatctacttcagcatggtgagcgtgcaggccggcacccagaacctg

SEQ ID NO: 200147 - DNA, 3861 bp, Artificial Sequence
  derived and/or modified sequence
atggacctggaggccgccaagaacggcaccgcctggagacccaccagcgccgagggcgacttcgagctgggcatcagcagcaagcagaagagaaagaagaccaagaccgtgaagatgatcggcgtgctgaccctgttcagatacagcgactggcaggacaagctgttcatgagcctgggcaccatcatggccatcgcccacggcagcggcctgcccctgatgatgatcgtgttcggcgagatgaccgacaagttcgtggacaccgccggcaacttcagcttccccgtgaacttcagcctgagcctgctgaaccccggcaagatcctggaggaggagatgaccagatacgcctactactacagcggcctgggcgccggcgtgctggtggccgcctacatccaggtgagcttctggaccctggccgccggcagacagatcagaaagatcagacagaagttcttccacgccatcctgagacaggagatcggctggttcgacatcaacgacaccaccgagctgaacaccagactgaccgacgacatcagcaagatcagcgagggcatcggcgacaaggtgggcatgttcttccaggccgtggccaccttcttcgccggcttcatcgtgggcttcatcagaggctggaagctgaccctggtgatcatggccatcagccccatcctgggcctgagcgccgccgtgtgggccaagatcctgagcgccttcagcgacaaggagctggccgcctacgccaaggccggcgccgtggccgaggaggccctgggcgccatcagaaccgtgatcgccttcggcggccagaacaaggagctggagagataccagaagcacctggagaacgccaaggagatcggcatcaagaaggccatcagcgccaacatcagcatgggcatcgccttcctgctgatctacgccagctacgccctggccttctggtacggcagcaccctggtgatcagcaaggagtacaccatcggcaacgccatgaccgtgttcttcagcatcctgatcggcgccttcagcgtgggccaggccgccccctgcatcgacgccttcgccaacgccagaggcgccgcctacgtgatcttcgacatcatcgacaacaaccccaagatcgacagcttcagcgagagaggccacaagcccgacagcatcaagggcaacctggagttcaacgacgtgcacttcagctaccccagcagagccaacgtgaagatcctgaagggcctgaacctgaaggtgcagagcggccagaccgtggccctggtgggcagcagcggctgcggcaagagcaccaccgtgcagctgatccagagactgtacgaccccgacgagggcaccatcaacatcgacggccaggacatcagaaacttcaacgtgaactacctgagagagatcatcggcgtggtgagccaggagcccgtgctgttcagcaccaccatcgccgagaacatctgctacggcagaggcaacgtgaccatggacgagatcaagaaggccgtgaaggaggccaacgcctacgagttcatcatgaagctgccccagaagttcgacaccctggtgggcgagagaggcgcccagctgagcggcggccagaagcagagaatcgccatcgccagagccctggtgagaaaccccaagatcctgctgctggacgaggccaccagcgccctggacaccgagagcgaggccgaggtgcaggccgccctggacaaggccagagagggcagaaccaccatcgtgatcgcccacagactgagcaccgtgagaaacgccgacgtgatcgccggcttcgaggacggcgtgatcgtggagcagggcagccacagcgagctgatgaagaaggagggcgtgtacttcaagctggtgaacatgcagaccagcggcagccagatccagagcgaggagttcgagctgaacgacgagaaggccgccaccagaatggcccccaacggctggaagagcagactgttcagacacagcacccagaagaacctgaagaacagccagatgtgccagaagagcctggacgtggagaccgacggcctggaggccaacgtgccccccgtgagcttcctgaaggtgctgaagctgaacaagaccgagtggccctacttcgtggtgggcaccgtgtgcgccatcgccaacggcggcctgcagcccgccttcagcgtgatcttcagcgagatcatcgccatcttcggccccggcgacgacgccgtgaagcagcagaagtgcaacatcttcagcctgatcttcctgttcctgggcatcatcagcttcttcaccttcttcctgcagggcttcaccttcggcaaggccggcgagatcctgaccagaagactgagaagcatggccttcaaggccatgctgagacaggacatgagctggttcgacgaccacaagaacagcaccggcgccctgagcaccagactggccaccgacgccgcccaggtgcagggcgccaccggcaccagactggccctgatcgcccagaacatcgccaacctgggcaccggcatcatcatcagcttcatctacggctggcagctgaccctgctgctgctggccgtggtgcccatcatcgccgtgagcggcatcgtggagatgaagctgctggccggcaacgccaagagagacaagaaggagctggaggccgccggcaagatcgccaccgaggccatcgagaacatcagaaccgtggtgagcctgacccaggagagaaagttcgagagcatgtacgtggagaagctgtacggcccctacagaaacagcgtgcagaaggcccacatctacggcatcaccttcagcatcagccaggccttcatgtacttcagctacgccggctgcttcagattcggcgcctacctgatcgtgaacggccacatgagattcagagacgtgatcctggtgttcagcgccatcgtgttcggcgccgtggccctgggccacgccagcagcttcgcccccgactacgccaaggccaagctgagcgccgcccacctgttcatgctgttcgagagacagcccctgatcgacagctacagcgaggagggcctgaagcccgacaagttcgagggcaacatcaccttcaacgaggtggtgttcaactaccccaccagagccaacgtgcccgtgctgcagggcctgagcctggaggtgaagaagggccagaccctggccctggtgggcagcagcggctgcggcaagagcaccgtggtgcagctgctggagagattctacgaccccctggccggcaccgtgttcgtggacttcggcttccagctgctggacggccaggaggccaagaagctgaacgtgcagtggctgagagcccagctgggcatcgtgagccaggagcccatcctgttcgactgcagcatcgccgagaacatcgcctacggcgacaacagcagagtggtgagccaggacgagatcgtgagcgccgccaaggccgccaacatccaccccttcatcgagaccctgccccacaagtacgagaccagagtgggcgacaagggcacccagctgagcggcggccagaagcagagaatcgccatcgccagagccctgatcagacagccccagatcctgctgctggacgaggccaccagcgccctggacaccgagagcgagaaggtggtgcaggaggccctggacaaggccagagagggcagaacctgcatcgtgatcgcccacagactgagcaccatccagaacgccgacctgatcgtggtgttccagaacggcagagtgaaggagcacggcacccaccagcagctgctggcccagaagggcatctacttcagcatggtgagcgtgcaggccggcacccagaacctgtag

SEQ ID NO: 200148 - DNA, 3861 bp, Artificial Sequence
  derived and/or modified sequence
atggacttggaagcggccaagaatggcaccgcttggcgacccaccagtgccgaaggtgatttcgagttgggaatctcatccaaacagaagaggaaaaaaaccaaaactgtcaagatgataggagtactgactctgtttcggtatagcgactggcaggacaagttattcatgtctctcgggaccatcatggccatagcccacggaagtggccttccactgatgatgatagtgttcggagagatgacagataagtttgtggatactgcagggaacttctcctttcctgtgaatttttcgctcagtctcttgaaccctggaaaaatcctggaggaggaaatgaccaggtacgcatattactacagcggactgggcgccggcgtgctcgtggcggcctatatccaagtctcattctggactttagcggcaggccggcagattcggaagatacgccagaagttcttccacgccattctcagacaggagatcgggtggtttgacattaacgataccactgagcttaataccaggcttactgacgacatcagcaagatttctgagggcatcggggacaaggtggggatgttcttccaggccgtggcgactttcttcgctggctttatcgtggggtttattaggggctggaaactcaccttagtgattatggccatctctccaatcctgggtctttcggccgctgtgtgggcgaagatcttgtcagctttttctgataaggagctggccgcttatgccaaggccggtgctgtggccgaagaggcccttggtgcgatccgtaccgtgattgcgtttggcggacagaacaaggagcttgagagataccaaaaacacctggagaatgcaaaagagattggtatcaaaaaggcaatctcggcaaatattagcatgggaatcgcattcttactgatctacgcgtcctacgcactcgccttctggtatgggagtacactggtcatttccaaggagtacacaattggtaatgctatgaccgtctttttctctatactcattggggccttctccgtcggccaggccgcaccatgcattgacgctttcgccaacgccaggggtgcggcttacgtaatttttgatatcatcgacaataaccctaaaattgattcattttccgagcgcggacataaaccggatagcattaaaggaaatctcgagtttaatgatgttcatttctcgtatccctcacgtgcaaatgtgaagattctcaaggggctgaatctcaaagtgcagtctgggcaaaccgtagctcttgtgggttccagtggctgcggaaaatcaaccaccgtccaactcatccagcgcctgtatgatcctgatgagggaacaattaacattgatggccaggacataaggaacttcaacgtgaactatctaagggagattatcggggtcgtttcccaggagcccgtccttttttcaacaaccattgccgaaaatatctgttacggtagggggaacgtgaccatggatgagatcaagaaggccgtcaaggaagcgaacgcttacgagttcatcatgaaactgcctcagaagtttgataccctggtgggagaaaggggcgcccaattgtcaggaggacagaagcaacgcattgctattgcacgcgctctcgtacgaaaccccaagatcttgctcttggacgaagccacctcagccctggacaccgagagcgaggccgaggttcaggcagccctggacaaagccagggagggccggaccacaatcgtgattgcccaccggctgagcaccgtccggaacgcggacgtgatcgccggcttcgaggatggcgtgattgtggagcaagggtctcattcggagctaatgaagaaggagggagtgtatttcaagctggtgaatatgcagacctccgggagtcagatccaaagcgaagagttcgaactgaatgacgaaaaggccgccacacgaatggcccctaatggctggaaaagccggttatttaggcattctacacaaaaaaatttgaaaaactcccaaatgtgccagaagagtctggacgtagagactgacgggcttgaggccaacgtgccaccggtgtccttcctgaaagtcctcaagcttaataaaactgaatggccatactttgtggtcgggaccgtgtgcgcaattgctaatggcggtctgcagcccgctttttccgtcatcttttctgaaattatagccatctttggccctggcgacgacgcagttaagcaacagaagtgcaacatcttttcactgatttttctttttctgggaataatttccttctttaccttctttcttcaaggatttacatttggtaaggcaggcgagatcctgacaaggagattgcgctccatggcttttaaggctatgctgcggcaagacatgtcctggttcgacgaccacaaaaactctaccggagcccttagcacccgattggccactgacgccgctcaggttcagggtgctacggggactagattggccctgattgctcagaatatagccaatttagggactggaattatcatttcttttatctacggctggcagctgacgcttctgttactcgcggttgtgcccatcatcgccgttagcggaatcgttgaaatgaaactgctcgccggcaatgcaaaacgcgataagaaggagctggaggcagccggaaaaattgcaacagaggccatagaaaatatccggaccgtggtgtccttaacccaagagcggaagttcgagagcatgtatgtggagaagctgtacggaccatataggaattccgttcagaaggctcacatctatggtataactttttctatctcacaggcatttatgtatttcagctacgctgggtgttttcggttcggggcctaccttattgtgaatggtcatatgcgctttagagatgttatattagttttctcagctattgtttttggtgccgtggctcttggacatgcctcctcctttgctccggattacgctaaggccaagctctccgccgcacacctgttcatgttgttcgagagacagcccctgatagattcttacagtgaggagggtctgaaacccgacaagtttgaaggcaacattacatttaatgaagtggtcttcaattatcctacacgggccaatgttccagtcttgcaaggactttccctcgaagttaaaaagggccagactttagccctcgtaggcagctccggctgtggaaagtcaacagtggtgcagctgctcgaacgtttttatgacccactggctggcactgttttcgtcgattttggtttccagctcctggacggacaggaggccaaaaagctgaatgtccagtggcttagggctcagttgggaatcgtttcccaggagccaattctatttgattgcagcatcgcagagaacatagcctatggggataatagtagagtcgtctcacaggacgagatcgtgtctgctgcgaaggcggccaacatacaccctttcatcgaaactcttccccataaatatgagacacgagttggagacaaaggaacccagttgtcagggggccagaaacagcggatagctattgcccgtgctttgatcaggcagccgcaaattttgctgcttgacgaagcaacttcagcacttgacaccgaaagcgaaaaagttgtacaggaggctctcgacaaggcaagggagggccgtacctgcattgtgatcgcacaccgcctgagcacaattcagaatgcagatctgatcgtcgttttccaaaatggaagagtaaaggaacacggaacacaccagcagctgttggctcaaaaggggatttatttttctatggtatctgttcaggctggcacccagaatctatag

SEQ ID NO: 200149 - DNA, 3861 bp, Artificial Sequence
  derived and/or modified sequence
atggacctggaggccgccaagaatggaacagcctggaggcccaccagcgctgagggggactttgagctgggcatcagcagcaagcagaagaggaagaagaccaagacagtgaagatgattggagtgctgaccctcttccgctacagcgactggcaggacaagctgttcatgagcctgggcaccatcatggccatcgcccacggcagcggcctgcccctgatgatgattgtgtttggagagatgacagacaagtttgtggacacagctggcaacttctccttccctgtgaacttcagcctgagcctgctgaaccctgggaagatcctggaggaggagatgaccaggtatgcctactactacagcggcctgggcgccggcgtgctggtggccgcctacatccaggtgtccttctggaccctggccgccggccggcagatcaggaagatccggcagaagttcttccacgccatcctgcggcaggagatcggctggtttgacatcaatgacaccacagagctgaacacccggctgacagatgacatcagcaagatcagcgagggcatcggggacaaggtgggcatgttcttccaggccgtggccaccttctttgctggcttcatcgtgggcttcatccggggctggaagctgaccctggtgatcatggccatcagccccatcctgggcctgtctgctgctgtgtgggccaagatcctgagcgccttcagtgacaaggagctggccgcctatgccaaggccggggctgtggccgaggaggccctgggcgccatcagaacagtgattgcctttggaggccagaacaaggagctggagcgctaccagaagcacctggagaatgccaaggagatcggcatcaagaaggccatcagcgccaacatctccatgggcatcgccttcctgctgatctatgccagctatgccctggccttctggtacggcagcaccctggtgatcagcaaggagtacaccatcggaaatgccatgacagtgttcttcagcatcctgattggagccttctctgtgggccaggccgccccctgcattgatgcctttgccaatgcccggggagctgcctacgtgatctttgacatcatcgacaacaaccccaagattgacagcttcagcgagcggggccacaagccagacagcatcaagggcaacctggagttcaatgatgtgcacttctcctaccccagccgggccaacgtgaagatcctgaagggcctgaacctgaaggtgcagagcggccagacagtggccctggtgggcagcagcggctgcggcaagagcaccaccgtgcagctgatccagaggctgtatgaccctgatgagggcaccatcaacattgatggccaggacatccggaacttcaacgtgaactacctgcgggagatcatcggcgtggtgtcccaggagcctgtgctcttcagcaccaccatcgccgagaacatctgctacggcagaggaaatgtgaccatggatgagatcaagaaggctgtgaaggaggccaatgcctatgagttcatcatgaagctgccccagaagtttgacaccctggtgggggagcggggggcccagctgagcggcggccagaagcagagaattgccatcgcccgggccctggtgaggaaccccaagatcctgctgctggatgaggccaccagcgccctggacacagaaagtgaagctgaggtgcaggccgccctggacaaggcccgggagggccgcaccaccatcgtgattgcccaccggctgagcacagtgagaaatgctgatgtgattgctggctttgaagatggagtcatcgtggagcagggcagccacagcgagctgatgaagaaggagggcgtgtacttcaagctggtgaacatgcagaccagcggcagccagatccagagcgaggagtttgagctgaatgatgagaaggccgccaccaggatggcccccaacggctggaagagccgcctcttccgccacagcacccagaagaacctgaagaacagccagatgtgccagaagagcctggatgtggagacagatggcctggaggccaacgtgccccctgtgtccttcctgaaggtgctgaagctgaacaagacagagtggccctactttgtggtgggcaccgtgtgtgccatcgccaatggaggcctgcagcctgccttcagcgtcatcttcagcgagatcatcgccatctttggacctggagatgatgctgtgaagcagcagaagtgcaacatcttcagcctcatcttcctgttcctgggcatcatctccttcttcaccttcttcctgcagggcttcaccttcggcaaggccggggagatcctgacccggcggctgcgctccatggccttcaaggccatgctgcggcaggacatgtcctggtttgatgaccacaagaacagcactggagccctgagcacccggctggccacagatgctgcccaggtgcagggcgccaccggcacccggctggccctgattgcccagaacatcgccaacctgggcaccggcatcatcatctccttcatctacggctggcagctgaccctgctgctgctggccgtggtgcccatcatcgctgtgtctggcatcgtggagatgaagctgctggccggaaatgccaagagggacaagaaggagctggaggccgccggcaagatcgccacagaggccatcgagaacatcagaacagtggtgtccctgacccaggagaggaagtttgagagcatgtatgtggagaagctgtatggcccctacagaaacagcgtgcagaaggcccacatctacggcatcaccttcagcatcagccaggccttcatgtacttctcctatgccggctgcttccgctttggagcctacctgattgtgaatggccacatgaggttcagagatgtgatcctggtgttcagcgccatcgtgtttggagctgtggccctgggccacgccagcagctttgccccagactatgccaaggccaagctgtctgctgcccacctgttcatgctgtttgagcggcagcccctgattgacagctacagcgaggagggcctgaagccagacaagtttgagggcaacatcaccttcaatgaggtggtgttcaactaccccacccgggccaacgtgcctgtgctgcagggcctgagcctggaggtgaagaagggccagaccctggccctggtgggcagcagcggctgcggcaagagcacagtggtgcagctgctggagcgcttctatgaccccctggccggcaccgtgtttgtggactttggcttccagctgctggatggccaggaggccaagaagctgaatgtgcagtggctgcgggcccagctgggcatcgtgtcccaggagcccatcctgtttgactgcagcattgctgaaaatattgcctatggagacaacagccgggtggtgtcccaggatgaaattgtgtctgctgccaaggccgccaacatccaccccttcatcgagaccctgccccacaagtatgagaccagggtgggggacaagggcacccagctgagcggcggccagaagcagagaattgccatcgcccgggccctgatccggcagccccagatcctgctgctggatgaggccaccagcgccctggacacagagagcgagaaggtggtgcaggaggccctggacaaggcccgggagggccgcacctgcatcgtcatcgcccaccggctgagcaccatccagaatgctgacctgattgtggtgttccagaatggccgggtgaaggagcacggcacccaccagcagctgctggcccagaagggcatctacttctccatggtgtctgtgcaggccggcacccagaacctgtag

SEQ ID NO: 200150 - DNA, 3861 bp, Artificial Sequence
  derived and/or modified sequence
atggacctggaggccgccaagaacggcaccgcctggcggcccacctctgccgagggagactttgagctcggcatttctagcaagcagaagcggaaaaaaacaaaaacagttaagatgatcggcgttttaacactgttccgatacagcgactggcaggataagctgttcatgagccttggaacgatcatggccatcgcacatggctctggcttacctctaatgatgattgtgttcggagaaatgacagataaatttgtggacacagctggtaacttctcatttcctgtcaattttagcctctccctgctgaacccaggaaagatccttgaagaggagatgacccgctacgcctactactattcgggcctcggggccggcgtgcttgtggccgcctacattcaggtctcattctggactcttgcagccggtcgacaaataagaaaaatccgccagaagttcttccatgccattcttcgccaggaaattggttggtttgacataaacgataccaccgagctgaacacccgcctgacagacgatatttccaagatttccgaaggcattggagacaaggtaggaatgttctttcaggctgtagctaccttttttgcaggtttcatcgtgggtttcatccgcgggtggaaactgaccctcgtcatcatggccataagtccgattctcggactttccgctgccgtgtgggcgaaaatcctgtctgccttttctgataaagaattagccgcttatgctaaagccggcgctgttgctgaggaagccctgggcgcaatcaggacggtcatagccttcggtggtcagaataaggagcttgaaaggtatcagaagcatctggaaaatgctaaggaaatcggcattaaaaaggcaattagcgcgaacatctctatgggcatagcttttcttctcatctacgctagctacgcgctggccttttggtatggcagtactcttgtcatcagtaaggagtacaccatcggaaacgccatgaccgtgttcttctctatcctgattggagcattctccgtagggcaggcagcgccctgcatcgacgcattcgccaacgctagaggagccgcttatgtaatcttcgacatcatcgataacaatcccaaaatagactctttttctgagagaggccacaagcctgactcgatcaagggaaatctggagtttaacgacgtccacttctcttaccccagtcgcgcgaacgtgaagatcctgaagggcctgaatctgaaggtgcaatccggtcagactgtggcactagtcgggtcttcaggatgcggcaagtcgaccacagtgcagctcatccagaggctgtacgacccggacgaggggacaatcaatattgatggccaggatatccggaacttcaatgtcaactacctgcgcgaaatcattggcgtggtgtctcaagagcccgtgctcttttccacaacaatcgcagaaaatatttgttatggcaggggtaacgtgacaatggatgagattaagaaagccgtaaaggaggccaatgcctacgagttcattatgaagttgccgcagaagttcgatacactcgtgggtgagaggggcgcccagcttagcggtggacagaaacaaaggattgctattgctagggccctcgtgaggaaccctaagattcttctgctggatgaagccacctccgccctcgacacagagtccgaagctgaagtccaggcagccctcgacaaggctcgcgaaggcagaaccaccatagtgatcgcccatcgcctgagcacagtgagaaatgcagacgtgatcgctggcttcgaggatggtgttatcgttgaacaaggtagccacagtgaactcatgaaaaaagagggggtatactttaagctggtgaacatgcagacgtccggttcacagatccagtcagaagagttcgagctcaatgatgagaaggccgctaccaggatggctccaaacgggtggaagagccgactttttcggcatagcacgcagaaaaacctgaaaaattctcagatgtgtcagaaatcactggacgtagagacggacggcctcgaggcaaatgtgccccccgtttcttttctgaaagttctgaaactgaacaagacagaatggccctatttcgtggtcggtacggtctgcgctatagcgaatggcgggctccaaccagctttctccgtgatcttctctgaaataattgccatctttgggcccggagatgacgcagtaaagcagcagaagtgcaatatcttctcgctgatctttcttttcctgggtattatctcattcttcacattcttcctgcagggatttacatttggcaaagctggggagattttgacacgacgattgagatctatggcctttaaagctatgctgcggcaggacatgagttggtttgacgaccacaaaaattccactggcgctctgagcacccggctagcaaccgatgcagctcaggtccaaggcgctactggcactcggctcgcgttgatcgcccagaacattgctaatctggggaccggaataattatttcctttatctacggatggcagctcactctgttgctgctggctgtggtgcccataatcgcagtttcgggtatagtcgagatgaagctgctggctgggaacgccaagagggacaagaaagaactggaggcagccggcaagattgccaccgaggccatcgagaatatcagaactgtggtaagcctgacacaggagagaaagttcgagtccatgtatgtggagaagctctacggcccatatcggaattcagtccaaaaggctcacatctacgggatcacattcagtatttcacaggctttcatgtacttcagttacgccggctgctttaggttcggcgcttacctcatcgttaacggtcacatgagattcagagacgtgatactggttttcagcgccattgttttcggagccgtggccttgggtcacgcatcttcctttgcccccgattatgcaaaagcaaagctcagtgccgctcacctgtttatgctcttcgagcggcagccactgatcgatagttactcggaggagggtttgaaacccgacaaattcgaaggcaacatcacatttaacgaggtcgttttcaattatcctacccgggcgaatgtgccagttctacaggggctctccctggaagtgaaaaaaggccaaacccttgcactcgtcggaagttctggctgtggcaagtccacagtggtgcaactgttagagcggttttacgatccactggcgggaacagtctttgtggactttggtttccagcttctagacgggcaagaggctaagaagttgaatgttcagtggctaagagctcagctgggcatcgtgagtcaggagcctatactgttcgattgctccatcgctgagaatatcgcttacggtgacaacagtcgcgtggtatctcaagacgaaatagtcagtgcagcaaaggctgctaacatccaccccttcatcgaaaccctgccccacaaatacgagacaagggttggagataaagggacccagctgtctggcggacagaaacagcggatcgccatcgcgcgggcactcatccgacagcctcagatcctactgctggacgaggcgacctctgctctcgacaccgagtcagagaaggtggtgcaggaagcactggacaaggcccgcgaagggcgcacatgtattgtaattgctcacagactttctacaatccagaacgcagatctcatcgtggtttttcagaatgggcgagtgaaggaacacggcacccaccaacagctgctggctcagaaaggcatctacttctccatggtatccgttcaggccgggactcagaacctctag

SEQ ID NO: 200151 - DNA, 3861 bp, Artificial Sequence
  derived and/or modified sequence
atggaccttgaggccgcaaaaaatggaactgcatggcgcccaaccagtgctgagggagactttgagcttgggatcagctctaaacagaagcgtaaaaaaaccaaaaccgtgaagatgatcggggtgctgacactcttccggtattctgactggcaagacaaactttttatgtccctgggcaccataatggcaatcgcacacgggtccgggctgcctttgatgatgattgtgttcggagaaatgacggacaaattcgtcgacactgccggaaacttctcattcccggttaacttctccctgtctttgttaaacccaggtaagatacttgaagaagagatgacaaggtacgcttattactactcaggtctcggtgctggcgtgctggtcgcggcttatatccaagtgtcattttggaccttggcggcagggaggcaaatcagaaagattcgtcagaaattcttccacgccatcctgcggcaagagataggatggtttgatataaacgacaccactgaacttaatactcgactgacagatgacatctcaaaaatatccgagggcattggtgataaagtcggcatgttcttccaagctgtcgcgacattttttgctggttttatcgttggctttataagggggtggaaactaactctcgttatcatggcaatatctcctattctcggcctgagcgctgctgtgtgggcaaaaattttatctgcatttagcgataaagaacttgcagcgtacgccaaagccggtgcagtcgctgaggaagctctcggggcaattcggacagtgattgcatttgggggacagaataaggaactggagcgatatcagaaacatctggagaacgccaaagaaatcggaatcaagaaagcaataagcgccaacatcagcatgggtatcgcgtttctcttgatttacgccagttatgccctggccttttggtacggctctactctggtaatttcaaaggaatatacgatagggaacgccatgacggtttttttttccatcctgattggtgccttttctgtggggcaggcggctccatgtatcgacgcctttgctaatgctaggggagccgcatatgtgattttcgacatcatcgacaataacccaaaaattgactccttctcggagagaggtcataagccagacagcattaaggggaacttagagttcaacgatgtccacttctcataccctagcagagccaacgtcaaaatcttgaaaggcttgaacctgaaggtgcagagcgggcagaccgtggcactcgtgggctcatcagggtgcggcaaaagtacaacagtgcaattaatccagagactgtatgatcccgatgaaggaacaataaatatagatgggcaagacattcgtaatttcaacgtcaattatttgcgggagatcatcggcgttgtgtcccaagaaccggtgcttttcagcactaccattgcggagaatatttgttatggacgagggaacgtgaccatggacgagatcaagaaagccgtcaaggaggcaaacgcatacgagttcatcatgaagctaccccagaagttcgataccctggtgggagagcggggagcccagcttagcggagggcagaaacagaggattgcaatcgccagagcactcgtaaggaatcctaagatcctcctgttagatgaggccaccagcgctttggacactgaatccgaagctgaggtgcaggccgcattggataaggccagggaagggcgtacaacgatagtgattgcacaccgcctgtctaccgtccgcaatgccgatgtgatagccggattcgaggacggcgtgatcgtggaacaggggtcccacagtgagctgatgaaaaaggagggagtttattttaagctagtaaatatgcaaacgagtggctcccagattcagagcgaagagttcgaactgaacgacgagaaagccgcaaccagaatggctcccaacggctggaagtcccgtctattcaggcatagtacacaaaagaatctcaaaaacagccaaatgtgtcagaaatcccttgacgtggaaaccgatggcttagaggccaatgtcccccctgtctcatttttgaaggtgctgaagttaaataagactgagtggccctacttcgtggtcggcactgtgtgtgccattgcgaacgggggtcttcagcccgcatttagcgtgatcttttctgaaattatcgccatcttcggcccaggcgacgacgctgtgaagcagcagaagtgcaatatcttcagcttaattttcttgtttctaggcatcattagtttctttaccttcttcctgcagggcttcacctttgggaaagcgggagaaatcctcacccgcagactgaggagtatggccttcaaagcaatgcttaggcaggacatgtcttggtttgacgatcataaaaatagcacaggtgcgttgtctactcgcctcgcaacggatgccgctcaggtgcaaggggcaactggaactaggctggctttaatcgctcagaatattgctaacctggggacaggcattatcattagctttatctatggctggcagctgactctgttactcttggcggtggtgcccattattgccgtgagcgggatcgttgaaatgaagttgctcgctggcaatgccaagcgggacaagaaggaactcgaagccgcagggaagattgccacggaagcaattgaaaatatccgaacggttgtcagtttaactcaggagagaaagtttgaatctatgtacgtggagaagctctacggcccttataggaattccgttcagaaggcccacatttatggcatcacttttagtataagtcaagcctttatgtatttcagctacgctggatgttttcgctttggggcttacctaatcgtgaatggccatatgcgttttagggacgtcatcctagtgttcagcgctattgtgtttggcgcagttgcccttggacatgctagttcctttgctcccgactatgccaaggcaaagctatcggccgcacacctgttcatgctgttcgaacgccaacctcttattgatagctactcagaggagggactaaaaccagataagtttgaggggaacattacttttaacgaggttgtgtttaactatcctaccagggccaatgtgccggtactgcaaggcctcagcctcgaagtgaagaagggccaaacgctcgccttggtgggctcatcggggtgcgggaaatctaccgtggtgcaactcctcgagcggttttacgatcccttggcgggaacagtctttgtggacttcgggttccagctcctcgacggccaggaagcaaaaaaactgaatgtccagtggcttcgggctcagctcggtatagtgtcccaggaaccgatcttatttgattgtagtatcgccgagaatatcgcttatggcgataattccagagtggtgtctcaggatgaaatcgtctctgccgctaaagctgccaatatacaccctttcattgaaacactcccccataagtacgagactcgcgttggcgataagggcacacaactgtctgggggacagaagcaacgcatcgccattgcaagagcactgattcgccagcctcagatcctcctcttagacgaggctacgagcgccctagataccgagagtgaaaaagttgtccaggaggcacttgataaagccagagagggccgaacatgtatcgtcattgcccacaggctttcaacgatacagaatgctgatcttattgtggtgtttcagaatggaagggtgaaggagcacggtacccaccaacagctgctagcccagaaaggtatctatttctctatggtatccgtgcaggcagggacccagaacctctag

SEQ ID NO: 200152 - DNA, 3858 bp, Artificial Sequence
  derived and/or modified sequence
atggatttggaggccgctaagaacggaaccgcctggcgccctacttcagcggaaggagactttgagctgggcatctctagtaaacagaaaagaaagaaaaccaagaccgtcaagatgatcggtgtgctcactctgttcagatactcagactggcaggacaagttgttcatgtcgctgggcaccatcatggcgatcgcccacggatcaggactgccgctgatgatgatcgtctttggtgaaatgactgacaagtttgtggacactgccggcaatttctcgtttccggtgaacttctcgctgagcctgctgaatccgggaaaaatcctggaagaggaaatgaccagatacgcgtattactactccggactgggggcaggcgtgcttgtcgccgcctacatccaagtttcgttctggacgcttgcagctggtaggcaaattcggaagatccggcagaagttcttccacgccatcctccggcaagaaatcggatggttcgatatcaacgatactaccgagctgaacacccgccttaccgacgatatctccaaaatcagtgaggggatcggagataaggtgggcatgtttttccaggccgtcgccacctttttcgctggcttcattgtgggctttattcgggggtggaaactgacccttgtgatcatggcaatcagcccaatcctgggactgtccgccgcagtgtgggccaagatactctcggcttttagtgacaaagaattggccgcctacgctaaggcaggtgctgtggccgaggaagccctgggagccatcagaactgtgattgccttcgggggccagaacaaggaactggagcgataccaaaagcatctggaaaatgccaaggaaatcggaatcaagaaggcgatctcggccaacattagcatgggaattgcctttcttttgatttacgcctcctacgccctggcgttttggtacggcagcacgctcgtgatctccaaagaatacactatcggaaatgcaatgactgtgtttttctcaatactgatcggcgccttctccgtggggcaagcagcaccatgcattgacgcgttcgcaaacgcgcgcggagctgcctacgtcatttttgacatcattgataacaatcctaaaatcgactcgttctcagagcggggacacaagccggactcaatcaagggtaacctggagttcaatgacgtgcatttctcgtacccgagcagggccaacgttaagatccttaaggggctgaacctgaaggtgcagtcagggcagactgtggcactggtcggctcgagcggctgtggaaaatccactacggtccagctcattcagagactctatgacccggacgaaggaaccattaacatcgatggacaggacatccgcaatttcaatgtgaactacctgcgggagattataggcgtcgtgtcccaggaaccggtgctcttctcaaccaccattgccgagaacatatgctacggtcggggcaacgtcaccatggatgagatcaagaaagccgtcaaggaggcgaacgcttacgagtttatcatgaaactgccgcagaagtttgatactctggttggagaacggggtgcacaactctctggaggacagaaacaacgtatcgccatcgcacgcgcgctggtccggaatccgaagattctcctcctggacgaagcgacctccgctctcgataccgagtcagaagcggaggtccaagccgcgctggacaaggctagagaggggcgcactacgatcgtcatcgctcatcgtctctcgaccgtgcggaatgcagacgtgatcgccggattcgaggatggagtgatcgtcgaacagggatcgcactcggagctgatgaagaaagagggagtgtacttcaagttggtcaatatgcagacttcaggttcccaaattcagagcgaagaatttgaactgaatgatgaaaaggcggccacccgcatggcgcccaacgggtggaaatcacgactgttcaggcactcgacccagaaaaacctgaagaacagccagatgtgtcagaaatcgttggacgtggaaacggacgggctggaggcaaatgttccaccggtatccttcctgaaggtgctgaagctgaacaagactgaatggccttactttgtcgtcgggacggtgtgcgctatcgctaacggagggctgcagccagcgttcagcgtgatcttctccgaaatcatcgcgatcttcggccctggcgatgacgcggtgaagcaacaaaagtgcaacattttcagcctgatcttcctgttcttgggaatcatctcttttttcactttcttcctgcagggtttcaccttcggcaaggcgggagaaattctcacccgtcgccttaggtcgatggcgttcaaagctatgttgcggcaagacatgagttggttcgacgaccacaagaattccaccggcgccctgtccactcgcctggccacggatgctgcacaagtgcaaggcgccaccgggactcgcctcgcccttatcgcacagaacatcgccaatcttggaactggaatcatcatctccttcatatacggatggcaactgaccctcctccttctcgcagtggtccctatcatcgcagtgtctggaatcgtcgaaatgaaactgttggcgggaaacgctaagagagacaagaaagagctggaagccgctggcaagattgccaccgaagccatagagaatattcggaccgtggtgtcgctcacccaagagcgcaagttcgagtcgatgtacgtggaaaagctctacggaccctatcggaactccgtgcagaaagcccacatctacggaatcaccttctcaatctcgcaagccttcatgtacttttcttacgctggttgcttccgcttcggcgcctacttgatcgtgaacggtcatatgagatttcgagatgttatcctcgtgttttcggcgatcgtgttcggagccgttgcattgggccacgcgtcatcctttgccccagattacgccaaagcgaagctgtcggctgcgcatctgttcatgttgtttgagcgccaaccactcatcgacagctactccgaggaaggtctgaagccggacaagttcgaagggaacatcactttcaacgaagtggtgttcaactatcccactcgcgctaacgtgccggtgctgcaaggtctgtcacttgaggtcaaaaagggacaaacccttgccctcgtaggaagctcaggttgcgggaagagcaccgtagtgcagttgctcgagcgattctacgacccactcgcaggtacggtctttgtggacttcgggttccagctccttgatggccaagaagcaaaaaagctcaatgtccagtggctgcgcgcccagctcggaattgtttcccaggaaccaatcctcttcgactgctcgattgcggagaatatcgcctacggagataatagcagagtggtttcccaggatgagatcgtgagcgcagctaaggccgctaacatccacccattcatcgagactctgccccacaagtacgaaactcgggtcggggacaagggaacccagctgtcagggggacagaagcagcggattgcgatcgctagagcgctgatcaggcagccccagatcctgttgctcgatgaggcaacgtccgcgttggacactgaaagcgagaaggtggtccaggaagcgctcgacaaagcccgcgaaggacgtacttgtatcgtgatcgcgcacagactgtcaactatccaaaacgctgatcttatcgtcgtgttccaaaatggccgcgtcaaggaacatggaacccatcagcagcttctcgcacagaagggcatctacttctccatggtcagcgtgcaagccggtactcagaacctg

SEQ ID NO: 200153 - DNA, 3858 bp, Artificial Sequence
  derived and/or modified sequence
atggacctggaagcagcaaagaacggaaccgcatggcgccctacctcagccgaaggcgacttcgaactgggcatctctagcaaacagaaaaggaaaaagactaagactgtcaagatgatcggtgtgctgacgctcttccgatacagcgattggcaggacaaactgttcatgagcctcggtacgatcatggcgatcgcacacggctcaggactccctttgatgatgatcgtgttcggagaaatgactgataagttcgtggacacggcggggaacttttcattcccagtcaacttctcactgtccttgctgaatccgggaaagatcctggaagaagagatgacccgctacgcgtactactactccggattgggagcaggagtgttggttgctgcctacatccaagtctcgttctggaccctcgcagccggacgccagatccgcaagatccgccaaaagtttttccacgccattcttcggcaggagatcggatggttcgatatcaatgatactaccgaactgaatacccgcctgaccgatgacatctcgaagatctccgagggtattggggacaaagtgggcatgtttttccaagccgtggccacttttttcgccggctttattgtgggattcatccgcggttggaagctcacgctggtgatcatggccatctcgccgatcctggggctttcagcggctgtctgggcgaaaatccttagcgcgttctccgataaggaactggccgcctacgcaaaagcgggcgccgtcgcggaagaagcactcggcgccatcagaactgtgatcgccttcggaggacagaataaggagcttgaacgctaccagaaacacctcgaaaacgcaaaggaaatcggcatcaagaaggcgatcagtgcgaacatcagcatggggatcgcgtttcttctcatctacgctagctacgctttggccttttggtacggctccactttggtgatttcaaaggagtatactatcgggaatgctatgaccgtctttttctccatcttgattggggcgttctccgtgggccaggctgccccctgcatcgacgctttcgcgaacgcccggggcgctgcgtatgtgatttttgatatcatcgacaataatcccaagatcgactcgttttcagaacgggggcacaaaccagattcgattaagggcaacctggaattcaatgacgtccatttttcgtatccttcgcgcgccaacgtgaagatccttaagggccttaacctcaaggtccagtcaggccagaccgtggcgcttgtgggatcctcaggttgcggcaagtcgactaccgtgcaacttattcaacggctgtacgatccggatgagggtacgatcaacatcgatggccaggatattagaaactttaacgttaactacttgcgggagatcattggcgtggtgtcccaggaaccggtcttgttcagcaccactattgcagagaacatctgctacgggcggggaaacgtgaccatggacgagattaagaaggccgtgaaagaggccaatgcatacgaattcatcatgaagctccctcagaagttcgacaccctcgtcggggaaagaggagcccagctgtctggcggacaaaagcaacgcatcgccatcgcacgcgccctggtgcggaacccaaaaatcctgctcctggacgaagccacgagcgcgctggacaccgagagcgaagcagaggtgcaggctgcgctggacaaggcgcgggagggaagaacgactattgtgatcgctcacaggctgtcaactgtgcgcaacgccgacgtgattgctggcttcgaagatggtgtgatagttgaacaaggctctcattcagaactgatgaagaaggaaggagtttactttaaactcgtgaacatgcagacctcgggctcacagatccagtccgaggaattcgaactgaacgacgaaaaagcggcgacccggatggccccgaacggttggaagtcgagactgtttcggcactcaacccagaagaatctgaagaacagccaaatgtgccaaaagagcctcgacgtagaaaccgacggactggaagcaaatgtccctccggtgtccttcctgaaggttctgaaacttaacaagactgagtggccatactttgtggtgggtacggtgtgcgcgatcgccaacggcggactccagcctgccttcagcgttatcttttccgagattatcgccatctttggaccgggtgacgatgccgtcaaacagcaaaagtgcaacatcttctccctcattttcctgtttctgggtatcatcagcttcttcacttttttcctgcaaggattcacttttggaaaggccggggagatcctcacccggcggcttaggtccatggctttcaaagcaatgcttagacaggatatgtcatggttcgatgaccacaagaattccactggcgcgctgtccactagactggccaccgatgccgcacaagtgcaaggcgccaccggaactcggttggccctgatcgcccagaatatcgctaatctgggaactggcattatcatctcgttcatctacggatggcaactgaccctgctgctgctggcggttgtcccgatcatcgcggtcagcggcatcgtcgagatgaagctgcttgctgggaacgctaagcgggacaaaaaggaactggaggcggcaggcaagattgctaccgaagctattgaaaacatccgaactgtggtttccctgacccaggaacgtaagttcgagtccatgtacgtggagaagctctacggcccataccgcaactcagtccaaaaggcccatatctatggaattaccttcagcatcagccaggccttcatgtactttagctacgccggttgcttccggttcggagcctacttgattgtcaacggacacatgagattccgggatgtgatcctggtctttagcgctatcgtgttcggcgccgtggccctcggacatgcctcatcatttgcaccagactacgccaaagccaagctctcggctgcccacctgttcatgctgttcgaacggcagccgctcatcgatagctactcagaagaaggcctgaaaccggataagttcgagggaaacatcaccttcaacgaagtggtgttcaattacccgactcgggccaacgtgccggtgctccagggactttccctcgaagtgaagaagggacagaccctcgccctggtcggcagcagcggatgcggaaagtcgaccgtcgtgcaactccttgagagattctacgacccgctggcaggaactgtgtttgtggactttggattccagctcctggacggccaggaagcgaagaagctgaatgtgcagtggctgcgcgcacagcttgggatcgtgtcccaagaaccgatcctgttcgattgctccatcgcggagaacatcgcctacggcgataattcccgggtggtgtcgcaagatgagatcgtgtctgcagctaaggccgcgaacatccacccgttcatcgaaactctgccgcataagtatgaaactagggtgggcgacaaggggacccagctgtcagggggccagaagcagcggattgctatcgcacgggccctcatccgacaaccgcaaattcttctgctcgacgaagcgacttccgccctggataccgagtcggaaaaggtggtgcaggaggcgctggataaagcgagagagggtagaacctgcatcgtcatcgcccataggttgtcgactattcaaaatgcggatctcatcgtggttttccagaacggcagggtgaaggaacacggaactcaccagcagctcttggcgcaaaaaggcatctacttctcaatggtatctgtgcaggcaggaactcagaacctg

SEQ ID NO: 200154 - DNA, 3858 bp, Artificial Sequence
  derived and/or modified sequence
atggaccttgaggcagccaaaaatggaaccgcgtggcgtcccacctccgcagagggagacttcgaactgggaatttcctccaagcagaagcgcaagaaaaccaagacggtcaaaatgattggagtgctcaccctgtttagatacagcgattggcaagataaactgttcatgagcctcggcactatcatggcaattgcgcatggctcggggcttcctctgatgatgatcgtattcggcgaaatgactgataagttcgtggatactgcgggaaacttttcatttcccgtcaacttttccctctcccttctcaacccagggaaaattctggaagaagaaatgacgcgttacgcctactactacagcggactgggcgcgggcgtcctggtcgcagcatacattcaagtctcattttggactctcgccgcaggaaggcagattaggaaaatccggcagaagtttttccatgccatacttagacaagaaattggatggtttgatatcaatgacactactgagttgaatactcgcctgaccgacgacatttcaaagatctccgaaggtataggagataaagtcggaatgttcttccaagcagtggcgacgttttttgcaggcttcatcgtggggttcattcggggatggaaactgacccttgtcattatggcaatttcgcccattcttggactctcggccgccgtctgggcaaagattttgtccgcattttccgataaggaactggcagcctacgcaaaggccggagccgttgccgaagaagccctcggtgcgatccggaccgtcatcgcgtttggaggacaaaacaaggagctggagcgttaccagaaacacctggagaacgcaaaagaaattgggatcaaaaaagcaatatcggcaaatatcagcatggggatcgcctttcttctgatctatgcctcctacgcactggcattctggtacggttccaccctggtgatttccaaagagtacaccattggaaatgcaatgactgtgtttttcagtatcctcattggagcattttccgtgggacaagcagccccatgcatcgacgcgtttgcgaacgctagaggggcagcatacgtgatctttgacatcatcgacaacaatcccaaaattgattcctttagcgaacgggggcataagcccgacagcattaaggggaatttggaattcaacgatgtgcatttttcttacccaagcagggcgaacgtgaaaattctgaagggtctgaatctcaaggtgcagtcaggtcaaactgtggctctcgttggctcgtctggctgcggtaaatcgactactgtgcaactgatccaaagactctacgatcctgatgaaggaactataaacatcgacggtcaagatattagaaactttaatgtcaattaccttagggagattatcggagtggtgtctcaggagccagtgctgttttccaccactatagctgaaaacatttgctacggtcgtggcaacgtgactatggatgagatcaagaaagcagtgaaggaggcaaacgcgtacgaattcatcatgaaacttccacagaagttcgacactcttgtgggagagcggggagcccaactttcggggggacaaaagcagcggattgccatcgcaagggcacttgtcaggaatccaaagattcttcttcttgacgaagcaactagcgcgcttgataccgaatcggaagcagaggttcaagcagcacttgataaggcacgagagggacggaccaccattgtcatcgcccacagactttccactgtccgcaatgccgacgtgattgcagggtttgaagatggggtcatagtggagcaggggagccatagcgaactgatgaagaaggaaggtgtgtactttaaactcgtcaacatgcagaccagcgggagccagattcaaagcgaagaatttgaactgaacgatgagaaggccgcaaccaggatggcccctaatggatggaaatcgagacttttcagacattccacccaaaagaatcttaagaactcgcagatgtgccaaaaatctctggacgtcgaaactgacggcctcgaagcaaatgtccctccagtctcgttccttaaggtgcttaaactgaacaagaccgaatggccatacttcgtggtcgggaccgtgtgcgcaatcgctaatgggggcctgcaacctgcattctcagtgattttctcagagattatagcaatcttcggtccaggcgatgatgccgtcaagcagcaaaaatgtaacatctttagcctgatctttcttttcctgggcatcattagctttttcaccttttttctccaaggatttacttttggcaaggcgggagagatacttacccgccgccttcggtccatggcctttaaagccatgctgagacaggatatgtcgtggtttgatgatcataagaactcgacgggtgcactctcgactagactcgcaacggatgcagcccaagtgcagggcgccactggaactcggttggcccttatagcgcaaaacattgcgaacctgggaactggaattatcatttcgttcatatacggatggcagcttactctgctgctgcttgcagtcgtgcccattatcgcagtctcgggcattgtggagatgaaacttctggcgggcaacgcgaagcgagataagaaggaacttgaggcagctgggaagatcgcaaccgaagcaatagaaaacattcggactgtggtcagtctgacccaggaacgcaagtttgagtccatgtacgtcgaaaagttgtacggaccctacagaaactccgtccaaaaggcccatatctacggaataaccttttccatttcacaggcgtttatgtacttttcctacgcaggatgttttagatttggagcatacctgattgtcaacggtcatatgagatttagggatgttattctggtgttttcagccatcgtctttggcgccgtggccctcggccatgcctcatcattcgcccctgattacgctaaggcaaaactttcagctgcacatctgttcatgctgttcgaacggcaacccctgatagactcctactccgaggaaggtttgaagcccgataagtttgagggtaatatcacttttaacgaggtcgtattcaactacccaacccgcgcaaacgttccagtgctgcagggtcttagccttgaagtgaaaaagggacagacccttgcactggtcggatcttctggttgtggcaaatcgactgtggtgcaactccttgaaagattctacgaccctcttgcaggaactgtgttcgtggattttgggtttcagctgctggatggccaggaagccaagaagctgaatgtgcaatggctgcgtgcgcagctgggcatcgtgtcccaagaacctattcttttcgattgcagcatagcagagaatatcgcatacggtgataactcgagagtggtgagccaagatgaaatagtgtccgccgctaaggcagccaatattcatcctttcattgaaactttgcctcataagtacgagactcgcgtgggtgataagggtactcagctgtccggtggccaaaagcaacgcatcgcgatagccagagcacttattagacagccccagattctgctgctggatgaggcaacctcagcattggacacggaatcagagaaggtcgtccaggaggcattggacaaggcgcgcgagggaaggacctgtatcgtgattgcacatcgactcagcactattcaaaacgcagatctcattgtggtctttcagaacggtagggtgaaagaacacggcacccaccaacagcttctcgcacaaaagggaatctactttagcatggtgtcggtgcaagcaggtacccaaaacctt

SEQ ID NO: 200155 - DNA, 3858 bp, Artificial Sequence
  derived and/or modified sequence
atggacctggaagcagccaagaatggcactgcatggaggcccacgtcggcagagggagattttgaactgggaatttcctcaaagcagaaaagaaaaaagaccaagaccgtgaagatgattggagtgcttacccttttccgctactcagattggcaggacaagctgttcatgtcgttgggaaccattatggctattgcacatggtagcggattgccacttatgatgatcgtgtttggcgaaatgaccgacaaattcgtcgatactgcagggaacttttccttcccagtcaatttctccctgagccttcttaacccaggcaagattttggaagaagagatgactagatacgcttactactactcggggcttggagctggagtccttgtggcagcatacatacaggtgtccttttggaccctggccgcaggtagacagataagaaagattagacaaaagttctttcatgccattttgagacaggagattggttggttcgatatcaatgacaccactgaattgaacacgcggcttaccgatgacatttcaaagattagcgaaggaattggtgataaggtcggaatgttctttcaggcagtggccaccttctttgccggttttatcgtcggcttcattcgaggatggaagctgacccttgtgatcatggcaatttcgcccattctggggcttagcgccgcagtctgggcaaaaatcctgtcagcctttagcgataaagagctcgccgcgtacgctaaggcaggagccgtcgcagaagaggcacttggagccattagaacggtgatcgctttcggcggacaaaacaaagaactggagagataccaaaagcaccttgaaaacgcaaaggaaattggaatcaaaaaggcaatttccgcaaatatctcgatggggattgcatttcttctgatttacgcatcatacgcacttgcattctggtacggatcaacgctggttatatccaaggagtacacgattggcaatgcaatgaccgtctttttcagcattcttatcggggcattcagcgtcggacaagctgcaccatgtatcgatgcattcgcgaacgcccggggcgcagcttacgtgatctttgacattattgataacaacccaaagattgactcgttttccgaacgtggacataagcccgattcgatcaaaggcaacctggagtttaatgatgtgcatttctcgtatccatcgcgggcaaacgtgaagatcctcaagggactgaacctgaaggtgcaatcgggtcaaaccgtggcactggtgggaagctcaggatgtggtaaatccaccactgtgcagctgatccagcgactttacgatccagatgagggaaccattaacattgatggtcaagacattagaaactttaatgttaactacttgcgggaaatcattggagtggtgtcacaggaaccagtcctcttttcaaccaccattgccgaaaacatttgctacggtcgcggtaacgtgactatggatgagattaagaaggcagttaaggaagcaaacgcatacgagttcataatgaagttgccacagaagttcgacaccctcgtaggggaacgcggggcacaactgtccggtggacaaaagcagaggattgccattgcgcgcgccctggtccgaaaccccaagattctgctgctggatgaggcaacgagcgcacttgataccgagtcagaagcagaagtgcaagcggcccttgacaaggcacgtgagggtcgcactactattgtcattgcgcataggcttagcactgtgcgcaacgccgatgtgattgcgggattcgaggacggagtgattgtggagcaggggtcgcactcggaactcatgaaaaaagaaggagtctactttaaacttgtgaatatgcaaaccagcggatcccagatacagagcgaagagtttgagcttaatgatgagaaggctgcaactcgtatggccccaaatggatggaagtcacgtctttttaggcactcgactcagaagaacctgaagaattcacaaatgtgtcaaaaatccctggacgtggaaaccgacggccttgaggcgaacgtgccgccagtgagctttcttaaggtgctcaaacttaacaaaacggagtggccttactttgtcgtgggtaccgtgtgcgcaattgcaaatgggggcctccaaccagccttctcagtgatcttctccgaaatcatagcaattttcgggcctggagacgacgccgtcaaacaacaaaagtgtaatatcttctccctcatttttcttttcctgggtataatctccttcttcaccttttttctccagggattcacttttggtaaagcaggcgagattttgaccaggcgacttcgctccatggcatttaaggctatgctgagacaagatatgagctggtttgatgaccacaaaaacagcactggagccctcagcacccgtctggcaactgatgccgcacaagtgcagggtgcaaccgggactagacttgcactcatcgcgcagaacattgcaaatctcggtaccggaattatcatctcgtttatctacggttggcaactgacccttctcctgctggcagtggtgcctatcattgccgtgtcaggaattgtggagatgaagttgcttgcaggaaatgctaagcgagataagaaggaactggaagcggcaggcaagatcgccaccgaagcgatagaaaacatccgtaccgtcgtgtccctcacccaagaacggaagtttgaatcgatgtacgtggaaaagctgtacggtccttacagaaactccgtgcagaaggcacacatatatgggatcactttttcaatctcgcaggccttcatgtacttttcgtacgcaggctgtttccgttttggagcgtacctgattgtgaatgggcacatgcggttcagggatgtcattcttgtgttctccgccattgtctttggtgcagtggcactgggtcacgcatcctcatttgcccccgactacgcaaaagcgaaattgagcgctgcacacctctttatgctctttgaacggcagcctctgattgattcctattcagaggagggactgaagcctgacaagtttgagggcaacattacttttaacgaggtggtgttcaactacccaacccgcgcaaatgtgcccgttctgcaaggcctttcgctcgaagtgaagaaagggcagacgctggcactcgtgggatccagcggatgtggaaaatctactgtggtgcaactgcttgaaagattctacgacccgcttgctggaaccgtgtttgtggactttggctttcaactcctggacgggcaagaagcaaagaaactgaacgtgcaatggctccgagcccaactgggtatagtgtcccaagaacctatcctgtttgactgttcgattgcagagaacatagcatacggagataactcaagggtggtgtcccaggatgaaattgtctccgcagccaaagcagcaaacattcatccgttcattgaaaccctcccacataagtatgagactagggtgggcgataaagggactcaattgtcggggggtcaaaaacagcgtattgccattgctcgggcacttatcagacaaccccagatcttgctcttggacgaggccacctcggcgctggatactgaatcggagaaggtcgtgcaagaagcattggacaaggctcgcgaaggacgcacgtgcatagtcatcgcccataggctctccaccatccagaacgcggatctcatcgtcgtgtttcaaaacggaagagtcaaggaacatgggactcatcagcaactgttggcccagaagggaatttacttctcgatggtgtctgtgcaggcaggtacgcagaatctc

SEQ ID NO: 200156 - DNA, 3858 bp, Artificial Sequence
  derived and/or modified sequence
atggacctggaagcagccaagaacggaaccgcatggcggccaacttctgcagagggagacttcgagctgggaatttcgtcgaagcagaagcggaagaaaactaagactgtcaagatgatcggagtgctcaccctgttccgctacagcgactggcaagacaagctcttcatgtccctgggtactatcatggctatcgcccacggaagcggtttgccgctcatgatgatcgtgtttggggaaatgaccgacaagttcgtggataccgccggaaacttctcgttcccggtgaacttctcgctctcgctcctgaatcctggaaagattctggaagaagagatgaccaggtacgcatactactactcgggtctgggcgcaggggtgctggtggccgcatatatccaggtttccttctggaccctcgccgcaggccgacagatcaggaagatccggcagaaattctttcacgcaatccttcggcaagaaatcggatggttcgacattaatgacacgactgaactgaacacccgcctgaccgacgacatcagcaagattagcgagggcatcggggataaggtgggtatgtttttccaagcggtggccacgtttttcgccggattcatcgtggggtttatccgaggctggaaacttactctggtgatcatggccatttcaccaattttgggactgagcgccgccgtgtgggctaagattctgtcagcattcagtgacaaagagcttgctgcgtacgccaaggccggagctgtggctgaagaagctctgggtgcaatcaggactgtcatcgccttcggaggacagaacaaggaattggaacgctaccagaagcacctcgagaacgccaaggaaattggcatcaagaaggccatcagcgctaacatcagcatgggaatcgctttcctgttgatctatgcctcctacgctctggctttctggtacggaagcacgctggtcatcagcaaggaatacactatcggaaacgcaatgaccgtgttcttcagcattttgatcggcgccttcagcgtgggccaggccgccccatgcatagatgcatttgccaacgcgcggggggcagcatacgtcatcttcgatatcattgacaataatccgaagattgactcattttcggaacggggccacaagcccgactcgatcaaggggaatctggagttcaatgacgtgcacttctcatatccatcgagggccaatgtgaagattctgaagggactgaatctcaaggtccagtcgggacagaccgtcgccctggtcggatcgtctgggtgcggaaaatcaactaccgtccaactgatccaacgcctgtacgaccctgatgaaggcactatcaatatcgatggtcaagatatccgcaatttcaatgtcaattacctgcgggagatcatcggggtggtgtcccaggaacccgtgctcttcagtaccactatcgcggaaaacatctgctacggacgcggcaacgtcaccatggacgagatcaagaaggcagtgaaagaagcgaacgcctacgaattcatcatgaaactgccgcagaagtttgacacgctggtcggggagcggggagcgcagctgtcgggcggacaaaagcagaggatcgcgattgctcgggctctcgtgcgcaaccccaaaatcttgcttctcgacgaggcgacttcggcgttggacactgaatccgaggcggaagtccaggccgcgctcgacaaggctagggaaggacggaccaccatcgtcatcgcccacagactctccactgtgcgcaacgcggatgtgatcgccggcttcgaagatggcgtcatcgtggagcaggggtcccacagcgagctgatgaagaaggagggagtctactttaagctggtcaacatgcagacctcgggcagccaaattcagagcgaagaattcgagctcaatgacgaaaaagcggccaccagaatggccccgaacggttggaagagccgcttgttcagacactctacgcagaagaatctgaaaaactcgcagatgtgccaaaagtcgctggacgtcgaaaccgacggactcgaggcgaatgtcccgccagtgtcctttctcaaggtcctgaaactgaacaagaccgaatggccttacttcgttgtggggactgtctgcgccattgccaacggcggcctgcagccagctttttccgtgatcttctctgaaatcatcgcgatctttggcccaggagatgacgccgtcaagcagcaaaaatgcaacatctttagcctcatctttctgttcctgggaattatctcctttttcacctttttcctccagggattcactttcggcaaggcaggcgagatccttacccggcggctgcgcagcatggccttcaaagcaatgctccggcaagatatgagctggttcgacgaccataagaacagtacgggtgcactcagcactcgcctggccaccgatgcggcccaggtgcaaggcgccaccggaactcgcctggcgctgatcgcccagaacatcgcgaacctgggtaccggtatcatcatcagtttcatctacgggtggcaactcaccctgctgctgctggctgtagtgccgatcatcgcggtgtcgggcatcgtcgaaatgaagctgctggcgggaaatgcgaagagagataagaaggaactggaagctgcgggcaaaatcgctaccgaggcaattgagaatatccgcaccgtggtgtccctgactcaagaacgcaagttcgagagcatgtacgttgaaaagttgtacggaccatacaggaattcggtgcaaaaggcccacatctacgggatcaccttctccatcagccaggcattcatgtacttctcatacgccggatgcttccggttcggggcgtatcttatcgtgaacggccatatgcgctttcgggacgtgatcctggtgttctcggcgatcgtgttcggagcagtcgcccttggacacgcgtcgtccttcgcgccggattacgctaaagcgaagctctccgccgcccatctcttcatgctgttcgagagacagccactgatcgactcgtactccgaggaagggcttaagccggacaagtttgagggaaacatcacgttcaacgaagtggtgttcaattacccaaccagagcgaacgtgccagtcctgcaagggttgtcccttgaagtgaagaagggacaaaccctggccctcgtgggatcgtcaggatgcgggaaatcgaccgtggtccagctgttggaacggttctacgatcctctggctggcaccgtgtttgtggattttggatttcaacttttggacggacaagaagccaagaaactgaacgtgcagtggcttcgggcgcagctcggaatcgtcagccaggaaccgatcttgtttgattgctcgatcgcggagaatatcgcatacggagacaactcgcgcgtcgtgtcccaggatgaaatcgtgtcggccgcgaaggccgccaatatacacccctttatcgagactctgccgcacaagtacgaaactcgcgtgggcgacaaggggacccagctttccgggggacagaagcagcgcatcgccatcgcccgcgccttgatccgacaaccgcagatcctgctcttggatgaagccacctcagcactggatactgaatcagaaaaggtggtccaagaagcgctggacaaggccagagagggacggacttgcattgtgatcgctcatagattgtcaactatccagaacgcggacttgattgttgtgttccagaatgggcgggtcaaagagcacgggacccaccagcagctcctggcgcagaagggaatctatttctctatggtgtccgtccaagcagggactcagaacctc

SEQ ID NO: 200157 - DNA, 3858 bp, Artificial Sequence
  derived and/or modified sequence
atggacctggaagccgctaaaaatgggacagcatggagacccaccagtgctgagggagacttcgaacttgggattagtagcaagcagaagaggaagaagaccaagacggtgaagatgattggcgttctaacactgttcaggtatagcgactggcaagataagttgttcatgagccttgggacaatcatggctattgcccacggcagcggactcccactgatgatgattgttttcggggaaatgaccgacaaattcgtggacaccgccggcaattttagctttccagtgaacttctctctctctctgctaaacccgggtaaaatccttgaggaggagatgacccgctatgcctactattacagcgggcttggggctggagttttagtggccgcatacatccaagtatcgttctggacactggccgccggcaggcagattcgcaaaattaggcagaagttctttcatgccatcttgcgccaagaaattggctggttcgatatcaacgacaccactgaactcaatacgcgtctcacagatgacatcagcaaaatctccgagggaattggcgataaggtcggaatgttctttcaggccgtcgcaactttcttcgccggattcatagttggattcattagaggctggaagctaaccctggttataatggctatatctcctatcctgggactttccgccgcggtatgggcaaagattctgtccgcgttctccgacaaggagcttgcagcgtatgctaaagcaggggccgtggctgaggaagccctgggtgcaatccgcacggttatagccttcggcggtcaaaacaaggaattggagcggtaccaaaagcacctggaaaacgccaaggaaatcggaataaagaaggccattagcgctaatatctcaatgggtatcgctttcctactgatctatgccagttacgctctcgccttctggtatggcagcaccctggtgatctctaaggagtacacaatagggaatgccatgactgtgttcttttcaatcctgattggagcgtttagcgtgggccaggccgccccttgcatcgatgcatttgccaatgccagaggagcagcctatgtcatcttcgacatcattgacaacaatcccaaaatagactccttttccgaaagggggcacaagccggattcgatcaagggcaatctggagttcaatgacgttcatttttcatacccctcaagagcaaacgtaaaaatcctcaagggtctcaatcttaaggtacagtcgggccagacagttgccctggtaggttcttcaggctgtggcaagagtacgacagtgcagctcatccagcggctctacgatccagatgaaggtactatcaatatagacgggcaggacatccggaatttcaatgttaattacctgcgcgaaattatcggagttgtgtcacaggagcccgtactgtttagtacaactatcgccgagaatatctgctacggccgcggaaatgttacgatggacgagatcaagaaggcagtcaaggaagctaatgcctacgaattcataatgaagctgccacagaaatttgacactctcgtgggtgagaggggggcccagctgtcagggggacagaaacagaggatcgcaatcgcacgtgcgttagtccggaaccctaaaatccttcttctggatgaggcaacctctgctctagacacagaatctgaggcggaagttcaagcagccttggacaaagcccgtgaggggcgtactacgattgtgatagcccataggctgtctacagtacgtaatgctgatgtcattgccggatttgaagatggcgtgatcgtcgaacagggatcgcactctgagttgatgaagaaagaaggcgtatatttcaagttagtgaatatgcagacaagcggaagccagatccaaagcgaagagttcgagctcaatgatgaaaaagccgctacacgcatggctcccaatggatggaaatcccggctcttcaggcactccacacaaaagaatctgaagaatagccaaatgtgccagaagtctctcgatgtggagactgatggtctcgaggcgaatgtccctcccgtatcctttctgaaagttctaaaactgaataagactgagtggccctacttcgtggtgggaaccgtatgtgcgatcgccaatggcggactgcagccagctttctctgtcatcttcagcgagatcatcgcgatcttcggacccggtgacgacgccgtgaagcaacagaagtgcaacatcttctctctgatatttctgttcctaggtattattagttttttcacattctttcttcaggggtttacctttgggaaggccggcgagattttgactagacgcctccgctccatggcgttcaaagctatgctgcgacaagacatgagctggttcgacgaccataagaatagtaccggcgccctgagcacccgccttgccacggatgcagctcaggtgcaaggcgccacgggcacacggctggctctgatcgcccaaaatatcgccaacttgggaactggtataatcatttcctttatttacggatggcagctaacattacttctccttgctgtggtcccaataattgctgtgtccgggatcgtggagatgaagcttctagctggcaacgctaagcgcgacaagaaggagttggaggccgcggggaaaatcgcgactgaagctattgagaatatcagaacagttgtatcactgacccaggagcggaaattcgaatcaatgtatgtcgaaaaactgtacggcccctaccgaaactctgtgcaaaaagcccacatctacggaatcactttctcaatctctcaggcctttatgtatttttcctacgccggatgcttcaggttcggcgcgtatctaatagtcaacgggcatatgcgattcagagacgtgatattagtcttctcggccattgtctttggcgcggtggcactaggacatgctagcagcttcgcccctgactacgctaaggccaaactcagcgccgcacacctttttatgttgtttgagagacaaccactaattgattcatacagcgaagaaggtctgaaaccagacaagttcgaggggaacatcacctttaatgaagtggtgtttaactatccaaccagggccaatgtgcctgtgctgcagggtctgtcactagaggtgaaaaaaggccagactctcgccctcgtgggcagcagcggatgcggaaagtccacagtggtgcaactgctcgagaggttttatgatcccttggcaggtactgtcttcgtcgacttcggattccaattactcgatggacaggaggctaagaaactcaatgttcagtggctccgggcccaacttggtatcgtgtcccaggaaccgatcctgtttgactgcagcatcgctgaaaacattgcctacggggacaactcgagggtagtgtcacaagacgagattgtgagtgccgcgaaagccgccaacatacacccttttatagagacgctaccgcacaaatatgaaactcgcgtgggcgacaagggaacccagctgtctgggggccagaaacagaggattgccatagctcgcgccctcataaggcagcctcagatcctgctgttagacgaggccacctccgccctggatacagaatcagaaaaggtagtgcaggaagccctagacaaagcacgagaagggcggacctgcattgtgatagcccacaggctgagtaccatccagaacgctgacctgatagttgtcttccaaaatggaagagttaaagaacacggtacccaccagcagctgctcgctcaaaaaggcatctactttagcatggtgtctgtgcaggctggcactcagaacctt

SEQ ID NO: 200158 - DNA, 3858 bp, Artificial Sequence
  derived and/or modified sequence
atggacctcgaggctgccaagaatggcactgcctggcggcccacgtcagcggaaggcgatttcgagctgggtatttcatctaaacagaagcgcaaaaagacaaagacagtgaagatgattggcgtgctgaccctttttcggtattcggactggcaagataaactgttcatgtcactagggactataatggctatagcgcatggctccggtctccctcttatgatgatagtcttcggggaaatgaccgataagttcgtcgatacagcggggaatttttcgttccccgttaatttctcactgagtctccttaatcctgggaagattctcgaagaagagatgacccgctacgcgtattattattccggtctgggggcgggagtacttgtggcagcctatatacaggtcagcttttggaccttggcagccggtcggcagatccggaagatacgccagaagttcttccacgccatacttagacaggaaatcgggtggtttgatattaacgacacgaccgagctcaacaccagattgacggatgatatctctaagatctctgagggcattggcgataaggtgggaatgttcttccaagccgtggcaactttttttgccggcttcatcgtgggttttattcgcggatggaaactgacgctcgttataatggcgataagcccaatcctgggactctcggcagccgtgtgggctaaaattctcagtgccttttccgataaggagctggcggcatatgccaaagccggggctgtagcggaggaggcactgggagccattaggacggttatcgctttcggcggccaaaacaaagagctggaaagataccaaaaacacctggaaaatgccaaggaaatcggaatcaaaaaagccatttccgctaacatctcaatgggcatcgctttcttactgatttatgccagttacgctttggccttttggtacggcagcacactagtaatctctaaggaatacacaatcggcaatgcaatgactgtcttttttagcattctcataggagccttcagcgtcggacaggccgctccttgcattgatgccttcgcgaacgcccggggggcggcctatgtcatcttcgacataatcgataataaccctaagatcgacagcttctccgaacggggacacaagcctgattccatcaaggggaacctggaatttaacgacgtgcatttctcatacccaagccgagcaaacgtgaaaatcctgaaaggcctgaacctgaaggtgcagtcaggacagaccgtcgctctcgtgggttctagtggctgtggtaaatccactactgtgcagctcattcagcgcctttacgatcccgacgaaggaactataaacattgacggccaggacatacgcaactttaatgtgaattatttgcgggagattatcggagtcgtatcgcaggaacccgtgctcttttctactactatagcggagaacatctgctacggacgaggcaacgtcacaatggatgagataaagaaggctgtaaaagaagcaaacgcttacgagttcatcatgaagttgcctcagaaatttgacactctggttggcgagaggggtgcccagttgagcggcgggcaaaaacagcgaattgcgatcgctcgagccctcgttcgcaatcccaagattttactgctcgacgaggccacaagcgcccttgatacagagagcgaagccgaggtgcaggccgctctggataaggctcgggagggtcggaccactatagtaatcgctcacaggcttagtaccgtgcgtaacgctgatgtcattgctggctttgaggatggggtgattgtggagcaaggctcacatagtgagttgatgaaaaaggagggagtatattttaaactggtgaatatgcaaacttccggatctcagattcagagtgaagagttcgagttgaatgatgagaaagcagccaccaggatggctccaaatgggtggaaatctaggctctttcgccacagcacccaaaagaacctgaaaaacagtcaaatgtgccagaaatcactggatgtcgagaccgacggactagaggccaatgtcccccccgtttctttcctgaaggtcctgaaattaaacaaaactgaatggccatacttcgttgtgggaaccgtttgtgccattgcaaatggaggcttgcagcccgcctttagtgtgattttttccgagattatcgccatattcgggcccggcgacgatgctgtcaagcaacaaaagtgcaatattttcagtcttatcttcttgttcctggggatcataagtttcttcactttcttcctccaggggtttactttcggtaaggccggcgaaatcttgactaggagactgcggtcaatggcattcaaggccatgctgagacaggacatgtcctggtttgacgatcacaaaaactcaacgggagccctgtcaacaagattggccactgacgccgctcaagtccagggtgctaccggcacccgacttgcgctcatcgcccagaatatcgccaacctgggcacgggcatcattatcagctttatatacggatggcagctcacacttctgctcctggcggtggtccctatcatagcggtttcgggtattgtggagatgaaactgttagcagggaacgctaaaagggataaaaaagagctggaggccgccggaaagatagcaaccgaggcaatcgagaacattaggacagtggttagcctcactcaagagcggaaattcgagagcatgtatgtggaaaaactgtatgggccttacagaaactcagtgcagaaagcccacatatacggcataacattctcaattagtcaagcattcatgtacttcagctatgcaggttgctttaggtttggagcctatctgatagttaatgggcatatgcggttccgggacgtgatattggtgttctccgccatcgtgtttggtgccgtggctctcgggcatgcttctagtttcgcgcccgactatgccaaggctaagctctctgccgctcatttgttcatgctttttgagaggcagcccttgatcgattcctattctgaggagggtctgaaacctgataagtttgaggggaatatcaccttcaatgaagtcgttttcaactaccctacacgagctaatgttcctgtactgcaggggctgtccttggaggtgaaaaagggtcaaaccctggcattagtcggctcaagcggttgcggtaagtccaccgtcgtgcagcttctggaaaggttctatgacccccttgccgggacagttttcgtggacttcggttttcagctcctcgacggacaggaggcaaagaagttgaatgtgcagtggctgcgagcacagctggggatcgtgagtcaggaacctattctcttcgactgctctatcgcagagaacattgcttatggcgataactctagggtcgtctcacaggatgagatcgtgtcagccgcaaaggctgcgaacatacacccttttatcgaaacattacctcacaaatacgagaccagagtgggtgacaagggcacccagctcagcgggggccagaaacagaggatcgctatcgcacgggccctcatccggcagcctcagattctcctgctggacgaggcaactagtgccctggataccgagtctgagaaggtggtccaggaggccctggacaaagcacgagagggacgaacctgcatcgttattgctcataggctgagtaccattcagaatgctgatttgatagtggtttttcagaacggcagggtaaaagaacacggtacacaccagcagctgctcgcacagaagggtatttactttagcatggtgtctgtgcaggcaggcacccagaacttg

SEQ ID NO: 200159 - DNA, 3858 bp, Artificial Sequence
  derived and/or modified sequence
atggatcttgaagccgctaaaaacgggactgcatggaggccgacctcggctgaaggagacttcgaactgggaatctcctccaaacagaagcggaaaaaaactaaaaccgtgaaaatgatcggggttctcacactgtttagatattccgattggcaggataagttgttcatgagcctagggacgattatggcaatcgcccacggttccggccttccacttatgatgatcgtgtttggagagatgactgataaatttgtggatacagccggcaatttctcctttcccgtgaactttagcttgtccctcctgaatcctggcaagatcctggaggaggagatgacgcgatatgcctactactactccggtctgggcgcgggggtactcgtggcagcctatatccaagtttccttctggacgctggcggccgggcgacagattcgcaaaatcagacagaaattttttcacgccattctgcgtcaagagatcgggtggtttgacattaacgataccaccgaattgaacacgaggttaacggacgacatcagcaaaatcagcgaggggatcggagacaaggtggggatgttcttccaggcagtggcgaccttcttcgctgggtttatcgtgggctttattcgaggctggaaactcacattggtgatcatggccattagtcccatcttgggcctcagtgcagcagtatgggctaaaattctgtccgctttttcagacaaggaactcgccgcctatgcgaaggccggggctgtagcggaagaggctctaggcgccatccgcaccgtgatcgcttttggcggtcaaaataaggagctagagcgctaccagaagcatctggagaacgcaaaagaaattggaattaagaaggccatctccgccaacatctccatgggtatagcctttttactgatctatgcgagttacgcattagccttttggtacggcagcaccctggtgattagtaaggaatacactatcggcaacgctatgactgtttttttcagtattctgataggcgccttcagcgtgggccaggcagccccatgcatagatgcgttcgccaatgccagaggggccgcatatgtaatcttcgatattatagacaataatcctaaaatcgatagcttctccgaaagagggcacaaaccggacagcatcaagggcaatctggaatttaatgacgtgcatttcagctatcccagcagggctaatgtcaagattctgaaagggctcaaccttaaggttcagagtgggcagaccgtcgcactggtcggcagcagcggttgtggcaaaagcaccacagtccagctcattcagcggctgtatgaccccgacgaaggcaccatcaacatcgatggacaggatattagaaacttcaacgtgaattacctgcgggaaatcattggtgtggtgagccaggaacccgtgctcttttccacaaccattgctgaaaatatttgttatggacggggcaatgtgaccatggacgagatcaaaaaggcagtgaaggaggcaaacgcttacgagttcatcatgaagctaccacagaaattcgataccctggtgggcgagagaggggctcagctcagtggaggacagaagcagaggatcgctatagcgcgcgcattggttagaaatccaaagattttattgttggatgaggctacatcagctttggacacggaaagtgaagccgaagtccaggccgcgctcgacaaggcgagagagggccggaccactatagtcatcgcccatcgattgagcaccgtcaggaacgccgatgttatcgccggatttgaggacggcgtcatcgttgaacaggggagccattcagaactcatgaaaaaagagggcgtttacttcaaactggttaacatgcagacgtccggcagccaaatacagtctgaggagtttgaactcaacgacgagaaggccgccaccaggatggcaccgaatggttggaaatcaaggctgttccgccactcaactcagaagaatctgaagaatagccagatgtgtcagaagtcacttgatgtggaaaccgacggactcgaggccaatgtgcctcctgtctcctttttgaaggtgctcaagctgaataagaccgagtggccttatttcgtggtgggtacagtctgtgccattgctaacggaggtcttcagcccgctttttcagtgatcttctctgaaatcatcgctattttcggcccgggtgatgacgccgtgaagcagcagaagtgtaacattttttccctgatcttcttgtttctagggattattagttttttcacctttttcctgcagggttttactttcggcaaggcgggtgagatcctgactagaagactgcgctccatggcctttaaggcaatgctgagacaggacatgtcttggttcgatgaccataagaactccaccggggccttatcaactcgactggccaccgacgccgcccaggtgcagggagctaccggtacacggttagccttgatagcccaaaatatcgccaacctgggtacgggcatcattataagtttcatatacgggtggcagctgactctgctgctgttggccgtcgttcccatcattgcagtaagcgggatcgtggagatgaaactgttggcaggtaacgctaagcgcgacaagaaggaattggaggccgcgggcaagatagccacagaagcaatcgaaaacataaggaccgttgtatccctgacacaggagcgtaagtttgaatctatgtatgtcgaaaaactttatggcccataccgcaattcagtccagaaagcacacatttacgggatcaccttctccatcagccaggccttcatgtatttttcctatgccggctgcttccgcttcggagcctacctaatcgtcaacggccatatgagattccgagacgttatcctagtattttcagcaattgtctttggggccgttgctcttgggcacgcttcatccttcgctccggactacgcaaaagccaagttgagcgcggcccatctgtttatgttgttcgaaaggcagcctttaatcgattcctactccgaggagggactaaagccggacaagttcgagggcaacattacatttaatgaggtggtgttcaattacccgactcgggccaacgtgcccgtgcttcaagggctgagtctggaagtgaagaaaggacaaacattggctctcgtagggtccagcggttgtgggaagagcacagtggtacagttactcgagcgattctacgaccccctggccggaacagtgttcgtcgattttgggtttcagcttcttgacgggcaggaggccaaaaagctaaacgtgcagtggttaagggctcagctgggcatagtgtcacaggagcccatcctgttcgactgttctatagccgagaacattgcgtatggcgacaactcacgggtggtcagccaggatgaaatcgtcagcgcagcgaaagcagcgaacattcatccatttatagaaactctaccccacaaatacgagactcgcgtcggtgataagggcacacagttatctgggggtcaaaaacaacgcatcgcaatcgctcgtgcattaattcgtcagcctcagattctcctcttagatgaagctacttctgccctggatacagaaagtgaaaaagtagtccaagaggccctggacaaggcaagagaggggcggacctgcatcgttattgcacaccgactaagcacaattcagaatgctgatctgatcgtggtgtttcagaatggtagagttaaggagcacggcacccaccagcagctgttggcccagaaagggatttacttctctatggtctctgtgcaggccgggacacaaaacctg

SEQ ID NO: 200160 - DNA, 3858 bp, Artificial Sequence
  derived and/or modified sequence
atggacctggaagcggccaaaaacgggactgcatggcgccctacctcagcagagggagacttcgagctggggattagctcgaagcagaagcggaaaaagactaagaccgtcaagatgattggtgtgctgaccctgttcagatactcggattggcaggacaagctcttcatgtcactcggaactattatggccatcgcacacggctccggactccctctcatgatgattgtgtttggtgaaatgactgataagttcgtcgacacggccggcaatttctcatttccggtgaacttctccctcagcctgctcaaccccggaaagatcctcgaagaagagatgacccgatacgcgtactactactcgggactgggagccggtgtcctggtggccgcatacatccaggtgtcgttctggactctcgctgcaggtcggcagatcagaaagatacgccagaagtttttccacgcaatcctgaggcaggaaatcggatggtttgacataaatgatactaccgaactgaatacccgcctgaccgacgacatctcgaagatctcggagggcatcggcgacaaggtggggatgttctttcaggccgtcgccacttttttcgccggattcatcgtgggctttatcaggggatggaagctgaccctggtgatcatggcaatttccccaatcttggggctctccgctgccgtgtgggcaaagatcctgtccgcattctctgacaaagagcttgcagcatacgctaaggcaggagcagtggcagaggaagccttgggagccatcagaaccgtcatcgctttcggaggacagaacaaggagttggagcgctatcagaagcaccttgagaacgcgaaggaaatcggcatcaaaaaagctatctcagcgaacatttcaatgggcattgcattcctgctgatctacgcttcgtacgcgttggctttttggtacggcagcaccctggtgatttcgaaagagtacaccatcgggaatgcgatgactgtctttttctctatcctcatcggagccttttcagtgggccaggcggctccatgcatcgatgcgttcgcgaatgcaagaggcgcggcctacgtgatcttcgacatcatcgataacaacccaaagattgactcattctcggagcggggacacaagcccgattcgatcaagggaaatctggagttcaacgacgtgcatttcagctacccgtcgcgcgcgaatgtgaagatcctcaaggggctgaatcttaaggttcagagcgggcagaccgtggccctggtggggagctcgggatgtggaaaatcaactaccgtccagctcatccagcgcctctacgaccctgatgaggggaccatcaatatcgatggacaggacattcgcaacttcaatgtgaactacctgcgcgaaatcatcggcgtggttagccaggaacccgtgctgtttagcactaccatcgcagagaatatctgctatggaagaggaaacgtcaccatggatgaaatcaagaaagcagtgaaggaagcgaacgcatatgagttcatcatgaagctcccccagaaattcgataccctggtcggcgagagaggagcacagctctcgggaggacagaagcaacggatcgccatcgcgagggcgctggtccggaacccaaagatcctgctcctcgacgaggccaccagcgcacttgataccgaatcggaagcggaagtacaggccgcactggataaagcgagagaaggacgtacgacgatcgtgatcgcccacagactgtcaaccgtgcggaatgccgatgtgattgcaggctttgaagatggggtgatcgtggagcagggctctcattcagaactgatgaagaaagaaggggtgtactttaaactcgttaacatgcaaacgagcggctcgcagatccagtcggaggaatttgagctgaatgatgagaaagcggccacccggatggccccaaacggatggaaatcacgcctgttccgtcattcaacgcagaagaacctgaagaatagccaaatgtgccagaagtcactggatgtggaaactgacggcctggaagcgaatgtacctcccgtgtccttcctgaaggtactgaaactcaacaagaccgaatggccgtactttgtggtgggaaccgtctgcgccatcgccaacggtggattgcaacctgctttcagcgtgatcttttcagagatcatcgccatctttggaccaggtgatgacgcggtgaagcagcaaaagtgcaacatcttttcgctgattttcctctttctcggcatcatttcgttctttaccttcttcctccagggcttcacgttcggaaaagccggagagattctcacgaggcggctgaggtctatggcgtttaaagcgatgctgcgacaagatatgagctggttcgacgaccacaagaactccaccggagccttgtcgactcggctggcgaccgatgctgcgcaagtccaaggggccactggaactagactggcgctgatcgcccaaaacatagccaatcttgggaccggaatcatcatctcgtttatctacgggtggcagctgactctcctgctgcttgcagtcgtgccgatcattgcagtgtcgggaatcgtggagatgaagctgctggctggaaacgccaaaagagacaagaaggaactcgaagccgccggaaaaatcgcaaccgaggcaatcgaaaacatacggaccgtggtttcattgacgcaagaacggaagttcgaatcgatgtacgtggaaaagctctacggaccgtaccgaaactcggtccaaaaagcgcatatctacggtataactttctccatctctcaggccttcatgtacttctcctacgctggttgcttccggtttggcgcctaccttattgtcaacggccacatgcggttcagagacgtgatccttgtgttctctgcgatcgtgttcggcgccgtcgccctgggacatgcctcctcattcgccccggactacgccaaggccaagctgtccgctgcccatctgttcatgctctttgaacggcagcccctgatcgattcctattctgaagagggactgaaaccagacaaattcgaaggaaacatcaccttcaacgaagtcgtctttaactacccgactagagctaatgtgccagtgctgcaaggtttgtcactggaagtcaagaagggtcagaccctcgccttggtgggatcctccggatgcggaaagagcactgtcgtgcagttgcttgagcgcttttacgatccgctggccggcactgtctttgtggattttggtttccagctgctcgacggccaagaagcgaagaagctcaatgtgcaatggctgagagctcagcttggaattgtgtcccaggaaccaatcctgttcgattgttcaattgctgagaatattgcctacggagacaacagccgcgtggtgtcccaggatgaaattgtctccgccgcaaaggcggccaacatccacccattcatcgaaaccctgcctcacaagtacgagactcgcgtaggcgacaaaggaacccagctctccggtggtcaaaagcaaagaatagccatagctagagcgctgattcgccaaccacaaatcctgctgctcgacgaggcaactagcgccctggatactgagagcgagaaagtcgtgcaggaggcccttgacaaagctcgcgaaggcaggacttgtatcgtgattgcacatcgcctgtcgactatccagaatgctgacctgatcgtcgtgttccagaatgggcgggtgaaggaacacggaactcatcagcaactgctggcgcagaagggaatttacttctcaatggtgtccgttcaggccgggactcagaatctg

SEQ ID NO: 200161 - DNA, 3858 bp, Artificial Sequence
  derived and/or modified sequence
atggacctcgaagctgctaagaacggcaccgcctggaggcccacctcggccgagggcgatttcgaactggggatatccagtaaacagaagcgcaagaaaaccaaaaccgtgaagatgatcggggttctaactttattcaggtatagtgactggcaggataaactcttcatgagcctcggaacaatcatggcaatagcacatggaagcggattacccctgatgatgatcgtgtttggggaaatgaccgataaatttgtcgatacagcaggaaacttcagctttcctgttaacttttctctgagcctcttgaatccaggcaagatcctggaagaggagatgacccggtatgcctactactattccggtctgggagcaggggtcttggtggccgcttatatccaggtgtcgttctggactttggcagccggaagacaaataaggaagattaggcagaaattcttccacgcaatcctcagacaggagatcggatggttcgatattaatgatactactgagctgaatacccgcctaaccgacgacatctctaaaattagtgaaggcatcggagacaaggtaggaatgttctttcaagcagtggcaaccttcttcgccggcttcatcgtggggttcattcgggggtggaaactgacactggttattatggccatcagccccatcctcggtttatcagccgcggtgtgggccaagatactgtctgccttctcagacaaggagctggcagcgtatgctaaggcaggcgctgtcgcggaggaggccttgggggccattcggactgtaattgcgttcggcggacagaataaggagctggagcggtaccagaagcatctggagaacgctaaggagatagggatcaagaaggccatcagtgcaaacatatcaatgggcatcgcatttctcctcatctatgcgtcatacgctttggctttctggtatgggtccacactcgtcattagcaaggaatataccatcggaaacgcgatgacggtgtttttcagcatcctgatcggagctttcagtgtggggcaggcagccccctgcatcgatgcctttgcaaatgcccggggggccgcatatgtaattttcgacatcatagacaataacccaaaaatagatagcttttcagagcggggtcataagccggactctattaaggggaatttggagtttaacgacgtgcacttctcctacccaagcagggcaaacgtgaagatcttgaaagggctcaacctcaaagtgcagtcaggccagacagtagcccttgttggatcgagcggctgcgggaaatcaaccaccgttcagttaatacagagactttacgaccccgacgagggaaccattaatattgacggccaggacattcgcaactttaacgtgaactatctacgggaaataatcggcgtggtgagccaagaacccgtgctttttagcaccaccatagccgaaaacatctgttatggccgtggcaatgtcaccatggatgaaattaaaaaggcagtgaaggaagcgaacgcctacgagttcattatgaagctgccccagaaatttgataccctcgttggtgagcgcggagctcagctcagtggtggccaaaaacagcgaatcgcaatcgcgcgcgcattagtcaggaatcccaagattttgctccttgacgaagccacatcagcgctggacaccgaaagcgaggccgaagtgcaggccgccctcgacaaggctagggaaggaaggacgaccattgtgatcgctcataggcttagcacggtgaggaacgctgatgtgatcgctgggttcgaggacggcgtcattgtagagcagggatctcacagtgaactcatgaagaaggaaggcgtgtattttaaattggtgaacatgcaaacttccggatctcagattcagtctgaagagttcgagctgaatgacgaaaaagctgccacacggatggctcctaatgggtggaagtctcgactttttcgccacagtacccagaagaacctgaagaattcccagatgtgccagaagagtctcgatgttgaaactgatgggcttgaggccaatgtgcctcctgtttcatttttgaaggttttaaagctaaataagacagagtggccttattttgtagtcggtactgtctgcgcgatagccaatggcggtttgcagcctgcattttccgtgatattttctgagattatagccatttttgggccaggcgacgacgcggtgaaacagcaaaaatgcaacatcttcagcctcatctttttatttttgggcataatttcattctttacctttttcctccaaggctttacctttggcaaggcaggagaaattttaacacggaggctgagatcgatggcctttaaagctatgcttcgacaagacatgtcgtggtttgatgaccacaaaaattctaccggcgcgctttcaacaagactggccacggacgctgcccaggtgcaaggcgcaacaggtacacggttggcacttatcgctcaaaatattgcaaacttaggcactgggattataatctctttcatttatggatggcaactgacgcttcttttgctggccgtggtgccgataatcgcagtgagtggcatagtggaaatgaagttactggccggaaacgctaaacgggacaaaaaagagctggaggcagctggcaagatcgcaacggaagctatagaaaacatccgaacagtcgtctcgttaactcaggagcggaagttcgagagtatgtatgtagaaaaactctatggcccgtatcgtaattcagtgcagaaggcgcatatttatggcatcacattttctattagccaggccttcatgtacttctcctatgctgggtgtttcagattcggcgcctacttgatcgtgaatggccacatgcgatttcgggatgttattctggtgttctccgcgatcgtattcggtgcagtcgccttagggcacgctagttcttttgccccagactacgccaaggcgaaactcagtgccgcacacctgttcatgctttttgagaggcagcccctgatcgacagctacagcgaggaaggacttaaacccgacaagtttgaaggaaacattacttttaacgaagtggtttttaattatccgactagggccaacgtccctgttctgcagggtttatctctggaggtgaagaagggccaaaccctggctctggttggatctagcggctgcggcaaatctactgtagtgcagctgttggagagattctacgatcccttagccgggacagtcttcgtagacttcggctttcagcttcttgacggacaggaagccaaaaagcttaacgtgcagtggctcagagcccaactgggcattgtctcccaggaacccatcctctttgactgttctattgccgagaatatcgcctacggcgataattctagggtggtgtctcaggatgagattgttagtgcagcaaaggccgcaaacattcacccgtttatcgagactctcccacacaagtacgaaacccgcgtgggcgacaaaggaactcagctgagtggaggccaaaaacagaggatcgcaattgctcgagcgctgatcaggcagccacagatactcttattggacgaggctacctctgcactagatacagagtctgagaaggtggtccaggaggcactggataaggcacgtgaggggcggacgtgcatcgtcatagcccataggttgagtaccatacaaaatgctgacctgatcgtggtgttccaaaatggcagggtaaaggagcacggcacccatcagcaacttctcgcccagaaaggaatttatttctccatggtgagcgttcaggctgggactcagaatttg

SEQ ID NO: 200162 - DNA, 3858 bp, Artificial Sequence
  derived and/or modified sequence
atggacctggaggctgccaaaaacggcactgcatggaggccaacctccgcagagggcgactttgagctcggtatctcaagtaagcaaaagcggaaaaaaacgaagaccgtgaaaatgattggtgttctcacactgttcaggtatagcgattggcaagataagctctttatgagcctgggaacaatcatggcaattgcccatggttctggattgcccttaatgatgattgtgttcggggagatgaccgacaagtttgttgatactgccggaaacttttctttccctgtaaacttcagcctgtcactgctcaaccctggcaagatcctcgaagaggaaatgaccagatacgcttactattacagtggactcggcgcaggggtgttggtcgccgcttacattcaggtcagcttttggactttggccgctggtagacaaattaggaaaatccggcagaaatttttccatgctatactccgccaggagatcggctggtttgacattaatgataccacagaactgaatactcggctaactgacgatatatctaagatcagtgagggcatcggagataaagtgggcatgttctttcaggcagtggccacttttttcgcaggctttattgtgggattcattcgaggttggaagctgaccctggtgatcatggctatcagccctattctcggactctctgctgcagtgtgggccaagattctctcagcctttagtgacaaggaactggcggcttacgccaaagccggtgctgtagctgaagaagcattgggcgccatcagaaccgtcatcgctttcggcggccaaaacaaggaattggagcgctatcagaagcacctggaaaacgcaaaagagatcggaatcaagaaggctatcagcgctaacatctcgatgggcatagccttccttctgatttatgcttcctacgctttggctttttggtacgggtcgacactcgtaatcagtaaggagtacactataggaaacgccatgacggtgttcttttccattcttatcggagctttttccgtcggtcaggccgcaccatgcatcgatgcctttgccaacgctcgcggcgcagcatacgtgatttttgacattatcgataataaccctaaaattgattcattctctgaacgtggtcacaaacccgattctatcaaaggcaacctcgagttcaacgacgtccatttttcatacccaagtcgcgcgaacgttaagatcttgaaggggcttaacctgaaggtacagtccggacagaccgtggctttggtgggcagttcaggctgtggcaagagcaccacagtgcagctaatccaaagattgtatgacccagacgaaggaaccattaatatagatggccaggacatccgcaacttcaacgttaactatctccgcgagataataggggtggtgagccaggaaccagtgctcttcagcactaccatcgctgagaacatctgctacggcaggggcaacgtcacaatggatgagatcaaaaaagcggtgaaagaggcaaatgcctatgagttcataatgaaactgccacaaaagttcgatactctggtcggcgagaggggagcacaactttcaggcggacagaaacagcggattgccatagctagagcgcttgtgagaaaccctaagatcctcctgctggatgaagccacatctgcgctggatacagagagcgaagctgaagtccaggccgctctggacaaagccagggaagggaggactaccattgtgattgctcatagactcagcaccgtgaggaacgctgacgtgatcgccggtttcgaagacggagtgatcgtagagcaaggaagccattccgaacttatgaaaaaggaaggggtgtacttcaaattagttaacatgcaaacatcaggcagccagatccagagtgaagagttcgagctgaacgatgaaaaagcagccacaaggatggcccccaacggctggaaatctagactctttcgccatagtacccagaagaatctgaagaacagtcagatgtgccagaaatccttggacgtagaaacagacggattagaggcaaacgtgccaccagtatcatttctgaaagtcctgaaactgaacaagactgagtggccttattttgttgtcggcacagtgtgcgcaatcgctaacggtggtttgcagccagcattttctgtcatttttagcgagatcatcgccatcttcggtccaggcgatgatgctgttaagcaacagaagtgcaacattttcagtttgatatttctgttccttgggatcataagcttttttacattctttttgcaaggatttacatttggaaaagctggcgagatactgactcggcgtctgagaagcatggctttcaaggctatgctccgccaagacatgtcctggtttgacgaccataagaacagcaccggtgcattgtctacaaggctggccaccgatgccgcccaagtccagggggccaccgggaccaggttggctttgatcgctcaaaacatagccaacttaggcacaggaattattatctcgttcatctacggctggcagttgaccctcctgctgctagcagtcgttcctattatcgccgtcagtggaattgtcgaaatgaagcttctggcgggcaacgcgaagagagataagaaagagctggaagcagcgggtaaaattgcaacagaagccatcgagaacatccggactgtcgtcagcctgacccaagaaagaaagttcgagagcatgtacgttgagaaactgtacggaccatacagaaatagcgtgcaaaaagctcatatttacggcattactttttctatcagccaagcgttcatgtattttagctacgccggatgctttaggttcggggcttacctgatagttaatggtcatatgaggttcagggacgttatactcgtctttagtgctattgtctttggagcagtcgccctcgggcatgcttcttctttcgctcctgactacgccaaagcaaaattgagtgcagcacatctgtttatgctcttcgagcgccaacccctaatcgattcctacagcgaagaggggttaaaaccggacaaatttgagggaaatatcacatttaatgaagtagtgtttaactaccctacaagagccaacgttcccgttctgcagggactttcactggaagtcaagaagggccagacacttgctttggtgggttcctcgggctgtggaaaatcgaccgtggtgcagctgctggagaggttttacgaccctttagcagggactgtgttcgtggacttcggatttcagctgctggatggccaagaagctaaaaagctgaacgtgcaatggctgcgagctcagctcggcatcgtcagccaggaacccattctgtttgactgctcgatagcagagaacatagcttacggagacaattcgagggttgtaagccaagatgaaatagtgagcgctgccaaggctgcaaatatccatcctttcatcgagacactcccccacaaatacgagacccgggtgggagacaaaggaacacagctgagcggtggacagaagcagagaatcgctatcgcgcgtgctttgattaggcagccacagatacttctcctcgacgaagctacatccgctctggatacagagtccgaaaaagtcgtccaggaggctctcgataaagcaagagagggccgcacctgtatagtgattgcacatagactgagcaccattcagaacgctgacctgatcgtcgttttccagaacggaagagtgaaagagcatggtacccaccagcagctgctggcgcagaagggcatctacttctcaatggtcagtgtccaggctggcactcaaaacctc

SEQ ID NO: 200163 - DNA, 3858 bp, Artificial Sequence
  derived and/or modified sequence
atggatttggaggccgccaagaatgggaccgcctggcgccccacgtcagcagagggcgacttcgagctcggcatctcctcgaaacagaagcgaaaaaagaccaagaccgtgaaaatgatcggagtgctcactctcttccgctactcggattggcaggacaagctgttcatgagtctggggactatcatggcgatcgcccacggatctgggcttccgctgatgatgattgtgttcggcgaaatgaccgataagtttgttgacactgctggaaatttctcatttccggtgaacttctccctgagcttgctgaaccctgggaagatcttggaggaggagatgaccaggtacgcgtactactactcgggcctgggagccggagtgcttgtggcagcgtatatccaagtctcattctggaccctggcagcgggtagacagatccgtaagattcggcagaagttcttccacgcgatcctccgccaagaaatcggctggttcgatatcaacgacaccactgaactgaatacccgcttgaccgacgatatatcgaagatcagcgagggaataggtgataaggtgggcatgttcttccaggcggtggcgactttcttcgctggattcattgttggctttatcagaggttggaaattgactctggtgatcatggcaatcagcccgatcctcgggttgtccgccgccgtgtgggcgaaaatcttgtcagcattttccgacaaagaacttgccgcgtacgctaaggccggcgcggtggcagaggaagccctcggtgccatccggacggtgatcgcgtttgggggacagaataaagagctcgaaaggtaccagaagcatctggaaaatgcaaaagagatcggaatcaaaaaagctatctccgctaacatcagcatgggcatcgccttcctcctcatctacgcctcctacgcattggccttctggtacggctccactttggtgatcagcaaagaatacactatcggaaatgccatgactgtgttcttctcgatccttattggcgcattcagcgtcggacaagctgccccatgcatcgatgccttcgctaatgcccggggggcggcatatgtgatcttcgacatcatcgacaacaatcccaagatcgattcattcagtgaacggggacacaagccggacagcatcaaagggaacctcgagtttaatgacgtgcatttctcgtacccatcccgggccaatgtcaagatcctgaagggactgaacctgaaggtccagagcggacaaactgtggcactcgtcggtagttccggatgcgggaagtcaaccaccgtccaactcatccagcgtctctatgacccagacgaaggcaccatcaatatcgatggccaggacatccgtaacttcaacgtcaattacctgcgcgagattatcggagttgtgtcccaggagccggtgctcttctcaactaccatcgcagaaaacatctgctacggacggggcaacgtgactatggatgagatcaagaaagcggtgaaagaagcaaatgcgtacgaattcattatgaaactgccccagaaattcgatacccttgtgggtgaaagaggggcacagctgtcgggcggccagaagcaacggatagcgatcgcgcgagctttggtccggaacccaaagatcttgctgctggatgaagcgacttcagccctcgataccgaatcggaggctgaagtccaagcggcgctcgataaggcacgggaagggagaaccaccattgtgatcgctcaccgcctgtctaccgtccgcaacgccgacgtcattgcgggtttcgaagatggagtcatcgtcgaacaggggtcccatagcgagcttatgaagaaggagggcgtgtactttaagctcgtcaacatgcaaacgtccggatcgcagatccagtctgaagaattcgagctgaacgacgaaaaggcagctacccgcatggccccgaatggatggaagagccgactgtttcgacactcaacccagaaaaacctcaaaaactcgcaaatgtgccaaaagtctctggacgtggagactgacggactggaagccaacgtgcctccggtgagctttcttaaggtcctgaaactgaataagaccgaatggccgtactttgtcgtgggaaccgtgtgtgccatcgcaaacggaggattgcagccagccttctcggtcatcttctccgagataatcgcaattttcggacccggcgacgacgccgtgaaacaacaaaagtgcaacatctttagtctgatattcctgttcctgggaatcatttccttcttcaccttcttcctccaaggctttacctttggcaaggctggtgagatcctgacgaggcgcctcaggagcatggccttcaaagctatgttgagacaggatatgtcgtggtttgatgaccacaagaattccaccggcgcgctttcgactagattggcgactgacgccgcccaggtgcagggagcgactggaactagactggccctgattgcccagaacatcgcaaatctgggcactggcatcatcatttcgtttatctacggctggcagcttaccctgctgctcctggccgtggtccctatcatcgcggtgtccggtatcgtcgaaatgaagctccttgcaggaaacgccaaaagagataagaaggaactggaggctgctggaaaaatcgcgactgaggccatcgaaaacattcggaccgtggtgagcctcactcaggaacgcaagttcgagtctatgtacgtggaaaagctgtacggtccttaccggaacagcgttcagaaggcacatatctacggaatcactttctcgatctcacaggccttcatgtacttttcatacgctggctgctttcgattcggagcctacttgatcgtcaatggacacatgcggtttcgcgatgtgatcctcgtgttctccgcgattgtgtttggagccgtggcccttggacacgcgagctccttcgcgccggactacgcgaaggccaaactcagcgctgcccacctcttcatgctgtttgaacggcaacccctgattgattcgtactccgaggaaggtcttaagccggacaagttcgaaggaaacattacgttcaacgaggtggtgtttaactacccgactagagccaacgtcccagtccttcaggggctgtcgctggaggttaagaagggtcaaactctggcactcgtgggctcctctggatgtggaaagtcgactgtggtccaactcctggagcgcttctacgacccactggccggtaccgtctttgtggacttcgggttccagctgttggacggacaggaagcgaaaaagctgaatgtgcagtggctgcgggcacaactcgggattgtctcccaagagcctatcctcttcgactgttcaatcgccgaaaacatcgcgtacggcgacaactctcgcgtggtttcacaggacgaaatcgtgagcgctgctaaggcggcgaatatccatccttttatcgagacgctgccacataagtatgagacgcgggtgggagataagggaactcaactctcgggaggacagaagcaacgcatcgctattgcccgtgctctgattaggcaaccgcagatcctcctcctggacgaggccacttctgccctggacacggaatcggagaaggtggtccaggaagcgctggacaaggcccgcgagggaaggacgtgcatcgtaattgctcatcgcctgagcaccatccagaacgcagacctgatagtggtgttccaaaacggtcgcgtgaaggaacacggtacccaccaacagctgctggcccagaaaggtatctatttctctatggtgtccgtccaagcaggaacccagaacctg

SEQ ID NO: 200164 - DNA, 3858 bp, Artificial Sequence
  derived and/or modified sequence
atggacttggaggccgcaaagaatggcaccgcctggcggcctacctcagctgagggggacttcgaactcggcatcagtagcaagcagaaaaggaaaaaaaccaagactgtcaaaatgattggagtcctgacactgtttcgctattcagattggcaagataagctctttatgtctctcgggacaatcatggctatagcccatggaagcggattgccgttaatgatgattgtgttcggggagatgactgacaagtttgttgacacggccggtaacttctcctttcccgtgaacttttctctgagcctcttaaatccgggtaagatacttgaagaggagatgacccgttacgcatactactacagcggacttggggcaggagtgctagtggcggcctacattcaggtgagcttttggaccctggcagcgggtcggcagatcagaaagatcaggcagaagtttttccacgcaatcttgcgccaggagatcggctggtttgacatcaatgatactacagaattgaatacaaggctgaccgacgacatatccaagatttccgaaggtatcggagacaaagtggggatgttcttccaggcggtcgctacattctttgctggatttatcgtaggcttcatcagaggctggaagctgaccctggtgatcatggctataagccctattctgggactgtcagctgcagtctgggccaagattttgtcagctttttccgacaaagagctggctgcctatgctaaggcaggagcagtagctgaagaggcactgggagccatcagaaccgtaatagccttcggaggtcagaataaagagctggagaggtatcagaagcacctggaaaatgccaaggagatcggcatcaagaaagccattagtgccaatatcagtatggggattgcttttcttttgatttacgcaagttatgccctcgccttctggtacgggtctaccctggtcatatctaaagaatatacaatcggtaatgccatgaccgtgtttttttccatcttgattggtgcattctcagttggccaggctgccccttgtatcgacgcctttgctaacgcgaggggcgccgcatacgtgatcttcgacattatcgataataaccctaagatcgactccttctcagaacgcggccataaacccgactctatcaaggggaatctcgaatttaatgatgtacacttttcttacccctcacgggcgaacgtgaagatcctgaaagggctaaacctgaaagtgcaatccggccagacagttgcactggttgggtcatcaggttgcgggaaatcaaccactgtgcaactcatccagcggctttacgatcccgacgaaggaacaatcaacatagatggacaagatatacgaaattttaacgtgaactacttacgggagatcatcggggtagtttcccaggagccagtgctgttttccaccaccattgccgaaaacatttgttacgggaggggaaatgttactatggatgagatcaagaaagccgtaaaggaggcaaatgcctatgagttcataatgaaactcccccagaaattcgataccttggtcggcgaacgtggggcgcagctgtctggcgggcagaaacagcgtatagcaatcgcccgggcactcgtgaggaatcctaagatcctgttacttgacgaggcgacaagtgcactcgacactgagagcgaggccgaggtgcaggcagccctggataaggccagggagggcagaaccacaatcgtgatcgcgcaccgtttatccacggtccggaatgcagatgtgatcgctggcttcgaagatggggttatagtagagcaaggcagccatagcgagctgatgaagaaggagggggtctactttaagctggtcaacatgcagacatcgggcagccagattcagtctgaggagtttgagcttaatgatgaaaaagctgccacaagaatggcccccaatggctggaagagccgactctttcggcactctactcagaagaacctgaagaactcgcagatgtgccaaaaaagcttggacgtcgagacagatggtctggaggcgaacgtaccacctgtcagtttccttaaagtgctcaaattgaacaagactgagtggccttatttcgtcgtgggaactgtgtgtgccatagccaacggtggcctgcagcccgcattctccgtgatattctcagagatcatcgccatttttgggcctggagacgacgccgtgaagcagcaaaaatgcaatattttcagcctgatcttcctgtttctgggaatcattagctttttcacattctttttgcaaggatttacgtttggcaaagctggcgaaatcttgacgaggcggctgcgttcgatggcttttaaggccatgttgaggcaggacatgagctggttcgatgaccacaaaaactcaacgggtgctctgtccacccgccttgccacagatgccgcacaggtgcagggagccaccggaaccagactggctttaattgcgcaaaatattgcaaacttgggcaccggtattattattagcttcatctatgggtggcagctcacattgctcttgctcgccgtggtgccaatcattgccgtgtctggaatcgtggagatgaagttgctggccggcaacgcaaagcgagacaagaaggaactggaggccgctggtaagatcgcaacagaagctatagagaatattcggaccgtggtcagtctgacccaagaacggaaatttgaaagcatgtacgtagagaaactttacgggccttatcgcaattccgtgcagaaagcacatatctacggtattacgttttctattagtcaggccttcatgtacttcagttacgccggttgctttcgcttcggtgcctacctgatcgtgaatgggcacatgaggttcagagatgttatacttgtgttctcggccattgtgttcggggccgtcgcactgggccacgcatcgtctttcgcccccgattatgctaaggcaaagctctcggcggcgcacctctttatgcttttcgaacgtcagcccctcatcgattcctactccgaagagggactgaaacccgacaaatttgaagggaacattacgtttaacgaggtggtgtttaattatcccacgagagcaaatgtgcccgtgttacagggcctgtcacttgaagtcaagaaggggcagacactggctctggtgggctcttccggttgtgggaagagtaccgtggtgcagctgttggagcggttttacgaccctctggcagggacagtgtttgtcgacttcggattccagctgttggacggccaggaagccaagaaactcaatgtccagtggcttagggcccagctcggaattgtttcacaggaacctatcctgttcgactgctccatcgccgagaatatcgcgtatggtgacaactcaagggtggtttcccaagatgaaatagtatccgctgcaaaagctgcaaacatccacccttttatcgagaccttaccgcataaatatgagacccgtgttggcgataagggcacccagctgagtgggggccagaagcaacgaatcgccattgcgcgcgctctgattcggcagccacagattttattgttggacgaggccacttctgccctggatactgaaagcgagaaagtcgtacaggaagccctcgacaaggcccgcgaaggacggacgtgcattgtcatcgctcatcgccttagtacaatccaaaatgctgaccttattgtggtgttccagaacggaagagtcaaggagcatgggactcatcagcagttgttggcacagaagggaatttatttcagcatggtgtccgtgcaggccggcacccagaacctg

SEQ ID NO: 200165 - DNA, 3858 bp, Artificial Sequence
  derived and/or modified sequence
atggatttggaagccgcaaagaacggaacggcgtggcgcccgacttccgcagaaggagacttcgagctgggcatatcatcgaagcaaaaacgaaagaaaactaagactgtgaagatgatcggtgtccttacccttttcagatacagcgattggcaagataaactgtttatgtcacttggcactattatggccatcgctcatggatcagggcttccactgatgatgattgtctttggtgaaatgaccgataagtttgtggatactgcaggaaacttctcttttcctgtcaacttctccctgagccttctgaaccctggaaagattcttgaagaagagatgaccagatacgcatactactactcaggacttggggccggagtgctggtggcagcatacattcaagtatccttctggaccttggcggcgggtaggcagattcgaaagatccgtcagaagttttttcacgcaattttgcggcaagaaatcggctggtttgacataaacgatactaccgagctcaacactcgtctgacggatgatattagcaagatatcggagggaattggagacaaggtcggaatgttttttcaagccgtggcgacctttttcgccgggtttatcgttggttttatcagaggttggaagctgacccttgtcattatggcaatcagccctattctgggacttagcgcagcagtttgggcaaagattctgtccgcattctccgataaggagctggctgcatacgcgaaggcaggcgcagtggcagaagaggcacttggcgccatacgtactgtgattgcgtttggtggacagaacaaagaactggaacgctaccagaaacatctcgagaacgcaaaagaaatcgggatcaagaaggcaatcagcgccaacatctccatgggtatcgcgtttctgcttatctacgcatcctacgcacttgcattttggtatggttcgaccctcgttattagcaaggaatatacgataggtaacgctatgaccgtctttttctccatcctgattggcgcattttcagtggggcaggcagccccttgcattgacgcctttgccaacgcacggggtgccgcatacgtcatctttgacattattgacaataaccctaaaatcgacagcttttcggagcggggacacaagcctgattcgatcaagggcaacctcgagtttaacgatgtgcatttttcctacccatcgagggcaaatgtgaagattcttaagggcttgaatctcaaggtgcaaagcggccagactgtagcacttgtcggatccagcgggtgtggtaaaagcactaccgtccaactgatacaacggttgtacgacccagacgaaggcaccatcaatattgacggtcaagatatccgaaatttcaacgtgaattaccttcgggagattatcggtgtggtgtcgcaggagcctgtgctgttttccactactattgcagaaaacatctgttacggtaggggaaacgtgactatggacgaaatcaaaaaggcggtgaaggaagcaaacgcatacgagttcattatgaagctccctcaaaagtttgatactctggtgggagagcgcggggctcaactttcgggaggacagaaacaacggatcgcaatcgcaagagcactggtgcgaaatcccaagattctgctgctggacgaagccacttcggccctcgataccgaatcggaagcagaggtccaagcggcacttgataaggcacgtgagggtaggactactatcgtgattgcacatcggctttcgaccgtccgaaatgctgatgttattgcaggattcgaagatggagtcatagtggaacaaggtagtcattccgagttgatgaagaaggaaggtgtgtactttaaacttgtcaatatgcaaacctctggaagccagattcaatccgaagagtttgaactgaacgacgagaaagcagcaacgaggatggcccctaacggatggaagtcaagattgtttaggcattcaactcagaaaaaccttaagaattcgcagatgtgtcaaaaatcgctcgacgtggaaaccgatggactggaagcaaatgtgccaccagtcagctttctcaaggtcctgaaacttaacaagacggaatggccatactttgtcgtgggtaccgtctgcgcaatcgcaaatggaggactgcaacctgcgttttcggtgatattctctgagataattgcaattttcggaccaggcgatgacgcagtgaagcaacaaaagtgtaacattttctctctgattttccttttcctgggtattatctccttctttactttctttctgcaaggctttactttcggtaaagcaggtgaaatcttgaccagaaggcttcggtccatggcctttaaagcaatgctgcgacaagatatgtcgtggtttgacgaccataagaactccaccggcgcgctgtcgaccaggcttgcaactgatgcggcacaagtccaaggagcaaccggtacccgcttggcgcttattgcccagaacattgcaaacctgggcaccggtattatcattagcttcatttacgggtggcagctcaccctgctcctcctcgcagtggtgccgataattgcagtgtccgggattgtcgaaatgaagttgctcgcagggaacgccaaaagagacaaaaaagaactcgaagcagcggggaagatagcaactgaagcaatcgagaacattcggactgttgtctcactgactcaagaacgaaagttcgaatcgatgtacgtggaaaaactgtacggtccatatcgcaatagcgttcagaaggcacacatctacgggattactttctcgatcagccaggccttcatgtactttagctacgcaggttgctttcggtttggagcataccttatcgtcaatggccacatgagatttcgcgatgtgattttggtgtttagtgcaatcgtttttggtgcagtggcactgggacatgcatccagttttgcacctgattacgcaaaagcaaaactgtcagcggcccatttgttcatgttgtttgaacgccagcccctcattgattcatactccgaggaggggctgaagcctgataagtttgaaggcaacataacttttaacgaggtcgtgtttaactacccaacgagagcaaatgtccctgtgcttcagggactttcccttgaggtgaagaagggacagactcttgcactggtaggaagctcaggatgtgggaagagcaccgtggtgcaattgcttgaaaggttctacgacccgcttgcaggcactgtgtttgtcgacttcgggttccaactgctcgatggacaggaagcgaagaagttgaacgtgcagtggctgagggcccaacttggcattgtgtcgcaagaacccatattgttcgactgcagcatagcagaaaacattgcgtacggagacaattcccgggtcgtgtcccaggacgaaatcgtctcggcggcgaaagcagccaacatccacccctttattgaaacccttccgcataagtacgaaacccgcgtgggtgataagggtacccagttgagcggagggcagaagcagagaattgccattgcccgagcccttatcagacagcctcagatcctgctgctggatgaagccacttctgcgcttgataccgagtcagaaaaggtggtgcaggaggccctggataaagcacgggagggacgcacctgtattgtcatcgcacaccggctctcaaccattcaaaacgccgatcttatcgtcgtctttcaaaacgggagggtgaaggaacacggcacccatcagcagctgctcgcgcaaaagggtatttacttttccatggtgtcagtgcaagcaggcacccagaacctt

SEQ ID NO: 200166 - DNA, 3858 bp, Artificial Sequence
  derived and/or modified sequence
atggacttggaggctgctaagaatggcacagcatggcgccctacgtccgctgaaggggacttcgagctgggcatctcctctaaacagaagagaaagaaaactaagacagtgaaaatgatcggagtgctgacattattccggtattcagactggcaggataagctcttcatgtccctcgggacgatcatggcgatagcacatggctccgggcttcctttgatgatgattgtcttcggggagatgaccgataaattcgtagacactgccggaaacttctctttcccggtgaatttctcactcagtttgctgaatcccggaaagatcttggaagaagagatgacacgatacgcatattattatagtggcctcggtgcaggagtcctggttgctgcctatatacaagtgtctttttggacactggccgctggccggcagatcagaaagattcgccagaagttttttcatgccattctgaggcaggagatcggctggtttgacattaatgataccactgagctaaacacaaggttgaccgatgatattagcaagatttccgaggggatcggggacaaggtaggcatgttttttcaggctgtggcaactttttttgcaggtttcattgtcggatttattcggggctggaagttgactctggtaattatggctatttcccccatactgggactgagtgccgccgtgtgggccaaaattctgtctgccttctctgataaagaactggccgcttatgcaaaggccggcgccgttgctgaagaggcgcttggagctatccgcacagtaattgccttcggggggcagaataaagaactcgagaggtaccaaaagcatctcgagaacgcaaaggaaatcggtatcaagaaggctatctccgccaacatcagcatgggcattgccttccttctcatttatgcgtcctatgccttagcattttggtatgggtctacgctggtcatttctaaagagtatacaatagggaacgctatgaccgtattcttctccatccttatcggagcattttcagtaggtcaggctgccccttgcatagacgctttcgctaacgcgcgtggtgctgcctatgtaattttcgacataatcgataacaatccgaaaatcgacagctttagcgaacggggtcacaaacccgatagcataaaaggcaatctggagttcaatgacgttcatttttcctatccttcaagagctaatgtgaagattctgaagggcctgaacctaaaggtgcagagcggccagaccgttgctctcgtcggaagcagcggttgcggcaagtctactaccgtccagctgattcagcgcctgtacgatccggatgaagggaccatcaacatagatggacaggatatacggaactttaatgtgaactatctgcgggagatcataggggttgtgtcgcaagagcccgtgctctttagcacgacaatcgccgagaacatctgttatgggcgtgggaatgtcactatggacgaaattaaaaaggccgtcaaagaagcaaatgcctacgaattcatcatgaaactgccgcagaagtttgatacccttgtgggagagcggggcgcccagctgtctggaggtcaaaaacagagaatagccatcgctagggcccttgttagaaatcccaagatcctgttgctggacgaagcgacaagtgctcttgatactgagtccgaagcagaggtgcaggcagctcttgataaagcacgggaggggagaacaaccattgtgattgcacacaggctttccaccgtgcggaacgcagacgtaatcgctggctttgaggatggcgtaattgttgagcaggggtcacattcagagctcatgaagaaagagggtgtgtatttcaagctcgtcaatatgcagactagtgggagccaaatccagagcgaggagtttgagctcaatgatgagaaagctgccacccggatggctcccaatggttggaaatcgaggctgttccgccattcgacacagaagaacctgaagaactctcagatgtgccagaagagtctggacgtggagactgacggtctagaggccaatgtacctccagtttcgtttttgaaggtactcaaactgaataaaacagaatggccctattttgtggtgggcactgtatgcgcaatcgcaaacgggggtctgcaacccgccttttcagtgatattctcagagattattgcaattttcggccccggggatgatgccgtgaagcaacagaaatgcaacattttttctctgatttttttgttcctggggattatctcattcttcactttttttcttcaggggtttacattcgggaaggccggggaaattttgaccaggaggctccggtctatggcctttaaggccatgcttcgtcaggatatgagttggtttgatgaccataaaaactcaaccggcgctctttccactagactggccacggacgccgcgcaggtccagggggctaccggcactagattggctcttatcgcccaaaatatcgccaatctaggtaccggaatcattatttccttcatttatggatggcagctgactctgctactcttggcagtcgtgcctatcattgccgtgagtggaatagttgaaatgaaattgctcgccggcaatgcaaagcgagataagaaggaactagaagcagccggaaagatcgcgacggaagccatagaaaacatacggactgtggtctccctgacacaggagagaaaatttgagagtatgtatgttgagaagctgtacggcccctatcggaatagcgtacagaaagcgcacatatacggcattacttttagcattagtcaggccttcatgtatttctcctatgctgggtgcttccgctttggcgcctacctgatagtgaacggccatatgcgttttcgggatgttattttggtgttttccgctatcgtattcggagccgttgctcttgggcacgccagtagctttgcaccagactatgccaaggccaagctgtctgccgctcatttattcatgctgttcgagaggcagccgctcattgacagctatagtgaggaaggcctgaaacctgacaagttcgagggaaatatcaccttcaacgaggtggtgtttaattaccccactagagccaatgtacccgtcctgcaggggctcagcctagaggtgaaaaaaggacagactctcgcgctggtcggatcctctgggtgcgggaaatcaacagtcgtccagctgctcgagaggttctacgatccgctggcagggacagtattcgtcgattttggtttccaactgttggatgggcaggaggccaagaaactgaatgtgcagtggttacgggctcagttgggtattgtgtctcaagaacccatcctgtttgattgctccatcgctgaaaacattgcgtatggggataactctcgggtggtctcccaggatgagattgtatcagcggctaaggccgctaatatccacccttttatcgagactctacctcataagtacgagaccagggtcggcgacaaaggcacacaactctctggcggacagaaacagcgaatagcaatcgcgcgtgccttaattaggcaacctcagatattattactggacgaagctacttcagctctggacaccgagtcagagaaggtagtccaagaggccctggataaagctcgcgagggtagaacatgcattgtgatcgcacaccggctatccactattcagaacgccgatctgatcgtggtgttccagaatggtagggtgaaggagcacggaacacaccagcagctgttagcacaaaagggcatctacttctctatggtctcagtacaggcaggcactcagaatctt

SEQ ID NO: 200167 - DNA, 3858 bp, Artificial Sequence
  derived and/or modified sequence
atggacttagaagcagccaaaaatggaactgcttggcgccctacctctgcagaaggcgactttgagctgggtatctccagtaagcagaagcgtaagaaaacaaagactgtaaagatgatcggcgtccttacattgttccgttactcggattggcaggacaaactgttcatgagtttaggaactattatggctatagctcatggtagcggtcttcccctcatgatgatcgtatttggggagatgaccgacaagtttgtggataccgcgggaaacttcagcttccccgtgaacttttccctgtccctactgaaccccgggaagattctggaagaagagatgactcggtatgcatactattactccggtctgggcgccggtgtgctcgtcgccgcttatatacaggtctcgttttggacactcgcagcggggaggcaaattcgtaagatacggcaaaagtttttccatgccattctgagacaggaaattggctggtttgacattaacgatacgaccgagcttaacacccggctgaccgatgacatcagcaaaatcagtgaaggcattggtgacaaggtggggatgttctttcaagcggtggctactttcttcgccggttttatcgtgggattcatacgcggatggaaactcaccctggtgatcatggccatttctccaatccttgggctgtctgccgctgtatgggccaagatactgtccgcattttctgacaaggaactagcagcatacgcaaaggcaggggccgtggccgaggaagcacttggtgctatccgtacagtgatagccttcggagggcagaacaaggagttggagagatatcaaaaacacctcgaaaatgcgaaggaaattggcatcaagaaggctattagcgctaatatatctatggggatcgccttcttgctgatctacgcctcttatgctctggcattttggtatggtagcaccctggttattagcaaagagtacactattggcaatgctatgaccgtgttcttctctattttgatcggcgcattttctgtgggacaagccgcgccgtgtatagacgcgtttgccaatgcgaggggagctgcctacgtcatctttgacattattgataacaacccgaaaattgactccttttctgaacgcggccataagcccgactctattaagggcaacctagagttcaacgacgtgcacttctcatatcctagtagggccaatgtcaagatactgaaaggtctcaatctcaaggtacaatctggtcagacggtggcactggtcggatcttccggatgtgggaaaagcaccaccgtgcaactgatccagcggctttatgacccagacgaggggacaatcaatattgacggccaggacatcagaaacttcaacgttaactatctgcgggagattatcggcgtcgtgtcgcaggagcccgtgctattctcaactacgatcgccgaaaatatctgctatggaaggggtaacgttacaatggacgaaattaaaaaagctgtgaaggaggcaaatgcttacgagtttatcatgaaactaccccagaagtttgacaccctggtcggggagcgcggggcccagctgtccggcggccagaagcagcggatcgcaatagcgcgggctctcgtccgcaatcccaagattttgttgctggacgaggctactagcgctctagatactgagtccgaggccgaggtgcaggcagcgctcgataaagcacgggagggccgtaccaccatcgtcatcgctcatagactttccacagtgcggaacgctgacgtgattgccgggttcgaagacggggtgatcgttgagcaggggagtcattctgaactaatgaaaaaagaaggcgtctattttaagctggtcaacatgcagaccagcgggtctcagatccagtcggaggagttcgaactcaacgacgagaaggcagccactcggatggccccaaacggatggaagtccagacttttcagacacagcacccagaagaacctgaaaaactcccagatgtgccagaagtcactggatgtggagaccgatggattagaggcaaacgtgccacctgtgagtttcctgaaggtcctgaagctgaacaaaacagaatggccgtattttgtcgtgggaacagtgtgcgctatcgctaatggcggcttgcagcccgcattctcagtgatcttctctgagatcatcgccatctttgggcccggagacgacgcagtgaagcagcagaagtgtaacattttcagcctgattttcctgttcctgggaatcatcagtttctttacctttttcctccaaggttttacctttggcaaggcaggagaaatcctgactagaaggctacgcagcatggcctttaaagccatgctgcggcaggatatgagttggttcgatgatcacaagaatagcacaggggccttaagcacacggctggccaccgacgcggctcaggttcagggagccacgggcaccagactggcgctcatcgcacagaacattgccaatctggggactgggataatcatatcctttatctatggatggcagctgacactgctgctgttggctgtggtgcccattatcgctgtttcaggcattgtggagatgaaacttctggcagggaatgcaaaacgagataaaaaagaattagaggccgccggaaaaattgccaccgaggctatcgagaatatccgaactgtggtctctttaacacaggagcgaaaatttgagtcgatgtatgtagagaaactctacggtccatacaggaactccgtacagaaagcacacatttatggcataacgttttctattagtcaggcttttatgtatttttcttatgccggctgttttcggttcggcgcatatctgattgttaacggacatatgcggttccgggatgtcattcttgtcttctcagcaatcgtttttggggcagtcgcgctaggccatgccagttccttcgctccagattacgccaaagctaagctgagcgccgcccacttgttcatgctatttgaaaggcagcctttgatcgactcctattctgaagaggggcttaagcctgacaagtttgagggtaacatcactttcaatgaagttgtattcaactacccaactcgcgctaacgtaccagtgctgcaaggcctctctcttgaggtgaaaaaaggtcagaccctcgccttagtgggatctagcggatgcgggaagtcaacagtggttcagctgctggagagattctatgacccactggccggtacagtttttgtcgacttcggctttcaacttctggatggtcaggaggccaagaaactcaacgtacagtggctcagggcacagctcggcatcgtctctcaggaacccattcttttcgattgtagcattgctgagaatatagcatacggggacaattcgcgggtcgttagccaagatgagatcgtgagtgccgccaaggctgctaacatccatccctttattgaaaccctaccccacaaatacgagacacgcgtgggcgataaaggtactcagctgagcggagggcagaaacagaggatagccattgctagggccctaatcaggcagccacaaattttactgttagatgaggccactagcgcactcgacaccgaatccgagaaggtcgtgcaggaggcactcgacaaagctcgggaaggacgcacatgtattgtcatcgctcaccggttgtccaccatccaaaacgccgacctcattgtcgtgtttcagaacgggagagttaaagagcatggcacccatcaacagttgttagcgcagaaggggatatacttcagcatggtgagtgtacaagccgggacccagaatttg

SEQ ID NO: 200168 - DNA, 3858 bp, Artificial Sequence
  derived and/or modified sequence
atggacctggaggcagccaagaacggaaccgcctggcggcctacatctgccgaaggcgattttgaactcggaatctcttcaaagcagaagcgaaagaagaccaagacagtgaagatgatcggagtccttactctctttcggtacagcgattggcaggataagctcttcatgtctctcggcacaataatggctatcgctcacggttcaggcctgcctcttatgatgattgtgttcggagaaatgaccgataagtttgttgacactgcagggaacttttcttttcccgtcaatttcagtttgtccttacttaaccccggcaagattctggaagaggagatgacccggtacgcctactattactccgggctgggagccggtgtgcttgtagccgcttatatccaggtctcgttctggactcttgccgccggccgccagattcgcaaaatccgccaaaaatttttccacgccatcttgcggcaagagatcggctggttcgacatcaatgatacgacggagctgaacacccggcttacagatgatatctcaaaaatttcagaaggcatcggagacaaagtgggaatgttttttcaggcagtggccactttttttgccgggtttatcgtcggctttatcaggggctggaagctgacccttgtgattatggccatttcccccattctcggcctgagcgcagcggtgtgggcaaaaattctttcagcctttagtgataaggagctcgctgcttatgccaaagcaggcgctgttgccgaagaggccttgggagcaattcgaacagtgatcgctttcggagggcaaaataaggagctggagcgatatcaaaaacacctggaaaacgccaaagagatcgggatcaagaaagctatctctgccaacatcagcatgggaatcgcttttctattgatttacgcctcttatgcccttgctttctggtatggctcaacactggtaatcagtaaagagtacactatagggaacgcgatgaccgtcttctttagtattctgatcggtgcatttagcgtaggacaggctgccccttgcatcgatgccttcgctaatgcccgtggcgctgcctatgtcatcttcgacatcattgacaacaatccaaaaatagattccttcagtgagagggggcataaaccagatagcattaagggcaatttagagttcaatgatgtccatttcagttatccttcgcgcgctaacgttaaaattctgaaaggactaaacctgaaggttcagtctggccagaccgttgcccttgtcggcagcagcggttgtggcaagtccactactgtccagcttatacagagattatatgatcccgacgagggcaccatcaacatcgacggccaggatatccggaactttaacgtaaattacctgcgagaaatcataggagtggtttctcaagagccagtgctgttctctacgaccatcgccgaaaacatctgttatgggcggggcaacgtgaccatggacgagattaagaaggctgtcaaagaggccaatgcatatgagtttattatgaagttgcctcagaaatttgacacactagtaggggagcgaggagcacagctgagcgggggtcagaaacagcgcattgccatcgcccgcgccctggtgagaaaccctaaaattcttctgctagacgaagccacctcagcgttagacacagaaagcgaagcagaggtgcaggccgcgttagacaaggcacgcgagggtcgcacaacaatcgtgattgctcaccgcctgagcactgtgagaaatgccgacgtgatcgcaggatttgaagacggcgtgatagtggaacaagggagccattccgagcttatgaagaaagagggagtctatttcaaattggttaacatgcagacctccggctcccaaattcagtcggaagagttcgagcttaatgatgaaaaggccgctacccggatggcccccaacggttggaagagccgcctctttcggcactctactcagaaaaacctcaagaactctcagatgtgccaaaagtcattagacgtcgaaaccgatgggttggaggcaaatgtccccccggtaagctttttaaaagtcctgaaactcaataaaaccgagtggccttactttgtcgtgggcacagtgtgcgcaatcgcgaacggaggcttacaacccgctttctccgtgatcttctctgaaatcatcgctatcttcggccccggtgatgatgccgtcaagcagcagaaatgcaacatcttttccctcatcttcctgtttctgggcatcatcagcttctttaccttcttccttcaggggtttacttttgggaaggccggcgaaatcctcacaaggagactgagaagtatggccttcaaggcaatgctgcgccaggatatgagctggtttgatgaccacaagaatagtaccggggctttgtccacccggcttgccacagatgccgctcaagtgcagggcgccaccggcacgcgcctggccctgattgcacaaaatatcgccaacctggggaccggaataataatatcctttatctacggatggcagcttaccctgctcttacttgctgttgtacctataatcgctgtctccggcatagtggaaatgaagttgctggccgggaatgctaaaagagacaagaaagagctggaagcggccggcaaaattgcaacggaggcgatcgaaaacatacgaacagttgtgtctttgactcaggagaggaagtttgagtcaatgtatgtggagaagctgtatggtccgtacagaaactcggtacaaaaagctcatatatacggtattaccttttccatcagccaggcctttatgtacttcagttatgctggctgttttaggttcggcgcgtatctgatcgtcaacggccacatgcgctttcgggacgtcatccttgtgttcagcgctatcgtgtttggtgccgtggccctggggcatgcctctagctttgctcccgattacgctaaggccaagctaagcgcagcacatttattcatgttattcgagcgtcagccccttatcgactcatattccgaggagggcctgaagccagataagttcgaaggcaatattacgtttaatgaagtggtcttcaactaccctacaagggccaatgtgccggtgctgcagggtctctctctggaagttaagaagggtcagacactggcactggttggcagttcgggctgcggtaagagtaccgtcgttcaactgctcgagcggttctatgatcccctggcaggaacagtctttgtggattttggatttcagctgctggatggacaggaagctaaaaagctgaatgttcagtggttgcgggcgcagttgggcatcgtgtcacaagagcccatcctgttcgattgctcaatcgctgaaaacatcgcatacggcgataattcccgggtagtgtcccaggacgaaattgtttcagcggccaaggccgctaatatacacccatttatcgagacgcttcctcataagtatgaaacccgagttggcgacaagggtacccagttatcaggaggacagaagcagaggatcgccatagccagggccctcattcggcagcctcaaatcctcttgctggatgaagctacatccgctctggacacagagagtgagaaggtggtccaggaggctctggataaggcccgggaagggcggacttgcattgtgatcgcccaccgattatcaacaatacaaaacgcggacttgattgttgtgttccagaatggacgcgtgaaggagcacggcacacatcagcagctgctcgcgcagaagggtatctatttctcaatggtttcggttcaggcagggacacaaaactta

SEQ ID NO: 200169 - DNA, 3858 bp, Artificial Sequence
  derived and/or modified sequence
atggacttggaggcagcgaaaaatggtactgcatggcgccctacatctgccgaaggtgacttcgaattgggcatttcatcaaagcagaagcggaagaagactaaaacagtcaaaatgattggagtcctgactctcttcagatatagcgattggcaggacaaattgttcatgtctcttggcactataatggcaatcgcccatggtagtggactacctttgatgatgatcgtgttcggagaaatgacagacaagttcgtggatacagccggcaatttctccttccctgtgaacttctctctttcactgctaaacccggggaaaatcctcgaggaagaaatgacgagatatgcgtactactacagtggtctgggagcgggtgtgctggtggcggcctacatccaggtgtccttctggactttagccgctggacggcagattagaaagatccggcagaagttttttcacgctattctcagacaggagattggctggtttgacattaacgacacgactgaactgaatactcgcttgaccgacgacatttccaaaatatccgaggggattggagataaggtgggaatgttcttccaggctgttgctactttctttgccggcttcatagttggtttcattagagggtggaagctgaccctggtgattatggccatctctcccatcctagggctgtccgcagccgtatgggccaaaatactgtccgctttcagcgacaaagaactggctgcatatgccaaggcgggagccgtggctgaagaggcattaggtgccattcgaaccgtgatagccttcggcggccagaacaaggaacttgagcggtaccagaagcacttggagaatgctaaagaaattggtataaagaaagccatctccgccaatatctccatgggcatcgcatttctcctcatttatgcctcttacgctcttgctttctggtacggaagcacactggttatctccaaagagtataccattggaaatgccatgacagtgtttttctctatcttgataggggcttttagtgtcgggcaggccgccccatgtatcgacgccttcgctaacgccaggggtgcagcctatgtgatatttgatatcattgacaataacccgaagatcgactcattcagcgaacgcggccataagccagacagcatcaagggcaatctcgaattcaatgatgtccatttctcataccctagccgggccaacgttaagatccttaaaggactgaacctaaaggtgcagtcgggccaaaccgttgcactggttgggagtagcgggtgcggtaaatccactaccgtgcagctcatccagagactgtatgaccctgacgagggcacaatcaacatcgacgggcaggacatccggaacttcaacgtgaattacctgcgcgaaataattggagttgtatcacaagagcccgtcctgttcagtacaaccatcgccgaaaacatttgctacggcagaggcaacgtaaccatggatgagattaaaaaggccgtcaaagaagccaacgcttatgagtttatcatgaagttgccacagaagttcgataccctggtgggcgagcggggagcccagttgagcggggggcaaaaacagaggattgcgatcgcccgcgctctagtccgcaatccaaagatcttacttctggatgaggccactagtgctcttgatacagaatccgaagccgaggtgcaggccgccctggataaggcccgggaaggacgcactaccatcgtgatcgcacatcgcctgtctacagtgaggaatgcggatgtgatagctggcttcgaagatggcgtgattgtggaacaggggagccacagtgagttgatgaagaaggaaggggtgtacttcaaactggtgaatatgcagaccagcggcagtcagatccagagcgaagaattcgagctcaacgatgaaaaagccgccacacgcatggcacctaacggctggaagtctcgtctctttcgccactctacccagaaaaacctcaagaattcacagatgtgtcagaagagccttgacgtggaaacggatggactcgaagctaacgttccccctgtctcatttcttaaggtactgaaactgaacaagactgagtggccgtacttcgtggtcggtacagtctgcgcaatcgccaatggcggcttacaacctgccttttcggtgattttcagcgaaatcatcgcaatctttggccctggcgacgatgcggtgaaacaacaaaaatgtaacatattcagcctgatcttcctattccttggcattataagtttcttcactttttttctgcaagggtttacctttggcaaagccggggagattctgaccaggcggctgaggtcaatggctttcaaagctatgctccggcaagatatgtcttggtttgatgaccacaagaacagcacgggcgcactgtctacaaggttggcgacggacgcagctcaggtgcaaggagctactggtactcgtttggctttgattgctcagaatatcgcaaacttgggcacaggaatcatcatttcctttatatacggctggcagctgacactcctcttacttgccgtggtgccgattatcgcggtgagtggaatagtggagatgaagttacttgcaggaaatgccaagcgcgacaagaaggaacttgaagctgcaggcaagatcgctacggaagccatcgagaatattagaacagtagtctctcttacccaggagagaaagttcgagtcaatgtacgtcgagaaattatatgggccctacaggaattccgtgcagaaggcccatatttacggcataacgtttagcatctcacaggctttcatgtatttcagttatgccggttgcttccgatttggtgcctacttgatcgttaatggacacatgcgcttccgtgacgtgatcctggtgttttccgccattgtgttcggcgccgtggccttgggccacgcttctagttttgcacctgactatgccaaggccaaactctcagcagcccatctgtttatgttgtttgaaaggcagcccctgatcgactcatatagcgaggaggggctaaaaccagacaagttcgaaggaaacatcaccttcaacgaggtcgtgttcaactaccccactcgcgccaacgtccccgttctccaggggttgagtctggaagtcaagaagggccaaaccttggcccttgtgggctcatctggatgtggaaaatccacagtggtacagctgctcgaaaggttttatgacccactcgctggcacggtgtttgtcgatttcggcttccaactgcttgacggtcaggaggccaaaaagttaaacgtccaatggctgcgcgcccaactgggaatcgtgagccaggaaccgatccttttcgattgttccatcgctgaaaatatcgcttacggagataactcccgcgtggtctctcaggatgaaattgtttccgcggcaaaagctgcgaacatccatccattcatagaaacgctgccccataagtacgagacccgggtcggtgacaagggaacacagctgagcggggggcaaaagcaacgcatcgccattgcgagagccctgatcaggcagcctcagatcctcctgctggacgaggcaaccagcgccctggatacagagagcgaaaaagttgttcaagaggccctggataaggctcgagaaggacggacttgcatcgtcattgcacaccggctgagcactatacagaatgctgatctgattgtcgtgttccagaacggccgggtgaaggaacacggaacccatcagcagctgctggcacagaagggtatttacttcagtatggtgtcagtgcaggctggcacccaaaatctt

SEQ ID NO: 200170 - DNA, 3858 bp, Artificial Sequence
  derived and/or modified sequence
atggatctggaggctgccaagaacggaacggcctggcgccccaccagtgccgaaggagatttcgagcttggcatatccagcaaacagaaacgcaaaaaaaccaagaccgtgaaaatgataggggtgcttacccttttccgctactctgattggcaggacaaacttttcatgagcttgggtacaatcatggccatcgctcatggcagcggtcttccactgatgatgatagtgttcggggagatgacggacaagtttgtcgacacagcagggaatttctcatttcctgtgaatttttccctcagtctcctcaatccggggaaaattctggaagaggagatgaccagatatgcttactactattcaggcctgggagctggtgtgttggtggccgcatacattcaggtttcattttggacgctggctgctggtaggcagattaggaagattagacaaaagtttttccacgccatcctgaggcaagagatcggttggtttgatatcaacgataccacagagttgaacaccagactgacagatgacatcagtaaaatttccgagggtataggcgacaaggtcggcatgttctttcaggcggtggctacgttcttcgccggctttatcgttggattcatcagagggtggaaactgacactggtgattatggccattagcccaatcctggggctgagtgccgccgtttgggctaagatcctctccgccttcagcgacaaggagctcgccgcgtatgctaaggccggggcggtggctgaagaggctcttggcgcaatccggacagtgatcgccttcggaggccagaacaaagagttggagaggtatcagaagcaccttgaaaacgccaaagagattggaattaagaaggcgatcagtgccaatatctccatgggaatcgcgtttctcctgatttacgcctcatatgctctggctttctggtatggatctactctggtgatttctaaagagtacacgatcgggaatgccatgaccgtcttcttctccattctcatcggtgcgttcagtgtcggacaagcggctccctgcattgatgctttcgccaatgcccgcggggcagcatatgtgatcttcgacataattgataacaacccaaagatagattctttcagtgagcgcggccacaaaccagatagtatcaaagggaatcttgaatttaacgatgtgcacttttcctacccatctcgcgccaacgtgaagattctcaagggcctgaaccttaaggtacagtcaggtcagaccgttgcattggtcggcagttccggctgcggcaagtccactactgtgcaactgattcagcgcctgtacgaccccgatgaaggtaccatcaacattgatggacaagacatccgcaattttaatgtcaactatctgagggagataatcggggttgtgtcccaggaacccgtcctgttttctactaccatcgccgaaaatatctgctacggccgaggcaacgttacaatggatgagatcaaaaaggccgttaaagaggccaacgcctacgaattcatcatgaagttgccacagaagttcgatacacttgtgggcgagcggggggcccagctctctggcggccagaaacagaggattgccattgcccgggccctggtgaggaacccgaaaatcctgttgttggatgaagcgacatctgcccttgataccgagtccgaagccgaggtgcaagcagctctggataaggctcgagagggcagaactacaatagtgatcgcgcatagactcagcacagttcgaaatgccgacgtcatcgctggttttgaagatggagtgattgtggaacaaggtagtcattctgaactcatgaagaaggagggagtctactttaagctcgtcaatatgcagacatctgggtcacaaattcagtccgaggaatttgaactgaacgatgagaaggctgccacacggatggccccgaatggctggaagagccggctgtttcggcacagcacacaaaagaacctgaaaaactcccagatgtgtcaaaaaagtcttgatgtggaaacagacggcctggaagccaatgtcccgcctgtctccttccttaaagtcctcaagctgaataagacagagtggccctatttcgtggtcgggacggtttgtgccattgcaaatggtggactgcagccggccttctctgtcatattttcagagattatcgcaatatttggaccaggcgacgacgccgtaaagcagcagaagtgcaatatctttagtctcattttcctgttcctcggaatcatctccttctttacattcttcttgcaaggatttacttttggcaaggctggggagattctcactcggagactgagaagtatggcctttaaagcgatgcttcgacaagacatgagctggtttgatgaccataagaattcaaccggcgcgctgagcacccgactggccacagacgcggcccaagtccagggggctactggtactaggctcgctcttatcgctcagaatatagccaatctgggaacgggaatcataatcagcttcatttacgggtggcaactgacactgttgctcctggccgtagtgccaatcatagccgtgtctggcatcgtggagatgaaacttctcgcaggaaacgccaagcgggacaagaaggagctggaagcagccggcaaaatagctaccgaggccatagaaaacattcgaactgtggtcagccttacccaggagcgaaaatttgagtccatgtacgtggagaagctgtacgggccctaccgcaatagcgtccagaaagcccacatctacggcatcacattctctatttcccaggcgttcatgtatttctcatacgctggatgctttcggttcggcgcctacctgatagtgaatggacatatgcgctttagagacgtgatccttgtattttctgccatcgtgttcggcgcagtcgccctggggcatgcctcaagttttgctccggactacgccaaagccaagctttccgcggcacacctgttcatgctgtttgagcgacagcctctcatcgattcatactctgaggaaggactgaaacccgacaagtttgagggcaatattacctttaacgaagtagtattcaattacccaacaagggccaacgtgcctgtgttgcagggcctcagcctggaggtaaaaaaaggccagacgctcgccctggtgggtagctctggatgcggcaaaagtactgtagtccagctcttggagcgcttctacgacccattggccggaacagtatttgtggacttcggctttcagttgctggacgggcaagaggcgaaaaagctgaatgtgcaatggctgcgagcacagctgggcatcgtttcccaggaaccaatcctctttgattgctcaatcgccgagaacattgcatatggtgacaactctcgggtcgtctcccaggacgaaatcgtgagtgccgcgaaggccgcaaatatccacccgtttatagagactctgccgcataagtacgagacaagggtgggtgacaaggggactcaactctccggcggacaaaaacagcggattgctatcgcgcgggccttgattagacagccacagatcctcctgctggatgaagctacctctgcactcgataccgaaagcgagaaagtcgtgcaggaggcactggacaaggcaagagaggggcggacctgcatagtgatcgcccacaggctgagcaccatccagaatgcggacctgatagtggtctttcaaaatggccgcgtaaaggagcatggaactcatcaacagctgctggcacagaaaggtatatacttcagcatggtatccgtgcaagccgggacccagaatctg

SEQ ID NO: 200171 - DNA, 3858 bp, Artificial Sequence
  derived and/or modified sequence
atggacctagaggctgcaaagaatggcacggcttggagaccaacgagcgccgaaggtgactttgagttagggattagctccaagcaaaagaggaagaaaactaagactgtgaaaatgatcggcgtcctcacgttgtttcgctattcggactggcaagataaactttttatgtcccttggtaccataatggcaatagcacacgggagcgggcttccacttatgatgattgtttttggagaaatgaccgacaagtttgtggacactgccggaaactttagctttcccgtcaacttttccctttcgctcctgaacccaggaaaaatcctggaagaggaaatgacacgatacgcttattactacagtggtctcggcgccggagttctggtagcagcttatatccaggtgtctttctggacgttggcagctggccgccagatcaggaagattcgacagaaattcttccacgcgatcctcagacaggagatcggttggttcgatatcaacgacaccactgagttgaacacccgtcttaccgacgatatttccaaaatctccgagggtatcggggataaggttggtatgttcttccaagccgttgcaactttctttgccggttttattgtcggtttcattagagggtggaaattaacactcgtcataatggcaatctcgcccatcttaggcctatcggcggcagtgtgggcaaagatcctgtccgcttttagtgataaggaactcgctgcgtacgccaaggcaggggcagttgctgaggaagccctgggtgcgatccggactgttatcgcgtttggcggccagaacaaggaactcgagcggtatcagaagcacctagaaaatgccaaggagattggaattaaaaaagctattagtgctaacatctctatgggtatcgcctttttgctgatctacgcttcctacgctctcgcgttctggtatggctctactttggtgatttccaaggagtatactataggcaacgctatgaccgtcttttttagtatcctcattggcgcgttcagcgtgggccaagcggctccttgcattgacgcatttgctaacgctaggggtgctgcatatgtcatctttgacatcattgataacaaccctaaaatcgactccttttccgagaggggtcacaagcccgatagtattaagggaaacctggaattcaacgatgtccactttagttatccatcaagagcaaacgtgaagattctaaagggcttgaatctgaaagttcagtccggtcagacagtggcattggtgggcagttctggctgcggaaagagcactacggtacagcttattcaacgtctatatgatccggacgaaggaacgattaacattgatggccaggatatccggaattttaacgtcaattacctccgcgaaataataggagtggtttcacaggagcctgtcctgttttccacgactatcgcagaaaacatctgctacggccgaggtaacgtgaccatggatgaaattaagaaagcagtaaaggaggccaacgcatatgaattcatcatgaagttgccgcaaaaattcgatactttggtaggagaaaggggcgcccagctatcaggaggtcaaaagcagcgtattgctatcgcccgggcactcgttcgaaacccaaagatcctactgttagatgaggctactagtgctcttgacacggagtcagaagcggaggttcaggccgccctggataaagctcgcgagggacgtacaaccatcgttatcgctcaccggctctctacagttcgcaatgcagatgtgattgcaggatttgaggatggagtaattgtcgaacaaggtagccattctgaactgatgaagaaggagggagtctactttaagctggttaacatgcaaacttctggatcccaaatccaaagcgaggaatttgagctgaacgatgagaaggcggcgacacggatggcacctaacggatggaagtctagacttttccggcatagcacccagaagaatttgaaaaatagccaaatgtgtcaaaagtcgttggatgtcgaaaccgacggattggaagctaacgtcccacctgtttccttcctcaaggttttgaagctcaacaaaacggaatggccgtacttcgtcgtcggaaccgtctgtgctattgccaacggcggtttgcagccggcattttcggtaatttttagtgaaatcatagcaatcttcggccctggggacgatgccgtcaagcaacagaaatgtaatatcttttcgcttatcttcttgttcctcggcattatcagctttttcacctttttcctacagggattcaccttcggaaaggcaggtgagattcttacccgacgccttcggtctatggcattcaaagcaatgctgaggcaggacatgagctggttcgacgaccacaagaattctacgggtgccctttccactcgcctcgcaacagacgctgctcaagtgcaaggggcgacaggtaccaggctcgcgcttattgctcaaaatatcgcaaatctcgggacaggcatcatcatcagctttatatacgggtggcagttgaccctcctcctgctcgccgtcgtcccaatcattgcggtttcaggaattgtagagatgaagctactggcaggtaacgcaaagcgagataagaaagaattggaagctgcgggtaaaatcgccacggaggctatcgagaatatccgcactgtggtcagtctcacacaggagcgtaagtttgagtcaatgtacgtggagaagttgtacggaccgtaccgaaatagtgtgcaaaaagctcatatttacggcattacatttagtatctcacaggcattcatgtacttttcgtatgcgggctgcttccggttcggtgcctacttgatcgtcaatgggcatatgcggttccgagatgtgatcctcgtcttcagtgccatcgtgttcggcgccgtggcccttgggcacgcgtcttcgttcgctcctgactatgctaaggctaagctgtccgcagcgcacctgttcatgctatttgagcggcagccacttattgacagctatagcgaggaaggtctcaaacctgataaatttgaaggcaacataaccttcaatgaggttgtgttcaattacccaactcgagcaaacgtaccagtcctccagggcttaagcctcgaggtcaagaagggccaaacacttgctctagttggttcgtcaggatgcggtaagtccactgtggtgcaactccttgaacgcttttacgatcctctagctggcaccgttttcgtagacttcggatttcagttgctagatggccaggaagcaaaaaaactgaatgtccaatggcttcgggcccagctgggcattgtgtcccaagagcccattctcttcgactgctctatcgcggaaaatatcgcgtatggcgacaattccagggtcgtttcgcaagatgagatcgtctccgcggccaaagcggcgaacattcacccattcattgagactttaccgcataaatacgagacccgggtgggcgacaagggaacgcagctttccggaggtcagaagcaacgcatcgctatcgcaagagcactcatccgacaacctcagatattgttacttgatgaagctacgagcgccctggatacagagtctgaaaaggtggtgcaggaagcgctggacaaggcgcgagaagggcggacctgtatcgttattgcgcacaggcttagtaccattcaaaatgccgatctgattgttgtgttccaaaatggtcgcgtcaaggagcatgggacacatcagcagttgttagcacagaaaggtatctatttctcaatggtgtccgttcaagctggaactcagaacctg

SEQ ID NO: 200172 - DNA, 3858 bp, Artificial Sequence
  derived and/or modified sequence
atggatctcgaagcagccaaaaacgggactgcctggcggcccacatccgccgagggggatttcgaattaggaatttcctctaaacaaaaaagaaaaaaaactaaaacagtcaagatgatcggagttctaactctgttcagatatagtgattggcaggacaaactatttatgtcccttggaactataatggctatagcccacgggtcaggattgcctctgatgatgattgtcttcggagaaatgacagataaattcgtggatacagccgggaacttttccttccccgtgaattttagtctctctctccttaatcccggaaaaattcttgaagaagaaatgacgcggtacgcctactactattcaggactaggggccggagtgctagtggctgcctatatccaggtcagtttctggactctcgctgccgggaggcagatacggaaaattagacagaaattctttcatgctatacttcggcaggaaatagggtggtttgatatcaacgacacaactgaactcaacactcggctcacagatgatatctcaaaaatatccgaagggataggagataaagtcggaatgtttttccaggctgtggccacattttttgccgggtttatagttggattcatccgggggtggaaactcactcttgtgattatggcaattagtcctatccttggactgagtgctgcagtgtgggctaagatcctctcggccttctccgacaaagaactagccgcttatgccaaagccggggcagtagccgaggaagcccttggggccatcaggacggtgatcgcctttggagggcagaacaaagaattagagagataccagaagcaccttgaaaatgccaaagaaataggaatcaagaaggcaatatctgccaatatctccatggggatagcattcttacttatctatgcatcttacgccctcgctttctggtatgggtctactttagtgatatcaaaagaatatacaatcggaaacgctatgactgtctttttttctatccttattggagccttttccgtcggacaagctgccccctgtatcgatgcttttgccaacgctagaggagctgcatatgtcatcttcgacattatagataataatcccaaaatagactcattcagtgaacgagggcacaagccagattcaattaaagggaatttggaattcaatgacgtacacttctcctacccttctcgggcaaacgtgaaaatcttgaaagggctcaacctgaaggtgcaatctgggcagacagtggccctagttgggtcttctggatgtgggaaatctacaactgtccagctcatacagcggctctacgatcccgatgaagggactatcaacatcgatgggcaggacatcagaaacttcaatgtgaactatcttagggagattataggagtggtgtcccaggagcctgttctattctcaactacaattgctgaaaacatatgttatggacggggaaatgtaactatggatgaaataaaaaaagccgtaaaagaagccaacgcctatgaattcatcatgaaattgccccagaaatttgatacactggtcggagaaagaggagcacagctcagtggaggacagaaacagcgcatcgcaattgcacgggccttagtgaggaatccaaaaatcctactcctcgatgaagcgacaagtgctctcgatacagaatccgaagccgaagtgcaggcagcattagataaagccagagaagggagaactactatcgttatcgctcacagactgagtacagttcgcaatgcagacgtgattgcagggttcgaagatggagtgatagtggaacagggatcacattctgaactcatgaaaaaggaaggagtatattttaaacttgtcaatatgcagacatctgggtcacagatccagagtgaagaattcgaacttaacgatgaaaaggctgccacaaggatggcaccaaacggatggaagtccaggctctttaggcattctacacagaagaatctgaagaactctcagatgtgtcagaaatctcttgacgttgaaacagatgggctcgaagcaaatgttccacctgtgagttttttgaaagtgctgaaactaaataaaacggaatggccatatttcgttgttgggacagtctgcgctatcgccaatggaggactgcagccagcgttctcagtgatcttttccgaaataatcgccattttcggaccaggggacgatgcagtgaagcagcagaaatgcaatatattttccttaatattcctgttcctgggaataatttctttttttactttttttctacaggggtttactttcgggaaagccggagaaatactgacaaggcgattgagaagtatggcttttaaagccatgcttcggcaggatatgtcatggttcgacgatcataaaaattccacaggagccctatcaactaggcttgccactgatgctgcacaggtccagggggccactggaacacggttggcactcatagctcagaatattgcaaaccttgggacaggaataataatctcttttatctatgggtggcagctcacacttctcctgctggcagtagtgcccataattgcggtttccgggatcgtggaaatgaaacttctggctgggaatgcaaagagagataaaaaagaactcgaggcagccggaaaaatagccacagaagccatagaaaatattaggactgtggtttccttgacacaggaacggaaattcgaatctatgtacgttgaaaagctctatggaccatacagaaattctgtgcagaaagcccacatatatgggatcactttttctatctcccaggcttttatgtatttctcatacgctggatgtttccggttcggagcgtacctcatagtaaatggacacatgcgatttagggatgtcattctggtcttttcagccatagtcttcggggctgttgcacttggacatgcatcatctttcgcccctgattatgcgaaggctaagctctctgctgcgcacctgttcatgcttttcgaacgacagccactaatagattcctatagtgaagaaggactcaaaccagataaatttgagggaaatatcacttttaacgaagtcgtgttcaactacccaactcgggctaacgtgcccgtactccagggactctccctggaagtaaaaaaggggcagactctggcactcgtcggatcctctggatgtggaaaatccacggttgtgcagcttctagaacgcttctatgaccctctcgcaggaacagtgtttgtcgattttgggttccagctattggatggacaggaagcaaaaaaacttaacgtccagtggctccgggctcaattaggaattgtttctcaagaacctatactgttcgactgttcaatagccgagaacattgcgtacggggataattccagggtggtctcgcaggatgaaattgtgtccgccgccaaagctgccaatatccatcccttcatcgaaacactacctcacaaatatgaaactcgggtaggagataaagggactcagctgtccggaggacagaaacagagaatcgcaatagctagggcactcatacggcagccccagatcctgctccttgatgaagccacatctgccctagatacagaaagtgaaaaagtggtccaggaagccttagataaagcacgcgagggacgcacatgtatcgtcatcgcccatcggttgagtacaatccagaatgcggacttaatcgtcgtgtttcagaatgggcgcgtgaaagaacatggaacacaccagcagttgctggcacagaagggaatctatttttctatggtctctgtccaggccgggacacagaacctt

SEQ ID NO: 200173 - DNA, 3858 bp, Artificial Sequence
  derived and/or modified sequence
atggacctggaggcggccaagaatggcaccgcatggcgaccaaccagcgctgaaggagatttcgagctgggaatctcatcgaagcaaaagcgaaagaaaaccaaaaccgtgaagatgataggcgtcctgacgctcttcagatactccgactggcaagacaagctgttcatgtcactgggcactattatggctatcgcacatggatccggtctgcctttgatgatgattgtgtttggcgaaatgactgacaagttcgtggacactgctgggaacttctcgtttccggttaacttctccctgagccttctgaacccagggaaaatcctggaagaagagatgactcgctacgcctactactactctggattgggagcgggcgtccttgttgctgcgtacattcaggtgagcttttggaccctcgctgcggggcggcaaatcaggaagataagacagaagttctttcacgctatcctccgccaggagattggctggttcgacatcaatgatactaccgagttgaatacgcggttgaccgatgatatttcaaaaatcagcgagggtatcggagataaagtggggatgttctttcaagcggtcgcaacgtttttcgctggatttatcgttgggttcatcaggggctggaagctgacccttgtgatcatggcaatctcacctatcctgggactgtcggctgccgtgtgggcgaagattttgagcgccttttcagataaggagctggccgcgtacgccaaggccggcgccgtggctgaagaagccctcggcgcgattcggacggtgatcgctttcggaggccagaataaggagctcgaaaggtaccaaaagcacctggagaacgcgaaagagattggaattaagaaggcaatatccgcgaacatctcgatgggtatcgcgttcctgctgatctacgctagctacgccctcgccttctggtacggaagcactctcgtaatcagcaaagagtacaccatcgggaatgcgatgaccgtgtttttcagcatcctcatcggtgctttttcggtgggtcaggccgcgccctgtatcgacgctttcgccaatgctcggggagcagcctacgtgatcttcgacattatcgataacaacccaaagattgactccttctcagaacgaggccacaaacccgacagcattaaaggaaacctcgagttcaatgatgtgcactttagttacccgtcccgggcgaacgttaagatcctgaagggacttaatctgaaggtccagtcggggcagaccgtggcactggtggggtcctcgggttgcggtaagagcactaccgttcaactcatccaacgcttgtacgacccagacgaggggaccatcaacatcgatggtcaagatatcagaaacttcaacgtgaattacctccgcgagatcatcggagtggtgtcccaagagccggtcctgttttcgacgactatcgctgagaacatctgctatgggagaggaaacgttaccatggatgaaatcaaaaaggcggtgaaagaagcgaatgcctatgagttcattatgaagctgccgcagaagttcgacaccctcgtgggtgaaagaggagcccagctctcgggtgggcagaagcaacggatcgccatcgcacgtgctctggtcaggaatccgaagatcctcctcctggatgaagccacctcagcgcttgacaccgaatccgaagccgaagtgcaggcagcgctcgacaaggcccgtgaaggacgcactactatcgtcatcgcacatcgactgtcaaccgtgcgaaacgccgatgtgatcgccggatttgaagatggagtgatcgtggagcaaggatcacactcggagctcatgaagaaggagggtgtgtacttcaagttggtaaacatgcagacctctgggtcacagattcaatctgaagagttcgaacttaatgacgagaaggccgcgactcgcatggccccgaacgggtggaagtccagactcttccgccatagcacccagaagaacctgaaaaacagccagatgtgccagaaatctctcgacgtcgaaaccgacggccttgaagccaacgtgcccccagtgtcctttctgaaggtgttgaaactgaacaagaccgagtggccatacttcgtggtgggtactgtctgcgcaatcgccaacggtgggctgcagccggctttctcagtgatcttttcggagatcattgccatctttggcccgggcgacgatgccgtgaagcaacaaaaatgtaacatcttttcgctgatcttcttgttcctggggatcattagcttcttcaccttcttcctgcaaggcttcacgttcggaaaggccggggaaatccttacgcggcgtctgaggtcgatggcatttaaggctatgctgaggcaggatatgtcatggttcgacgaccacaaaaactccactggggccctgtccaccagattggcaacggacgccgcccaagtccagggagccactgggacgagactcgcgttgattgcgcagaacatcgccaacctcggtaccggtattatcattagttttatctacggatggcagctgactctcttgctgctcgccgtcgtgccaatcatagccgtctcgggaatcgtcgagatgaagctgctggctgggaatgccaaacgcgacaagaaagaactcgaagctgctggtaaaatcgcgactgaagcgatcgagaacatccggactgtggtcagccttacccaagaacggaagtttgaatcgatgtatgtggagaagctgtacggaccctacagaaattcggtgcagaaggctcacatctacggaatcactttctccattagccaagcgttcatgtacttcagctacgccggatgtttccgcttcggagcctatctgatcgtcaacggccatatgcgcttccgggacgtgatcttggtgttcagcgccattgtctttggcgcagtcgctttgggacacgcgtcctccttcgctcctgactacgcaaaagctaaactgagcgcagcgcacctcttcatgctctttgagagacagccactgattgactcatactcggaggagggcctgaagcctgataagttcgagggcaacatcacctttaacgaggttgtgttcaactacccaaccagagcgaacgtgcctgtgttgcaggggctgtcactcgaagtcaagaagggacagactctcgccctggtgggcagctcgggctgtggcaagtcgaccgtggtccagctgctcgaacgcttttacgatccgctggccggaactgtgttcgtcgatttcggatttcaactcctggacggccaggaggcgaaaaagctcaatgtgcagtggctgagggcccagctgggaatcgtgtcgcaggaaccgattcttttcgactgttccatcgccgagaacatcgcctacggcgacaatagccgcgtcgtgtcacaagatgaaatcgtgtccgcagccaaggctgccaacatccatccgttcattgaaactctccctcacaaatacgaaactagggtcggtgataagggcactcaactctccggtggacagaaacaacgaatcgctatcgctagagcgctgatccgccaacctcagatcctgttgctcgatgaagcgacttccgccctggatactgagtcagagaaggtggtgcaggaggccctggacaaagcccgcgaagggcggacctgcatcgtgatcgcgcaccgcttgtccaccatccagaatgcggatctgattgtcgtgtttcagaacggacgggtgaaggagcatggaacccatcagcagctccttgcccagaagggaatttacttctccatggtgtccgtgcaggccggaacgcagaacctc

SEQ ID NO: 200174 - DNA, 3858 bp, Artificial Sequence
  derived and/or modified sequence
atggacctggaagctgcaaaaaacggaactgcctggaggcctacctcggcagagggtgacttcgaactgggcatctcctctaaacagaagcgaaagaagaccaagacggtcaagatgatcggggtcctaactctgtttcggtacagtgactggcaggacaaattatttatgtccctcggcactataatggccatcgcccatggatcgggcttgcctttgatgatgattgtctttggcgagatgacggataagttcgtagatacagctggcaattttagtttccccgtcaacttctctttgtcattgctcaaccccgggaagatattggaggaagaaatgacccgctatgcgtattattatagtggccttggcgcaggagtgctggttgcagcctacattcaggtcagtttctggaccttggccgccggccgccagatacggaagattagacaaaagttctttcatgctattctgcggcaggagattggctggtttgacattaatgataccactgagctcaacacccgtctgactgacgacatcagcaagatctcagaggggataggggataaagtaggcatgtttttccaggccgtggccacattttttgctgggttcatcgtggggtttatcagaggatggaaactgaccctagttatcatggcgatttcacctatattggggctttctgcagcagtctgggctaagatactgtccgccttcagtgataaggagcttgcagcttatgcgaaggcaggggccgtcgccgaagaggccctgggggctatacggacagtgatcgccttcggcggacagaacaaagaattagaaagatatcagaaacacctggagaatgctaaggaaattggaattaagaaggctatctctgccaacatctcgatgggcatcgcattcttgctgatatatgctagctatgccctggccttctggtacggcagcacccttgttatctctaaagagtacacaatcgggaatgctatgaccgtcttttttagtatattaattggtgctttttcggtcggtcaggctgctccatgtattgacgcatttgccaatgctcggggggcggcttacgtcattttcgatatcattgacaataaccccaaaattgacagctttagcgaaagggggcataagccagatagcattaaaggcaacctggaattcaacgatgtgcacttctcttatccttctagggcaaatgtgaagatactcaaaggcctgaacctgaaggtccaatccggccagaccgtagctctagttggaagctccgggtgcggaaaatctacaaccgtccagctcatccaacgtctttacgacccagacgagggaaccataaacatcgatggccaggacattagaaactttaatgttaattatctgcgggagatcataggggtggtgtcccaggagccggttctttttagcaccaccatagcagagaacatctgttatggaagagggaacgtgacaatggatgagattaagaaggccgtgaaggaagccaatgcatatgagttcatcatgaagttacctcagaaattcgacaccctggttggcgagcggggcgcacagttaagcggagggcagaagcagaggatcgccattgctcgtgctctggtgcgtaacccaaagatactgctcctggatgaggctacaagcgcactagacacggagtccgaagcggaggtgcaggcagctttggataaggcgcgcgaagggcggacaacaatcgtaattgctcatcgactttcaactgtcagaaacgcagacgtcatcgctggctttgaggatggcgtaatcgtggagcaaggcagccattctgaactcatgaaaaaagagggggtgtattttaagctggttaatatgcagacctcagggtcccagattcaaagcgaggaattcgagttgaacgatgagaaggcggcaaccaggatggcccccaatgggtggaagtctaggctcttccgacactctacccagaagaatctgaagaactcacagatgtgtcagaaatcgttggatgttgaaactgacgggctggaagctaatgtcccaccagtgagttttttaaaggtactgaagctgaacaaaactgaatggccctactttgtcgtgggcacagtgtgcgcaattgctaatggaggcctgcagcctgcctttagcgttattttcagtgaaattatagcaatttttggacctggcgatgacgcagtgaaacaacagaagtgcaacatcttttctctcatctttttgttcctgggcattataagcttttttaccttcttccttcagggcttcacatttggaaaggcaggtgagatcctgaccagaagactgcggtctatggccttcaaggctatgctcaggcaggacatgtcgtggttcgacgatcacaagaattccacaggtgctctctccaccagactcgccactgacgcggcccaagtgcagggcgcaacaggtaccaggctggccttgatagcccagaatattgccaatctgggaaccggaatcatcatctcctttatttacggctggcagttaaccctgctgctgctagctgtggtgcccatcattgcggtgtcaggaatagtcgagatgaagttgctcgctggtaacgcaaagcgcgataagaaggagctcgaggcagccgggaagatcgccactgaagccatcgaaaatatacgcactgtagtctccctgacccaggaaagaaagttcgagagcatgtacgtggagaagctctacggtccctaccggaattcagtccagaaagctcacatctatggtattacattctctatttcccaagctttcatgtatttttcttatgctggatgtttcagattcggcgcctaccttatcgtcaatggacacatgagattcagggacgtgattctggtgttttcggcgatagtgtttggagctgtagctctcgggcacgcgtcatccttcgccccggattatgctaaagccaaactgagcgcagcccacctttttatgctctttgagcgacagcctctgattgattcttactctgaagaaggactaaagcctgataaattcgagggaaacattacattcaacgaggtcgtatttaattaccccacacgcgccaatgtgccagtgctacaaggtctatctctggaagtgaagaagggccagactctggccctggtaggctcgtctgggtgtggtaaatctaccgttgtccagctgctggagaggttttacgatccgctcgcaggcaccgtgttcgttgatttcgggttccagctccttgatggtcaggaggctaaaaagcttaacgtgcagtggctaagggcccaactcggaattgtgtcccaggagccaatcttgttcgattgctctatagccgaaaacatagcctatggagacaatagtcgcgtagtatctcaagatgagattgtcagcgccgccaaggccgctaatatacacccatttatcgagacccttccccacaaatacgagacccgggtgggggacaaggggactcaactgtccggggggcaaaagcagcgtatcgcaattgcccgcgctttgataagacagccccagatcctcctgctcgacgaggctacatctgccctggataccgagtccgagaaagttgtccaggaagccctggacaaagccagggagggcagaacttgtatcgttatcgcccatagattgagcaccatacagaatgctgacctgattgtggtgtttcaaaatgggagagtgaaggagcacgggacgcaccagcagctgctagcccagaagggaatttattttagtatggtatcggtccaggctggaacacagaatctg

SEQ ID NO: 200175 - DNA, 3858 bp, Artificial Sequence
  derived and/or modified sequence
atggacctcgaagcagccaagaatggaaccgcatggcggcccactagcgcggaaggtgacttcgaactgggtatctccagcaagcaaaagagaaaaaagaccaaaactgtgaagatgatcggagtgcttactctttttaggtactcggattggcaagataaacttttcatgtcacttggcaccattatggcgatcgcccacggctcagggctgcccctcatgatgatagtttttggagaaatgaccgataagtttgtcgataccgcaggaaacttttcatttcctgttaacttttccctgagcctcttgaacccgggcaagatactggaggaagagatgacccgatacgcgtactactactctggacttggcgcaggagtgcttgtggcggcctacattcaagtgtcgttttggacgttggctgcaggacgacagatcagaaaaatcaggcagaagttctttcatgcgatcctgagacaggaaattggatggtttgacattaacgatactactgagcttaacacccgactcaccgatgatatctcgaagatctcggaaggaattggagataaggtgggaatgtttttccaagcagtcgccacctttttcgcaggctttattgtgggctttatacgcggctggaagctgactctggtgattatggcaatttcgcctatcctgggccttagcgccgccgtctgggcgaagattcttagcgcgttcagcgataaagaactggcagcatacgctaaggcaggagccgtcgcagaagaggccctcggtgcaattaggactgtgattgcatttggagggcaaaacaaggaacttgaaagataccagaagcatctcgaaaacgccaaggaaatcggtatcaaaaaggcaatctcagcaaacatttccatggggatagcttttctgctgatatacgcatcctacgcgctggcgttttggtacggttcaacccttgtgatctcgaaagaatacacgattggcaatgcgatgactgtgtttttctcgattcttattggagcattcagcgtcggtcaggccgcaccttgtatcgatgcatttgccaacgcgcggggagctgcctacgtcatttttgacatcattgacaacaatccgaagattgattcgttttcggaacgtggacataagccggatagcatcaagggtaatctcgaattcaatgatgtccattttagctacccttccagagcaaacgtcaagatccttaaaggcctgaatctgaaagtgcagtcgggacagaccgtggccctggtcggttcgagcggatgcggtaaaagcactactgtgcagctcatccaacggctctacgatcctgatgagggaaccataaacattgatggccaagatatcagaaacttcaacgtgaattaccttagggaaatcattggagtggtgtctcaggagcccgtgctcttctccactactatcgcggagaacatttgttacggaagaggaaatgtgacgatggacgagattaagaaagccgtcaaagaagccaatgcatacgagttcattatgaaacttcctcagaaatttgatactcttgtgggggagagaggggcccagctttcggggggacagaaacagcgcattgccatcgcccgggcacttgttcgaaatccaaagattcttctgcttgatgaagcgaccagcgcattggacactgaatcagaagctgaagtgcaggctgcactcgataaggcacgtgagggaagaaccactatcgtaatcgcccatcggcttagcactgtccgcaacgctgatgtgattgcgggatttgaggatggtgtcattgtcgaacaaggttcacattccgagttgatgaagaaggaaggggtgtatttcaagttggtcaacatgcaaacgtcaggctcacaaattcaatccgaagagtttgaactcaacgatgagaaggcagcgacgcggatggccccaaatggatggaaatcgagactgtttaggcattccactcagaagaaccttaagaacagccaaatgtgtcagaagtcccttgacgtcgagactgatgggctggaagcaaacgtcccccctgtgtctttccttaaggtgctgaaactgaacaagaccgaatggccctactttgtggtggggaccgtgtgtgcaattgcaaacggagggctccaacctgccttttcggtgatattctcagaaatcatagccatctttgggcctggggatgatgcggtcaaacagcagaagtgcaacatattctcgctgattttcctttttcttggtataatctcgttctttacgttttttctgcagggatttacctttggcaaagcaggagaaatactgactaggcgactgcgttccatggcattcaaggccatgctccgacaagatatgtcctggtttgacgaccataagaacagcactggcgctctttcgaccaggctggccactgatgcagcacaggtgcaaggagcaactggtactcgcctcgcccttattgctcagaacatcgccaatctcggcactgggattatcatatccttcatttacggttggcaacttacgcttctgctgcttgcggtggtgccaattatcgccgtctccggaatcgtcgagatgaaacttctggcaggtaatgcaaagcgggataagaaggagcttgaggcagcaggaaaaatcgccactgaagcaatcgagaacatccggaccgtggtgagccttacccaggagcgaaagtttgagtcaatgtacgtggagaagttgtacgggccgtacaggaatagcgtgcagaaggctcatatctacggcattaccttttccatcagccaggcctttatgtacttttcgtacgcaggatgtttccgtttcggagcatatctgattgtaaacggacatatgcgtttcagggatgtgatccttgtcttttccgcaatagtgtttggtgcagtcgcccttgggcacgcaagctcatttgcacctgattacgcaaaggcaaagctgtccgcagcacacctgtttatgctgttcgaaagacaaccgctgatagatagctacagcgaggaaggacttaaacctgataagttcgaaggtaatatcacctttaacgaggtcgtgtttaactaccctacccgagcgaacgtgcctgtcctgcagggtttgagtctcgaagtcaagaaaggtcaaactctcgcattggtcgggtcctccggatgcggcaaaagcaccgtcgtgcagctgctggaaagattttacgatcctctcgctggaaccgtgtttgtggatttcggatttcagctgcttgacggtcaagaggctaaaaagctgaatgtccaatggctgcgggcacaactgggaattgtctcgcaggaaccaatactcttcgactgttcaattgcagaaaacattgcttacggagataattcccgcgtggtgtcccaggacgaaatcgtgtcagcagcaaaggccgcgaacattcatccgtttatcgaaacccttccccataagtacgagactcgagtcggggacaagggaacgcaactttccggtgggcaaaagcaacgcatcgcaattgcaagggcactgattcgacaacctcaaattcttcttcttgacgaggcaacgtcagcactggataccgaatcggaaaaggtcgtgcaggaggcactggacaaagcgcgcgaaggtcgaacttgtatagtgattgctcataggcttagcacgattcagaatgcagatctgattgtggtgttccagaatggacgggtgaaggagcatgggactcatcaacaattgctcgcccaaaagggaatttacttctcgatggtgagcgtgcaagccggaactcaaaatctc

SEQ ID NO: 200176 - DNA, 3858 bp, Artificial Sequence
  derived and/or modified sequence
atggatctcgaggcagctaaaaacggtacggcatggaggcctacctcagcagagggagattttgagcttgggatttcttcgaagcagaagcgcaagaaaaccaagactgtgaagatgattggtgtactgacactgtttaggtattcagattggcaggataaactgtttatgtctctgggcactatcatggctatcgcacatggatctggtttgcccttgatgatgatagtgtttggtgagatgaccgataagttcgtggacactgccggcaattttagttttccagtgaatttcagcctttccctgcttaatccagggaagatattagaggaggagatgacaaggtatgcgtattactactccggcctgggcgcaggcgtgctggtggctgcatacatacaggtgagcttctggaccctagcagccggtcgtcagattcgcaagattcggcagaagttcttccatgccattctgcggcaggagatcgggtggttcgatattaatgacactactgagctgaatacacgcctgaccgacgatatcagcaagatttcagaggggattggagataaggtcgggatgttcttccaggcagtggccaccttcttcgccgggttcatcgttgggtttatccgcgggtggaaactgacccttgtcattatggccatctcacccattctgggactgagtgcggccgtgtgggccaagatcctgtccgcattttctgacaaagagctggcagcttacgcgaaggccggcgcggtagcggaagaggcgttaggggctatacggacggttatcgctttcggggggcaaaataaggaactggagagataccagaagcacctggaaaatgccaaggagattgggatcaagaaggccatctccgccaacatcagcatgggaatcgctttcctgttgatctatgcaagctacgctctcgctttctggtatggctctactttggtaatctcaaaagagtatacgattgggaacgccatgaccgtgttttttagcattctgataggggctttttccgtcgggcaggctgccccatgtatcgacgccttcgctaacgctcggggcgctgcatacgtgatattcgatatcatcgacaataacccaaagattgattctttcagcgagagggggcacaagcctgactccattaaagggaatctcgagttcaacgatgttcacttcagttacccatctcgggcgaatgtgaagatcctcaagggcttaaacctgaaggttcagtcgggccaaaccgtggcgcttgtaggatcttccggctgtggcaaatctactaccgttcagttgatccagaggctgtacgacccagatgaggggacgattaatatcgacggacaggacatcagaaattttaatgtgaactatttgagagaaattatcggtgtcgtgagccaggagcctgtgctgttctctactacaatcgctgaaaatatttgttacggcaggggcaatgtgacaatggacgagattaagaaagccgtgaaggaggcgaatgcgtatgagtttattatgaagttaccccagaaattcgacacgctcgtaggggaaagaggcgcgcagctaagtggggggcagaagcaaaggatagccatagcgagagctctagtcaggaaccctaagatcctgttgctggacgaggctacttcagccctcgatactgaatctgaggccgaggtgcaagcagcgctcgataaagcgcgggagggaaggacaacgattgttatagcccaccggctgtcaacagtccgcaacgctgacgttatcgctggatttgaagacggggtcattgtcgagcagggcagccacagtgagctgatgaagaaggagggcgtctactttaaactggttaatatgcagacctccggcagccagatacagtctgaagaattcgaacttaatgatgagaaggcagctactagaatggcgccaaatggttggaaatctcgactgttcagacactcgacacagaaaaatctgaagaactcgcagatgtgtcagaagtcgctggatgtggaaactgacgggctcgaggccaacgtgccacccgttagcttcctgaaggtgctgaagttgaataagactgagtggccatactttgtggttggtaccgtgtgtgctatcgccaatggtggcctgcagcccgccttttcggttattttcagtgagattatcgcaatttttggcccaggcgatgacgctgtcaaacagcagaagtgtaacatctttagcctgatattcttgttcctggggatcatctctttcttcactttctttctccaagggttcacattcggaaaagccggggaaatactcacaagaagattgcgatcaatggcatttaaggctatgcttcgtcaggacatgtcttggttcgacgatcacaagaactccaccggggctcttagtactcggctcgcgaccgatgcagctcaggttcagggagcaaccggaactaggctggcccttattgctcaaaacatcgccaatctgggtacggggattatcatttcctttatctatgggtggcagctgacgctgctcctgctcgccgtggttccaatcatcgccgtcagtgggatagtagagatgaagctactggctggcaacgccaagagagataaaaaggagttggaagcagcaggcaaaatcgccactgaggctattgagaatatccggactgtcgtctcattaacacaggagagaaagttcgagagcatgtatgtggagaagctgtatggtccgtatcgcaactccgtccagaaagcgcatatctatggcataacatttagcatcagccaagctttcatgtacttcagctacgccggatgcttccggttcggagcttatctcatcgtcaacgggcacatgcgcttcagggacgtgattctggtgttttcagccattgtgttcggggcagtggccctgggtcatgccagctctttcgcaccagattacgctaaggccaagctctcagcagctcacctgttcatgctatttgagcggcagcccctcattgactcatatagtgaggaagggctgaaaccggacaagtttgagggcaacatcacattcaatgaggtggttttcaattaccccactcgtgcaaacgtcccggtactgcaaggccttagccttgaggtgaagaaaggacagactcttgcgctggtgggttcctctggttgcggcaagtccaccgtcgtgcagctcctggagcgattctacgaccctctagcagggactgtgtttgtggacttcggatttcagctgcttgacggtcaggaggcaaagaagttgaatgtccagtggttgagggcccagcttggcattgtctcgcaagaacccatcttatttgattgcagtattgctgaaaacattgcctatggtgacaactcccgtgttgtaagtcaggatgagatcgtgagtgccgccaaggcggctaacatacatcctttcatcgagactctgccgcataagtatgaaacacgcgtgggagataaaggcacccagctatccggggggcagaagcagaggatcgccatagcgcgtgcattgatccgccagccacagattctgcttctggacgaggcaacctctgcgctcgatactgaatccgagaaagtcgtccaggaggccctggacaaggctagagaaggtcgaacatgcattgtgatcgcgcaccggctcagcacaatccagaatgctgatctcatcgtggtcttccagaacggcagggtgaaagaacatggaacccatcagcaactcctagcccaaaagggaatatatttttcaatggtgagcgtacaagcaggaacacagaatctg

SEQ ID NO: 200177 - DNA, 3858 bp, Artificial Sequence
  derived and/or modified sequence
atggaccttgaagccgcaaagaacggtaccgcttggcgtccgacgtcggccgaaggcgattttgaactgggaatttcatccaagcaaaaacgcaagaaaaccaagaccgtcaagatgatcggagtgctcaccctttttagatactcagattggcaagacaagctcttcatgtccctgggaaccatcatggccatcgcacatggtagcggtctgccactgatgatgatcgtgtttggagagatgaccgataagttcgtggataccgccggtaacttttcctttccggtgaatttctccctgtcgttgcttaatccgggaaagatcctggaagaggagatgacgaggtacgcctactactactcaggcctcggtgcaggcgtcctggtggcagcttatatccaagtgtccttctggactctggccgcgggaaggcaaatccggaagatccgacagaagtttttccatgccatcctgcggcaggagatcggttggttcgatatcaacgacactaccgaactgaatacccggctcaccgacgatatctcgaagatctcagagggtattggggacaaagttggaatgttcttccaggccgtcgccactttcttcgctggatttatcgtgggattcatacgcggatggaagctgaccctcgtgatcatggcgattagcccgatcctgggactgagcgccgcggtgtgggccaaaatcctgagcgcgttctcggataaggaactggccgcctacgcgaaagcaggagctgttgcggaggaggccctgggcgctatcaggacggtcatcgcctttggaggccagaataaagagctggagcgataccagaagcatctggaaaatgccaaggaaatcggaatcaagaaagccatttcggccaacatttctatggggattgccttcctgctgatctacgcgtcgtacgccttggccttttggtacggttccacccttgtcatctctaaggaatacaccattggaaatgcaatgaccgtgtttttctccattctgatcggtgctttcagcgtgggacaggccgcaccgtgtatcgatgccttcgcgaacgcccgcggagcagcctacgtcatcttcgatatcatcgacaacaatcccaagatcgactcgttctccgagcgcggccacaagcccgactcaattaaggggaacctggagttcaatgatgtgcacttctcctacccaagccgggccaatgtgaaaatcttgaagggtctgaaccttaaggtccaatcaggacagaccgtggctctggtggggtcgtcgggttgcggtaagtctacgactgtccaactgattcagcggctctatgaccctgatgaaggcaccatcaacatcgacggacaagatattcggaacttcaacgttaactaccttcgggaaatcataggcgtggtgtcccaagagccggtcttgttctccactactatagctgaaaacatttgctacggccgggggaatgtcaccatggatgaaatcaaaaaggctgtgaaggaggccaatgcctacgaattcatcatgaagctgcctcaaaagtttgacactctggtcggagaaagaggagctcagctcagcggtggacaaaagcagaggattgcgatcgccagagccctggtgcgtaacccaaaaatcctgctcctggacgaagcaacctccgctctggacaccgagtcggaagccgaggtccaagccgctctcgacaaagcccgagaaggtcgcactacgattgtgatcgcccataggcttagcaccgtgagaaatgctgacgttatagccggatttgaagatggcgtcatcgtggaacagggatcccactcggagctcatgaagaaagaaggcgtctactttaaactcgtgaacatgcagacttcaggcagccagattcagtccgaagagttcgaactgaatgacgaaaaagctgctacccggatggcgcctaacgggtggaaatcgcggcttttcagacactccactcaaaagaacctcaagaatagccaaatgtgccagaagtccctggacgtcgagactgatggtttggaggcaaacgtgccgccggtgtccttcttgaaggtcctcaagctgaataagactgaatggccgtatttcgtggtaggaactgtgtgtgcgatcgccaacggaggactgcagcctgccttctcagtgatcttctcagaaatcatcgccatcttcggcccgggcgacgacgcagtgaagcagcagaaatgcaacatcttctcgctgatcttcctcttcctcggaatcatttccttcttcactttctttctgcagggattcactttcggaaaggccggggaaatcctgacccggcgcctccgctcgatggccttcaaggccatgttgcgacaggacatgagctggttcgatgaccacaagaactccaccggagcactgagcacccgcttggctactgacgctgcccaggtccagggggctactggaaccagacttgcacttatcgcacaaaacatcgctaatcttggtactggaatcatcatctcgttcatctacggatggcagctgaccttgctcctgctggcggtcgtgccgatcatcgccgtgagcggcattgtggagatgaagctgctggcaggaaatgccaagcgggataagaaagagctggaagcggcaggcaagatcgctaccgaagcgatcgagaacatccgcaccgtggtgtcacttactcaggagaggaaattcgagagcatgtacgtggagaaactctacggaccataccggaactcggtgcaaaaggcgcacatctacggcataaccttctccatcagccaagccttcatgtacttctcctacgccgggtgctttcgctttggggcgtacctgattgtcaacggccacatgaggttccgggacgtgatcctcgtcttttcggcgattgtttttggtgccgtggcgctcggccacgccagctcatttgcaccggactacgccaaggccaaattgagcgcggcacatctgttcatgctgttcgaacggcagcctctgatcgatagctactccgaagaaggactgaagccggacaagttcgagggaaacatcaccttcaacgaggtcgtgtttaactatcccaccagagctaacgtgccggtgctgcagggactctcgctggaagtgaagaaaggacagactctggcgctcgtggggtcctcgggttgcggaaagtctactgtggtgcagctgctggagcgcttctacgaccctctggcggggactgtgttcgtcgatttcggcttccagctcctggatggccaggaggctaagaagctgaacgtccaatggctgcgcgcacagctcggaatcgtgtcacaggagccgatcctgttcgactgttccatcgccgagaatatcgcgtatggggacaacagccgcgttgtctcacaagacgaaatcgtctcggccgccaaggcagctaatatccacccattcattgagactttgccgcacaaatatgagacgagagtgggagacaagggaacgcagctgtcagggggacagaagcagcggatcgccatcgctagagctctgatccggcagccacaaatactgctgctcgacgaagcaacttccgccctggatactgaatcagagaaggtggtgcaggaagctctggataaggcgcgcgaaggacgcacttgtatcgtcatcgcgcacaggttgtcgaccatccagaatgctgacctcatcgtggtattccagaacggaagagtgaaggaacacggcactcaccaacagcttctcgcgcaaaagggaatctacttctcaatggtatcagtgcaggctggaacccagaatctc

SEQ ID NO: 200178 - DNA, 3858 bp, Artificial Sequence
  derived and/or modified sequence
atggaccttgaagcagctaaaaatggaaccgcttggagacctacttctgctgaaggagattttgaattaggtattagttcaaaacaaaaaagaaagaaaacaaagactgttaaaatgatcggagtacttacattatttcgttattcggattggcaagataagttattcatgtcattagggacaataatggctattgcacatggaagtggattaccattgatgatgattgtttttggagaaatgactgataaatttgtagatacagctggaaatttctctttcccagtaaatttctctttatcattattaaatccaggaaaaattttagaagaagaaatgacaagatatgcttactattactcagggttaggtgctggggtcctagttgctgcttacatacaagttagtttctggactcttgctgctggaagacaaattagaaaaatcagacaaaaattttttcatgctatacttcgacaagaaattggatggtttgacattaatgatactactgaacttaatacaagattaacagatgatattagtaaaatttcagaagggattggtgataaagtaggtatgttttttcaagcagtagctacattttttgctggatttattgttggatttataagaggatggaaacttacacttgttatcatggcaatttctcctattcttggactttcggctgctgtttgggcaaagatcttatctgcatttagtgataaggagttagctgcttatgctaaagcaggagcagtcgcagaagaggctcttggagctattcgtacagttattgcttttggaggacaaaataaggaattagaaagataccaaaaacacttagaaaatgcaaaagaaattggaattaaaaaagcaatttctgctaatatatcaatgggaattgcttttttattaatttatgcatcatatgctcttgctttctggtatggatctacactagtaatttcaaaagaatatactataggaaatgcaatgactgtattttttagtattttaattggagcattttcagttggacaagctgcaccatgtattgatgcttttgcaaatgctagaggagctgcatacgtgatttttgatattattgacaataatccaaaaattgattctttttcagagagaggtcataagccagatagtattaaaggaaatttggaattcaatgatgttcatttttcatatccaagtcgagcaaatgtaaagattttaaaaggattaaatttaaaggtccaatctggacaaacagtagctttagttggaagttctggatgtgggaaatccacgacagtccaacttattcaaaggttatacgatccagacgaaggtacaataaatattgacggacaagatattcgtaatttcaatgttaattatttaagagaaattattggagttgtatctcaagaaccagttcttttttcaacaacaattgctgaaaatatttgttatggaagaggaaatgtgacaatggatgaaattaaaaaagcagtcaaagaagctaatgcttatgaattcattatgaaacttcctcaaaaattcgacactcttgttggagaaagaggagcacaactttctggtggtcaaaaacaaagaattgctattgctcgtgcacttgttagaaatccaaagattcttttgttggatgaagcaacttcagcacttgatactgaatcagaagctgaagtacaagcagcattagataaagcaagagaaggtcgtacaacaattgttattgcacatcgactttcaacagttagaaatgcagacgttattgcaggtttcgaagatggagtgattgttgaacaaggatctcattcagaattaatgaagaaagaaggtgtttattttaaacttgttaatatgcaaacttcaggatcacaaattcaatcagaagaatttgaattgaacgatgaaaaagctgcaaccagaatggctccaaatgggtggaagtcaaggctttttagacattcaactcaaaaaaatcttaaaaacagtcaaatgtgtcagaaatctttagatgttgaaactgatggtttagaggctaatgttccaccagtttcatttttgaaagtacttaaattaaataaaacagaatggccatactttgttgttggtactgtttgcgctatagctaatggaggactccaaccagcattcagtgtcattttttcagaaataatcgcaatatttggtcctggtgatgatgctgttaaacaacaaaaatgtaatattttcagtcttatttttttatttttgggaataatttcattttttactttttttttacagggattcacatttggaaaagcaggagaaattcttacaagaagacttcgttcaatggcttttaaagcaatgttaaggcaagatatgagttggttcgatgatcataaaaatagtacaggagctcttagtactagacttgcaacagatgcagctcaagtacaaggtgcaacgggaacaagacttgctttaattgctcaaaatatagctaatcttggtacaggaattattatttcttttatatatggatggcaattaactttattactattggctgttgttccaatcatagctgtttctggaattgttgaaatgaaattactagctggaaatgcaaaaagagataaaaaagaattagaagcagcaggtaaaattgcaactgaagcaattgagaatattagaactgttgtttcacttactcaagaaagaaaatttgaatctatgtatgtagaaaaactttatggaccatatcgtaatagtgtccaaaaggcacatatctatgggattacattttcaattagtcaagcttttatgtatttttcatatgcaggatgttttaggtttggagcttatctaattgttaatggacatatgagatttagagatgtaattcttgttttttcagccattgtttttggagctgttgcattaggacatgcatcatcatttgcaccagattatgctaaagcaaaattatctgctgctcatttatttatgttatttgaaagacaacctttaattgatagttatagtgaagaaggattaaaaccagataaatttgaagggaatattactttcaatgaagtagtatttaattatcctactagagctaatgtgccagttttacaaggacttagtcttgaagtaaaaaaaggtcaaacattagcacttgtaggatcaagtggttgtggaaaaagtactgttgttcaattacttgaaagattttatgatccattagctggaaccgtatttgtagattttggatttcaactcttagatggacaggaagcaaaaaaattaaacgtacaatggttaagagctcaattaggtattgtaagtcaagaaccaatattattcgattgttcgattgcagaaaacatagcatatggagataatagtagggttgtttctcaagatgaaattgtttcagcagcaaaggcagctaatattcatccatttatagaaactttaccacataaatatgaaacaagagttggagacaaaggaactcagctatcaggaggtcaaaagcaacgaatagcaattgctagagcattaattagacaacctcaaattcttttattagacgaagctacaagtgcacttgatactgaatctgaaaaagtagtacaagaagcattagataaagctagagaaggaagaacttgtatagttatcgctcataggctttctacaatacaaaatgcagatcttattgttgtttttcaaaatggtagagtaaaagaacatggaactcatcagcaattacttgcacaaaaaggaatttattttagtatggtttctgttcaagctggaactcaaaattta

SEQ ID NO: 200179 - DNA, 3858 bp, Artificial Sequence
  derived and/or modified sequence
atggacctggaagccgctaagaatggaacagcgtggcgacccacgtccgctgagggcgattttgaactggggatatcatccaagcagaaacgtaagaaaaccaaaactgtcaagatgattggcgtgctgactttattccgctactccgattggcaggacaaactcttcatgtctctaggtaccatcatggcaatcgcccacgggtcaggacttccactgatgatgatcgtgtttggtgaaatgaccgacaagtttgtggataccgccgggaacttctcttttcctgtgaatttctcactctcacttctgaatcctgggaaaatactagaagaggaaatgacacgctacgcatattattactccggactcggagcaggagtgctggtggcagcttatattcaggtatctttctggacattggcagctggtcgacagattaggaagattcggcaaaagttctttcatgccatcctgagacaagagatcggttggtttgacattaacgacactactgaacttaacacaagacttactgacgatatttcgaagatcagtgagggcatcggtgataaagttgggatgttctttcaggcagtggcgacgttcttcgccggatttatagttggatttatccgagggtggaaattaactcttgttataatggccatatcaccgatacttggactgagcgccgcagtttgggccaagatccttagcgcctttagtgacaaggaactggcggcctacgctaaagccggggcggttgcggaagaagctttgggcgccatcagaactgtcattgcattcgggggccaaaataaagaactggaaaggtatcagaaacacttggaaaatgccaaagagataggcatcaaaaaggccatctctgctaacatctccatgggcatcgcatttctcctgatttatgcatcatatgccctggccttttggtacggttcaacgttagtgatctccaaggaatatacaattggaaacgcaatgaccgttttctttagtatcctcatcggagccttttcagtgggccaggcagcaccctgtatagacgccttcgccaatgctagaggggcagcatacgtgatcttcgacatcatagataacaatccgaagatcgattcattctctgagcgcggccataagccagatagtatcaagggcaacttagagttcaacgatgtgcattttagttatcctagccgggctaacgtaaaaatattaaaaggcctgaacctgaaagtgcagtccgggcagacagtggctcttgtaggcagctcagggtgcggaaagtcgacaaccgtgcaactcatccagcggttatatgacccagacgaaggcaccataaacatcgacggtcaggatattaggaatttcaacgtgaactatttgagagaaattatcggggtggttagccaggagcctgtgcttttcagcactacgatcgctgagaacatttgctacggtcgaggcaatgttaccatggatgaaatcaagaaggctgttaaagaagccaacgcctatgaattcatcatgaaactgccacagaaatttgacactttggtcggggagcgcggtgcgcagctgagcgggggacagaagcagagaatcgccattgcgcgggctctggtgagaaatcccaagatccttttactggatgaggccactagtgcccttgataccgaaagtgaagctgaagtgcaagccgcgttggacaaggcacgggaggggcggaccactatcgttattgctcacaggcttagcaccgtgcgtaatgcagatgtgatagcgggatttgaagacggcgtcatcgttgagcaaggaagtcattccgaattaatgaaaaaagaaggggtgtactttaaactggtgaatatgcagacatccgggtcacaaattcagtccgaggaatttgagctgaacgacgagaaagctgctactagaatggcaccaaatgggtggaagagccgcttgttccgccactctactcagaaaaacttgaaaaactcccagatgtgtcagaagagcttggacgtcgagacagatggcctcgaggcaaacgtgcctccggtctcctttcttaaagttctgaagctgaacaagaccgagtggccctattttgtggtgggaactgtgtgcgcgatagccaacgggggtttgcagccagcctttagcgtaatcttctccgaaatcatcgctatattcggccctggtgacgacgcagtgaagcagcaaaagtgcaacatcttctcccttatttttctgttcttgggcattattagtttcttcacgtttttcctgcaggggtttacattcggcaaggccggcgagattctgacgcggagactgcgctccatggcgttcaaggctatgctgagacaggacatgtcctggtttgatgaccacaagaattctacaggcgcattgagcaccagacttgccactgacgctgcacaggtgcagggcgctactggaacccgcctcgcactaatcgctcagaacatcgctaaccttgggaccgggataatcatttcattcatttatggctggcagttgaccctcctgctcttggccgtcgtgcctatcatcgccgtctctggaatagtcgagatgaagctgttagctggcaacgcaaaacgagataaaaaggagctggaggccgccggtaagattgctaccgaagcgatcgagaatattaggaccgtcgtgtctctgacgcaagaaaggaaattcgaaagcatgtacgtagagaaattgtatggtccctatcgcaactcagtccagaaggctcatatttatggtattaccttcagcatatcacaggcgttcatgtatttcagctacgctggatgctttagatttggagcctatctgatcgtgaacgggcatatgcgattccgagatgtgatcctggtttttagcgcaattgtctttggggcagtggccctgggacacgctagctccttcgcacctgattacgcaaaggctaagctgagcgcggcccatctctttatgttgttcgaacgtcagccgctcattgacagctacagcgaggaggggctcaagccggacaaatttgaggggaatataacctttaacgaggtcgtgtttaattaccccacaagggcgaatgtgcccgtgctgcaaggcttgtctctggaggtgaagaaggggcagacactggctctagtgggaagtagtggctgtggcaagagcacagtggttcagctattagagcggttttatgatcctctggccggcaccgtgtttgtggatttcgggtttcaactgctcgatggacaggaagccaagaagcttaatgtgcagtggctccgggcgcagctaggaattgtttctcaggagccaatactgttcgattgttctatagccgagaacatcgcttacggcgataattctagggtggtgtcccaggacgagatcgtttccgcagccaaagctgccaacatccatcctttcatcgagaccttgccccataaatatgagacacgcgtcggcgacaaagggacacagctgtcaggggggcagaaacaacgaattgctattgcccgggccctgatccggcaacctcagatcctgttgctagacgaggccacatcagctctcgatacggagtctgagaaagtggtacaggaggccctggacaaagctcgcgagggccggacctgtatagtcatagcccataggttgtctaccatccaaaacgcagatttgattgtcgtgttccaaaatggccgggttaaagagcacggcacacaccagcagctgcttgcccagaaaggaatctatttttccatggtttccgtacaggcaggaactcagaacctt

SEQ ID NO: 200180 - DNA, 3858 bp, Artificial Sequence
  derived and/or modified sequence
atggatcttgaggctgccaagaacggaaccgcttggcgcccgactagcgctgagggagacttcgagcttggaatctctagcaagcagaagcggaagaaaactaagactgttaagatgattggcgtcctcactctctttcgctatagtgactggcaggacaagctgttcatgtcgctggggacaataatggccattgcccatggttctggtctgcccctcatgatgattgtcttcggagagatgaccgataagtttgtggacactgccggcaactttagtttccccgtgaatttcagcctttctcttctgaatccaggaaaaatcttagaagaggagatgaccaggtatgcctactattattccgggctgggcgccggtgtcttagtagccgcttatatccaggtgagtttttggactttagccgccggcaggcagatcaggaaaatccggcaaaagttcttccacgccatactgagacaagagattggatggtttgatataaacgatacaactgagctcaatacacgcctgaccgatgatatcagcaaaatatccgaaggaattggggacaaggtaggtatgtttttccaggctgtggctaccttttttgccgggttcatagtgggcttcatcaggggctggaagttgacacttgtcatcatggccatcagtcccattctgggcctctcagcggcggtgtgggccaagatcctatcagccttcagcgacaaggagcttgctgcatatgccaaggctggcgcagtagcagaggaagcgctcggggcaattagaaccgttatcgcattcggcggacagaataaagaactcgaacgataccagaaacacctggaaaatgctaaagaaatcggcatcaaaaaggcaataagtgcaaacattagcatggggatcgcctttttgttaatttatgccagctacgccctggccttctggtacggctcaaccctggtcattagcaaagagtacacgatcggcaacgctatgacagtgttctttagcatcttaatcggtgcgttttccgtcggtcaagcggccccttgcattgacgctttcgccaatgcacgtggagcagcatacgttatcttcgatatcatagacaacaaccctaagattgattccttttctgagaggggacacaaacctgattccatcaagggcaatctcgagtttaatgacgtgcacttctcctaccctagcagggccaatgtgaagattctgaagggattaaacctgaaggtgcagagtgggcagacagtggcccttgtaggctcaagtggttgtggtaaatcgaccacagtccagctgattcaacgtctgtacgacccggatgaagggacaattaacattgacggccaggatattaggaacttcaacgtgaactacctccgtgaaatcattggcgttgtgtctcaggagcctgtcctgttcagtacaaccatcgcagaaaacatttgctacggcagaggcaacgtcactatggacgaaattaagaaagccgtgaaagaggcaaatgcatacgaattcattatgaagctgccacagaaattcgacacactggtgggtgagaggggcgcccagctgtccgggggccaaaaacagcgcattgcgatcgcgagggcactcgtccggaatcctaaaatcttattgttagacgaagcgacatcagccctggacactgaatcagaggccgaggtccaggcagcgctcgataaggcaagagagggccgcaccacgattgtgatagctcaccgcttaagtaccgtccgaaacgctgatgtgatcgcgggctttgaggacggggttatcgtggaacagggaagccattctgaactgatgaaaaaagagggggtctattttaaactagtgaatatgcaaactagtggatcgcagatacagtcggaggagttcgaactgaacgacgagaaagccgctacacgcatggcgcctaatgggtggaagtcacgcctgttccgtcactcaacccaaaagaacttgaagaatagccagatgtgccaaaaaagcttggatgtggagaccgatgggttggaggcaaatgtccctccggtgtctttcctgaaggtgctgaaacttaacaaaacagagtggccctacttcgtggtaggcaccgtatgcgccatcgcaaatggagggctccagcctgcgttctccgtgatcttttcagaaattatcgcaatctttggacccggggatgacgcagttaagcagcagaagtgcaacatattcagcctcatcttcctcttcctcggcatcatttcattcttcaccttcttcttgcaggggtttacttttggcaaggcaggagagattctgacccgacgcttacgcagcatggcgttcaaggccatgctgagacaagatatgtcgtggttcgacgaccataaaaacagtactggtgctctctcaactcgacttgccaccgacgctgcacaggtgcaaggtgccaccggaacgagactagccttgattgcacagaacattgcaaacctcgggactggtatcatcatcagctttatttatggatggcagttaacactgctgttgctagcagtggtgcccatcattgccgtgtccggaatcgtcgagatgaagcttctggccgggaacgctaagagggacaagaaagagcttgaggcggcaggaaagatagccacagaggcaattgagaacattaggaccgtagtttccctgacccaggaacgcaagttcgagagtatgtatgtggaaaaattgtatggcccttatcgcaattccgttcagaaagctcacatttatggcatcactttctctatttcccaggccttcatgtattttagctacgctggatgctttcgattcggcgcttacctaatcgttaacggccacatgaggttccgcgatgtgatcctggttttcagcgccatcgtgtttggagctgtcgctcttggccatgcgagttctttcgctcccgactacgctaaggctaagttgtccgccgcgcacctgtttatgctttttgaaaggcagccgctcatcgactcttattcagaagagggtctgaagccggataaatttgaaggcaacattacctttaatgaagtagtctttaactacccgacgcgagcaaatgttcccgtgctgcaaggactatctctcgaggtaaaaaagggccaaaccctggctctcgtaggtagctcagggtgcggcaagtccaccgtggttcagctccttgaacggttctatgacccgctggctggtacagtgtttgtggattttggttttcaactcctggatggccaggaggctaagaagctgaacgtgcaatggctccgcgctcagctcggcattgtgagccaagagcccatattatttgattgcagtattgcagagaatatagcctacggcgataatagcagggtggtgtcgcaggatgagatcgtgagcgctgctaaggctgcaaacatacaccccttcatcgagacactcccccacaagtatgagaccagggtaggcgataagggaacccaactgagtgggggtcagaaacagagaatcgctattgctcgggccctgatcagacagccacagattctgcttctggatgaggcgacaagtgccctggacacagagtcagagaaggtggtccaagaagcactggataaggcccgtgaggggcgaacctgtatcgtgatcgcacaccgtctttctaccatccagaacgctgatctgattgtggtatttcaaaacggccgtgttaaagaacatggcacccatcaacagttgctggcacagaagggaatttacttctctatggtgtccgttcaggcgggcacacagaacctc

SEQ ID NO: 200181 - DNA, 3858 bp, Artificial Sequence
  derived and/or modified sequence
atggaccttgaagcagccaagaacgggactgcatggcgaccgacttcggcagagggagattttgagcttggaatctcctccaagcagaagcgcaagaaaacgaaaactgtgaagatgatcggcgtgcttactctttttcgttacagcgattggcaggacaaattgtttatgtccctgggtactatcatggcaatcgcccatggttccgggctccctctgatgatgatagtgttcggggaaatgaccgacaaattcgtggatactgccggcaactttagctttcctgtgaatttctcgctcagcctgctgaacccagggaagatcctggaagaagaaatgacccgctacgcatactactactccggactcggagcaggagtgttggtcgcagcatacatccaggtgtccttctggaccctggcggcgggccgccagatcagaaagattagacagaaattctttcacgccattcttcggcaagaaattggctggtttgacataaatgatacgactgaactgaacactcgtctcaccgatgacatttcaaagatttcggaaggaatcggggacaaggtaggcatgttcttccaggccgtggcaacctttttcgctggcttcatcgtgggcttcattagaggatggaaacttaccctggtgataatggcgatttcacctattctcggcttgtcagccgcagtttgggcaaagattctttcagctttctcggataaagaactcgcagcctacgcaaaagctggggcggtggcggaggaagcacttggcgcgattagaaccgtgattgcatttggaggccagaataaggaacttgaacggtaccaaaagcatcttgaaaacgccaaggagatcggtatcaaaaaggccattagcgcaaacatctcaatgggtatcgcatttcttctgatatacgcatcatacgcccttgcattctggtacggatcaactcttgtcatttcaaaggagtacactattgggaatgcaatgaccgtgttcttttctattctgatcggtgcattttccgtgggtcaagccgcgccttgtattgatgcgtttgccaacgcacgcggtgcggcgtacgtgatctttgacattatcgataacaatcccaagattgatagcttttcagaaaggggacataagccagactcgataaagggaaacttggagtttaatgatgtgcatttctcatatccaagccgggcgaacgtgaagatactgaaaggattgaacctgaaggttcaaagtggacagacggtcgcactggtgggaagctcaggatgtggtaagtccaccaccgttcaactcatccagcgactgtacgatccggatgaagggactattaacatcgacggtcaggacatccgcaactttaatgtgaactacctgagagagataatcggagtagtgtcccaggagcccgttctctttagcaccaccatcgctgagaacatttgctacggacgaggcaacgtcactatggacgagatcaagaaggcagtgaaggaagcaaacgcatacgagttcattatgaagctcccccagaagtttgatacccttgtgggagagcggggcgctcaactttcggggggtcaaaagcaaagaattgcgattgcacgagcactcgtcagaaatcctaaaatcttgcttttggacgaagcaacttcggcacttgatactgaatcggaagccgaagttcaggccgccctggataaggcaagagaaggtcgaactaccatcgtcatcgcacacagactttcaaccgtgcgtaacgccgacgtgatcgcgggttttgaagatggagtgattgtggaacaggggtcccactcggaactcatgaagaaggagggtgtgtactttaagctggtgaatatgcaaacgtcagggtcacagattcagtcagaagaattcgaactgaacgatgagaaagcggctacgcgcatggcgccgaacggctggaagtcacgcctgtttcgtcactccacccaaaagaacctgaagaattcccagatgtgtcagaagtcgctcgatgtggaaactgatggccttgaagctaatgtgccgcccgtgtccttcctgaaagtgctcaagctcaataagactgaatggccttacttcgtggtcggcacggtctgcgcaatagccaacgggggtctgcagccagcattttcagtgatctttagcgaaatcatagccatattcgggccaggtgatgacgccgtgaagcaacaaaagtgtaacatctttagccttatctttctcttccttggcattatctccttctttactttctttcttcagggattcactttcggtaaggcaggagagattctgactaggagactcaggtcgatggcctttaaggcaatgctgcgccaagatatgtcctggtttgatgaccataagaactcgaccggggctctgagcactcggctggccaccgatgcagcgcaagtgcaaggagctactggtactcgcctggcccttattgctcagaacattgcaaacctcggaaccggaatcattatctcttttatctacggatggcagctcaccttgcttctgctggcggtcgtgccgataattgccgtgtcgggaatagtcgaaatgaaacttctcgcagggaacgcaaagagagataagaaggagctggaggcagctggaaagattgcaactgaagcaatagaaaacatccgtaccgtggtgagccttacgcaggaaagaaagtttgaatcgatgtatgttgaaaaactttatggcccttaccggaattcggtgcaaaaagctcacatctacgggatcaccttttcgatctcacaggcatttatgtactttagctacgcggggtgctttcgattcggggcctatctgatagtcaacggccatatgcgatttcgcgatgtgattctcgtgttcagcgcaatcgttttcggagcagtggcacttggacatgctagcagctttgcccctgattacgctaaggcaaagctctccgcagcacatctgtttatgctttttgaacgacaacctctgatagattcgtactcggaggaaggattgaagcctgacaaatttgaaggcaacattacttttaacgaagtggtgttcaattaccctaccagagcaaatgtgcctgttcttcagggactgtcactcgaagtgaaaaagggtcaaacgcttgctctggtgggatcttccggttgcggaaagagcacggtggtccaactcctggaaagattttacgatcctcttgctggtacggtgtttgtggacttcggatttcagcttctcgatggtcaagaagcaaagaagctgaacgtgcagtggctccgggcgcagctgggaattgtgtcacaggagcctatcctgttcgattgttcaattgcagaaaacattgcatatggtgataattcccgcgtggtgtcccaagatgagattgtgtcggcggcaaaggcagcaaacatccatccattcattgagactctgcctcataagtacgaaacgagagtcggagacaaaggtactcagcttagtggaggtcaaaaacagagaattgctattgcaagagcactcattaggcaacctcaaattcttctgctggacgaagccacctccgcgcttgatacggaatctgagaaggtggtgcaggaggcgcttgacaaagccagggagggacggacctgcatagtcattgcccatcgcctttcgaccattcaaaacgcggatcttattgtggtgttccagaatggacgcgtgaaggaacatgggacccatcaacaacttctggcacaaaagggaatttacttcagcatggtcagcgtgcaggcaggcacccaaaatctt

SEQ ID NO: 200182 - DNA, 3858 bp, Artificial Sequence
  derived and/or modified sequence
atggatctcgaggccgcaaagaatggaactgcatggaggcctacctcggctgaaggggattttgaactgggaatcagctccaagcagaagcgaaagaaaactaagaccgtgaagatgattggagtccttactctttttagatactcggattggcaggataagctctttatgtcacttggtaccattatggcaattgcccatggttcgggacttccccttatgatgatcgtgtttggtgagatgaccgataagtttgtggataccgctggcaatttctcctttccagtgaacttttcgctgtcactcctcaaccctggaaagatcctggaagaggaaatgaccagatacgcatactactactcagggcttggagccggagtgcttgtggcagcctatattcaggtgtcgttttggactctggcagcggggcgacaaatcaggaagattcggcaaaagttctttcatgcaatacttcgccaagagataggctggtttgacattaatgataccaccgaacttaacacccggcttactgatgacatttcaaagatatcagaaggtattggtgataaggtgggtatgttttttcaggcggtggcaactttctttgccggctttatcgtcgggtttattcgcggttggaaactcacgctggtgataatggctatatcgccaatccttggcctgagtgcagcggtgtgggccaagattctttcagcattttcagacaaggaactcgcagcgtacgccaaagcaggtgcggtggcagaagaggctctgggagcaatacgcaccgtgattgcatttgggggacagaacaaagagctcgaacgttaccagaagcacctggagaatgcaaaagagattggaattaagaaagcaatcagcgccaacatttccatgggaatagcgttcctgctcatttacgcttcgtacgcgcttgcattttggtacgggagcacgttggtgatttccaaggagtacactatcggtaacgccatgaccgttttcttttcaattctgatcggggcatttagcgtcgggcaggccgcaccgtgcatagatgcattcgcaaacgccaggggagcggcctacgtgatttttgacattatcgataacaatcccaagattgactccttctcggagaggggacataaaccagactccattaagggaaacttggagttcaatgacgttcatttctcgtaccctagccgcgcaaacgtgaagattcttaagggcctcaacctcaaggtgcagtccggacaaaccgtggcactggtgggatcctccggctgcggaaagagcaccactgtgcaactgatccaaagactctacgatcctgacgaaggcaccataaacatagacggacaggacatcagaaactttaatgtgaactacctccgagagataattggagtggtgtcgcaagagcctgtgcttttttcgaccactatcgcagaaaacatttgttatgggcggggaaatgtgaccatggatgaaatcaagaaagcagtgaaggaagcaaacgcctacgaattcataatgaagttgcctcagaagttcgacactctggtgggtgaacggggtgcacaattgagcgggggacaaaaacaacgcattgccatcgctagagcactcgtgagaaaccccaagatcctgttgcttgatgaagcaacttcggcactcgatactgaaagcgaggccgaggtgcaggcagcactggataaggcaagagagggacgcaccaccatcgtgatcgctcaccggcttagcaccgtgcgaaatgccgatgtgatagcaggttttgaggatggagtgattgtcgagcaaggatctcattccgagcttatgaagaaggaaggagtgtacttcaaactcgtcaacatgcaaacctcaggttctcagatccaatcagaagaattcgaacttaatgatgagaaggcggccaccagaatggcgcctaatggatggaaaagccggctctttagacactcaactcagaagaaccttaagaactcgcaaatgtgtcagaaatcgcttgatgtggaaaccgatgggttggaagcaaacgtccctcctgtttcgtttctgaaggtgctgaaactgaataagaccgagtggccatacttcgtggtgggaaccgtgtgtgcaattgcaaacgggggcttgcagcctgccttttcggtaatcttttctgaaatcattgcgatatttggccccggcgacgatgctgtgaagcagcagaaatgcaacattttctctcttatcttcctctttcttgggatcatttcatttttcactttctttcttcagggctttaccttcgggaaggcaggggaaattctcacccgtagactgcgatcaatggcattcaaagccatgcttagacaagatatgtcctggtttgacgatcacaaaaacagcaccggggcactttccacccggctcgcaaccgacgcagcacaagtccaaggggccactggaacgaggctggcactgattgcacagaatattgcaaatcttggtaccgggataatcatatcgttcatttatggatggcaactcacccttttgctcctggccgtggtgccgataattgcagtgtcaggtattgtagaaatgaaactgctggcgggtaacgccaagcgcgataagaaggagttggaggcagctggcaagatcgccactgaagctattgaaaacatccgtaccgtcgtgtccctgactcaggaacgaaagtttgaaagcatgtacgtggaaaaactttacggaccgtaccgaaattcagtgcagaaagcccacatctatggaattactttttccatttcgcaagcctttatgtacttttcgtacgctggctgctttagatttggcgcatacctcatcgttaacggccacatgcggttccgcgacgtgattcttgtgtttagcgcaatcgtctttggagccgtcgcgctgggccacgcatcctcctttgcgcccgattacgcgaaggccaaactttccgcagctcacctctttatgcttttcgaacgccaacctctgatagattcctactccgaagaaggacttaagcctgataagtttgaaggcaacattacctttaacgaggtggttttcaactaccccactagagctaatgtgcctgtcctccaaggcctgtccctggaagtgaagaagggccagactctggccctggtggggtcctcaggctgtggaaagtcgacggtcgtgcaactcctggagcgattctacgacccactcgccggtaccgtgttcgtggattttggatttcaactgcttgatggccaagaagcaaagaagctgaatgtgcaatggcttagggcacaacttggtattgtgtcccaagagccaattctgttcgattgttcgatcgcagagaacattgcctacggtgataattcgagagtcgtgtcccaggacgaaatagtgagcgcagctaaggcagcaaacattcatccattcattgaaacgctccctcataagtacgaaaccagagtgggggataagggcacccaactgagcggtggtcaaaagcagagaatagcaattgcacgcgctctgatccgccaaccacagatcctgctgctggacgaagcgaccagcgcactcgacactgaatccgaaaaggtggtgcaagaagctctcgacaaggctagagaggggagaacctgtattgtgattgcccatagactctcgactatccagaacgcggacctcattgtggtgttccaaaacggacgggtgaaggaacatggtacccaccagcagcttctcgcccagaagggtatttacttctcgatggtgtcagtccaggctggtacccagaatctc

SEQ ID NO: 200183 - DNA, 3858 bp, Artificial Sequence
  derived and/or modified sequence
atggatctcgaggcggcgaagaatgggaccgcctggcgaccaacatccgctgaaggggatttcgaactcggtatctcaagtaagcagaagagaaagaagactaaaaccgtgaaaatgatcggggtgttgacactttttagatactctgattggcaagacaagctattcatgtctctggggacaataatggctattgcccacggctcaggcttgcctttaatgatgatcgtgttcggcgagatgacagacaaatttgtagacactgccggaaactttagctttccagtgaatttctccttgtccctcttgaatcccggcaaaatcttggaagaggagatgactcgctacgcctactactattccggtcttggagcaggggtgctcgtggcagcgtacattcaggtgtctttctggaccctcgcagccggaagacagattcggaaaatccgacagaaattttttcatgcgatcctgcgtcaggagattggatggtttgacatcaacgatactactgagcttaatactcgactgacagacgacattagtaaaattagcgaagggatcggcgataaggtaggtatgttttttcaagccgtggcaaccttctttgcagggtttatagtgggatttatacgtgggtggaagctgacgctggtcatcatggccatttcccccatccttggtctgtcggcggccgtgtgggccaagattttatccgccttttccgataaagagttggccgcctatgcaaaagccggcgccgtggcagaagaagcactcggagctatacgaaccgtaattgctttcggtggacaaaacaaggaactagagcgatatcagaagcatctggaaaacgctaaggagatcggaatcaagaaggccataagcgcaaatataagcatgggcatcgcctttctgctgatttacgcctcctatgccttggctttctggtatggaagtacgctggtcatctcaaaagagtatactattggaaatgccatgaccgtcttctttagtatcctgatcggcgcatttagcgtagggcaggctgcgccctgtatcgacgccttcgcgaatgctaggggggctgcctacgttatctttgacatcattgacaataaccccaagatcgattcattcagcgaacgaggccataagccagattccataaagggaaatttggaattcaatgatgttcatttctcatacccttcacgagctaacgtgaaaatccttaagggccttaatctgaaagtgcaaagcggtcagactgtggccctggtaggttccagcgggtgcggcaaaagcaccactgtgcagctgatccagagactttatgatccggatgagggcacaatcaatatcgacggacaggatattagaaattttaatgtgaattacctgagagaaattattggcgtggtgagccaggaaccggtgctcttcagtaccaccattgctgaaaatatctgttatgggagggggaatgtcacgatggatgagatcaagaaagcagttaaagaagccaatgcatatgaattcatcatgaagctgcctcagaagttcgatacattggtgggggaaaggggggcgcagctgtctgggggccaaaagcaacgaatagccattgctagggcccttgtgagaaatccgaaaattcttttactagatgaagccacctccgcactagacactgagagtgaggcggaggtgcaggcggcactggacaaagcaagagaagggcgaacaacaatcgttatcgcacacaggctgtcaacggtgaggaatgccgatgtaatcgctgggttcgaagacggtgtgatagtggagcaaggatcgcactcggaacttatgaaaaaagaaggggtatacttcaagctcgtcaatatgcagacctctggctcccagattcagtccgaagagttcgagctcaacgatgagaaggctgctactagaatggcccccaatgggtggaaatcgagattatttagacacagcacccagaagaacctcaagaacagtcagatgtgccagaagtccctggacgtcgaaacagacggactcgaagccaacgtgcctccagtttcatttctgaaggtacttaagttgaacaagacagagtggccttactttgttgttgggaccgtgtgtgcaatcgcaaacggtgggctgcaacccgcgttctccgtcatttttagcgaaataattgctatatttggccctggagatgatgcggtcaaacagcaaaagtgcaatatttttagcctcatcttcctttttcttggaatcatatctttcttcactttctttctgcagggcttcacctttggtaaagccggcgaaatattgacgcgaaggctgagatccatggcatttaaagctatgctacggcaggacatgtcctggtttgatgatcacaagaactcaaccggagcgttgtcaacacgtctggcgactgatgcagcccaggttcagggagccaccggcaccagactggcattgatagctcagaacatcgcaaacctgggcacagggattataatttcatttatctatggctggcagttgacattgctcttgctcgctgtggtccctatcatcgcagtttcaggtatcgttgaaatgaaattactggctggcaatgctaaaagggataaaaaggagttggaggcggccgggaaaatagccacagaagctatcgaaaatatcaggaccgtggttagcttgacccaggaacgaaaattcgagtcgatgtatgtcgaaaagttatacgggccctaccgaaactcagttcagaaggcgcacatctacggtataacgttcagtattagccaggcattcatgtatttcagttatgctggctgctttaggttcggcgcctatctgatcgtcaacgggcacatgcgatttcgtgacgtgatactggtgttcagcgccattgtgttcggcgctgtagctctaggccacgcatcatccttcgcgcccgattacgctaaagcgaaactgtccgcagctcacctttttatgctcttcgagaggcaacccctcattgacagttatagcgaggagggcctcaagccagataaattcgagggtaatataacctttaatgaagtggtattcaactatccaacacgcgccaacgtgcctgttttgcagggcctgtccctcgaggtgaagaagggacagacactcgctctggtgggctcctctggatgcgggaagtctactgtagtgcaactgctggagcgcttttacgatcccctggccggaaccgtgttcgttgacttcggatttcagcttctggatgggcaagaagcaaaaaaactaaatgtccaatggcttcgggcccagcttggtatcgttagccaggaacccatcctgttcgattgcagtatcgccgagaatattgcctatggtgataactctagagtggtctcccaggacgagatcgtgagcgctgccaaggccgccaatattcacccgttcatagagaccctgcctcataagtacgaaacaagggttggagacaaaggtacacaactgtccggcggtcaaaagcagcgcatagctatcgcccgcgccctgatcagacagcctcagatcctgctactagatgaagcaaccagtgcccttgacaccgaaagcgaaaaagtggttcaggaagcactcgataaagcgcgcgagggacggacctgtattgttatcgcccatcgtctgagcaccatccagaatgcagacctcatagttgtgttccagaacggtcgggtgaaggagcacggaactcatcagcaattgctcgctcagaaaggcatctacttctccatggtgagcgtgcaggcaggaacccagaatttg

SEQ ID NO: 200184 - DNA, 3858 bp, Artificial Sequence
  derived and/or modified sequence
atggacctcgaagcagctaagaatgggactgcctggcgcccgacctccgcagagggggatttcgaactgggcatcagctcgaaacaaaagagaaaaaagactaaaacggtaaagatgatcggcgtcctgaccctgttccgctactcagactggcaagataaactgttcatgtctttgggaacgattatggcgatcgcccacggctccgggctgcccctcatgatgatcgtattcggtgagatgaccgacaaattcgttgacaccgcgggaaatttctcgttccccgtgaacttctccctgagcctgcttaatccgggaaagatcctggaagaagaaatgacccggtatgcctattactactcggggctcggagctggggtcctggtggctgcatatatccaagtcagcttctggaccctggcggctggcagacagatcagaaagatccgccagaagtttttccacgcgatcctgcgacaagagatcggctggttcgacatcaacgatacgaccgagctcaacactcggctcactgatgacatttccaagatctcggagggtatcggagataaggtcggaatgttcttccaggcagtggccacttttttcgcgggctttatagtgggatttatcaggggctggaagctgactctggtgatcatggctatctccccaatcctggggttgtcggcggccgtgtgggcaaaaatcctgagcgcgtttagtgacaaggagcttgccgcctacgcaaaggcaggagctgtggccgaagaagctctcggtgccattcggaccgtgatcgccttcggtggacagaataaggaactcgaacggtaccaaaagcacctcgaaaacgctaaagagatcggaatcaagaaagcgatctcagcgaacattagcatgggaatcgcattcctcctgatctacgcttcatacgctctggccttctggtacggatcgaccctggtgatctcaaaggaatacaccataggaaacgccatgacggtgttctttagcatcctcatcggtgccttctcagtgggacaggcggccccgtgtattgacgcattcgccaatgccaggggagcagcttacgtgatattcgacatcattgacaacaacccgaaaatcgactcattcagcgaacgggggcacaagccagatagcattaaaggaaatttggagttcaacgatgtgcacttttcctacccgagccgggcaaatgtgaagatcctgaagggcttgaatttgaaagtgcagtcggggcagaccgtcgctctggtggggagctccggctgcggtaaatcaactactgtgcagctgattcagagactctacgatcctgatgagggaactatcaacatcgatggtcaggacatccggaatttcaacgttaactacctccgagaaatcatcggagttgtgagccaggaaccagtgctgttctcaaccactatcgcagagaacatttgctacggaagagggaacgtcaccatggacgagatcaagaaagccgtgaaagaggccaatgcctacgaattcatcatgaagctgcctcaaaagtttgacaccctcgtgggcgaacgcggagctcagctgtccggtgggcaaaagcagcgcatcgccatcgctcgcgcacttgtcaggaacccgaagatcctgctgctcgacgaggcgacttccgccctcgacaccgaatcggaagccgaggtgcaggctgccctcgataaggcccgggaaggacgcactacgatagtgatcgcgcaccggttgtcgactgtcagaaatgccgacgtcattgcaggcttcgaggacggagtcatcgtggagcagggatcgcactcggagctgatgaagaaggaaggcgtctacttcaaactcgtgaacatgcaaacgagcgggagccagatccagtccgaagagttcgagctgaacgacgaaaaggctgccaccagaatggctcccaacggatggaagtcccggctgtttcgccattccacccagaaaaatctgaagaactcccaaatgtgccaaaaaagcctggacgtggaaaccgacggactcgaggccaacgtcccgcccgtgtccttcctcaaggtgctcaagctgaacaaaaccgaatggccatacttcgtcgtcggcactgtgtgtgctatcgcgaacgggggacttcagccggccttttcggtgatcttctccgagatcatcgcaatctttggcccgggagacgacgcggtaaaacagcagaagtgcaacatcttctccctgattttcctgttccttggaatcatatcattcttcactttctttctgcaaggatttaccttcggaaaggcaggagaaatcttgactcggcggcttaggtccatggctttcaaggctatgctcagacaggatatgtcctggttcgatgatcacaagaactcaactggagcgctgtccactcgcctggccactgacgccgcccaagtgcagggcgccaccggaactcgactcgcgcttatcgcccagaacatcgcgaatctgggaaccggaatcatcatctcgttcatttatggctggcagcttactctgcttttgctcgctgtggtgccgatcattgcagttagcggcatcgttgagatgaagttgttggctggaaatgcgaaacgcgacaagaaggagctggaggctgcggggaagatcgccactgaggccatcgagaatattcgtactgtggtgtccttgacccaagaacgcaaatttgagtccatgtacgtggaaaagctctacggaccgtaccgtaattcagtccaaaaagcacatatctacgggattacgttctcaatctcgcaagcgtttatgtacttttcatacgcaggatgctttcgcttcggcgcgtacctgatcgtgaacggccatatgagattccgagacgtcatcctggtgttctcggccatcgtgttcggtgctgtggccctcggacatgcgtcctcgtttgccccggattacgccaaggccaagctgtccgcagcccatctcttcatgctgtttgagcgccaacctctgattgattcgtacagcgaggaagggctgaaaccagataagttcgaagggaacatcaccttcaacgaagtcgtgttcaattaccccacccgggccaatgtgccagtcctgcagggcctgtcgctggaggtgaaaaagggtcagacccttgcattggtgggctcatccggctgcggcaagagtaccgtagtccagctcctggaacgcttctacgacccactcgccggaactgtctttgtcgacttcggattccagctgctcgacggccaggaagcgaagaaactgaacgtgcagtggctgcgcgctcagctcggaatagtttcgcaggaacctatcctctttgactgttcaatcgcagaaaacatcgcctacggcgataactcgagagtcgtctcacaagacgagatcgtcagcgccgcgaaggcagccaatatccatcctttcatcgaaactcttcctcacaagtacgaaaccagggtgggagataagggtactcagttgtcaggaggacagaagcaacgaatagcaatcgctcgagccctcatccgccagccccaaattctcctgctggatgaggcgacgtctgcgcttgacaccgagtcggaaaaagtggtgcaggaggccctcgacaaggcccgcgaaggccggacctgtatcgtgatcgcacatcggctttcgacgattcaaaacgccgatctgatcgtggtgttccaaaatggacgcgtcaaggaacacggaacccaccaacaactgttggcccagaagggtatctacttcagtatggtgtcggtgcaagctggcacccagaacctg

SEQ ID NO: 200185 - DNA, 3858 bp, Artificial Sequence
  derived and/or modified sequence
atggacctggaagccgccaaaaacggtacggcttggcggccaacatcagccgagggtgattttgaactcgggatctccagcaagcagaagcgaaaaaagaccaagaccgtcaagatgatcggggtgctcacactattcagatacagtgattggcaggacaagctctttatgagtttgggcaccattatggccatagcgcacggaagcggcctaccactcatgatgatcgttttcggggagatgacagacaaattcgtggacacagcggggaacttctccttcccggtgaatttcagcctctctttgctgaacccaggcaaaattctcgaggaggaaatgactcggtatgcctactactattctgggctgggtgccggagtacttgtggcggcatacatacaggtaagtttctggacactcgcagcagggcgccagatccgcaagattaggcagaagttctttcacgctatcttgcggcaggaaattggttggttcgatatcaatgacactaccgagcttaacactcgcctgaccgatgacatatccaagatatcagagggcatcggagataaagtggggatgtttttccaagccgtcgccactttttttgccggcttcatagtcggattcatccgcggttggaaactgactttggtgatcatggctatcagccctatcctgggcttatccgctgcggtgtgggctaagatcctcagcgccttctcagataaagagttggccgcctatgcaaaagcgggagcggtggccgaggaagcgctgggtgcaatcagaactgttatagctttcggcggccagaataaggagttggagaggtatcagaaacatttagagaatgccaaggaaatcggcataaagaaggcaattagcgcgaacatcagcatggggatcgccttcctactgatctatgcatcgtatgccctggcattctggtatggctctacgctcgtcatttcgaaagaatatacgatcggaaatgccatgactgtgttcttctctatcctgataggcgcgttttccgtggggcaggctgctccatgtattgatgcattcgcaaacgcacgaggcgccgcttatgtgatctttgacattatcgacaacaacccaaaaatcgactcctttagcgaaagggggcataagccagattcgatcaaggggaacctcgagttcaacgacgtgcacttctcctacccgtcccgagctaatgtgaagatcctcaagggactcaatctgaaggttcagtctggtcagaccgtggcgctggttgggtcctctgggtgcggaaagagcacaacagtacagttaatccaaagattatatgacccagatgagggtacaattaatatagatggtcaagacattaggaactttaatgtaaactatttgcgagagataattggggtggtgagtcaggaaccagtgcttttttctacgaccatcgccgagaacatctgttatggtcggggtaacgtgactatggatgaaatcaaaaaggccgtgaaagaagccaacgcctacgaattcatcatgaagcttccgcagaaattcgacaccctggtgggcgaaagaggtgcacagctgagtgggggccagaagcagcgtattgcgattgcccgagccttggttcggaatccaaagatcctattgcttgatgaggctacaagtgctctggatactgaaagcgaagcagaggtccaggccgccctcgacaaggctcgcgaggggcggaccacaatcgttattgcacaccgactgagcacggtgagaaacgctgatgtgattgccggattcgaggatggtgtgatcgtcgagcaagggagccatagcgaactcatgaagaaagagggcgtctatttcaagctcgtgaatatgcagacatctggttcacaaatccagagcgaagaatttgagttgaatgatgagaaagctgccaccagaatggcccccaatggctggaaaagtcggctcttcaggcatagcacccagaaaaacttaaagaattcccagatgtgtcagaagagcttagatgtcgagaccgatggcctggaggctaacgtccctcctgtgtctttcctgaaagtcttgaaattgaacaagactgaatggccctactttgtggtggggaccgtgtgcgctattgctaacggcggtctacaaccggcattttctgtcatattttctgagattatcgcaatctttggacccggtgatgacgccgtgaagcagcagaagtgcaacatattcagccttatctttctgtttctgggaattatcagcttttttacctttttcttacagggcttcacttttggcaaggcgggtgaaatcctcacacgccgtctgaggagcatggcgtttaaggccatgctgcgtcaggacatgagctggtttgacgaccacaagaatagcaccggagcattgagcacgaggctggctaccgacgcagctcaggttcagggtgctactggcacccggctggcactgatcgctcagaatatcgccaacctggggaccgggataatcatatcttttatctacggttggcagctgactctgctgctcctggctgtggttcccattatcgctgtgtctggaattgtagagatgaaactactcgccgggaatgcaaaaagagacaagaaggagctagaagctgccggaaagattgcaactgaagcgatcgagaacattcggaccgtggtatcccttacacaggagcggaagttcgaaagcatgtatgtggaaaaattgtatggtccctatcgcaatagtgtgcagaaagctcacatctatggtatcacttttagcatatcgcaggccttcatgtacttctcatacgctgggtgctttagatttggcgcctacttgatcgtcaatggccacatgaggttcagagacgtgatacttgtctttagcgctatcgtattcggcgcagtcgcactgggccatgcgtcctcctttgcgcccgactacgccaaggctaaactgtccgccgcccatcttttcatgcttttcgaaagacagcccctcatagattcatattcggaggagggactcaaaccggataagtttgaagggaatatcacctttaatgaagtggtgtttaattatccaactagagcaaacgtgccagtacttcaaggacttagtctggaggtcaagaaggggcaaacattagcccttgtggggtcttccggctgcggcaagagtacagtcgtccagctactggaaagattttacgatcctctcgctgggaccgtgttcgtggactttggctttcaacttctggacggccaggaggccaaaaagttgaatgtccaatggctcagagcccagttaggaattgtgagtcaagaacctatcctcttcgactgttcgattgccgaaaatatcgcatacggggacaattcaagggtagtctcacaagacgaaatcgtctcagccgcgaaggccgccaatattcatccgttcatcgagactctgccacataaatacgaaacaagggtcggagacaagggtactcaactcagtggtggacagaagcagcgcatcgccattgcccgcgctctgattcgacagccccagatcttgctgctggacgaggccacctccgctctcgacacagaatccgaaaaggtcgtgcaggaggctttggacaaggccagggaagggagaacgtgcatcgtgatagctcatcggctcagcactattcagaatgccgatctcatagtcgtgttccagaatggcagagttaaggagcacgggacccaccagcagctgttggctcagaaaggaatttacttctccatggtgtcggtacaagctgggactcagaacctt

SEQ ID NO: 200186 - DNA, 3858 bp, Artificial Sequence
  derived and/or modified sequence
atggacctggaagctgctaagaacggaactgcctggcgccctacgtctgccgagggagacttcgaattgggaatcagctccaaacagaagcgcaaaaagaccaaaaccgtgaagatgatcggagtgctgaccttgtttcggtactcggactggcaagacaaacttttcatgtcgctgggaactatcatggcaattgcgcacggatctggtctgcctctgatgatgattgtttttggggaaatgaccgacaaattcgtggataccgctggaaacttcagcttcccggtgaacttttccctgagcttgcttaacccaggtaagatcctggaggaggaaatgaccaggtacgcgtattactactcaggcctgggagcaggtgtgctggtcgcggcatacatccaagttagcttctggaccctcgcggcggggcgccagatcagaaagatccgccagaagttttttcatgcgatcttgcgccaggaaatcggatggttcgacatcaacgacaccactgagctgaacaccagactcactgacgacatctcgaagatctcggaaggaatcggcgataaggtcggaatgttctttcaggcagtcgcgaccttctttgctggattcatcgtgggcttcatccgcggctggaagttgaccttggtgataatggccatcagcccgatcctcggcctgtcggcggccgtctgggcgaagatcctctccgccttctcagataaggagctggccgcatacgcgaaagcgggagccgtcgcggaagaggccctgggcgccatccggactgtgatcgcgttcggaggacagaataaagaactcgagcgctaccagaagcacctcgagaatgctaaggaaatcggaatcaagaaggcaatttcggccaacatcagcatgggcattgccttcctgctgatctacgcatcctacgcgctcgccttttggtacggatcgactctcgtgatttcgaaggaatacactatcgggaacgccatgactgtgtttttctcgatcctgatcggtgcgttctcagtgggccaggctgctccatgcatcgatgcctttgccaacgcgcgcggcgccgcctatgtcatcttcgacataatcgacaacaacccaaagatcgatagcttctcagaacgcggacacaagccggactcgatcaaaggtaatcttgaattcaacgatgtgcatttttcatacccttcaagggcgaacgtgaagatcctcaaggggctgaacctcaaggtgcaaagcggacaaaccgtcgcgctggtgggctcatctggctgcggcaagtcgaccactgtgcagctgatccagcgcttgtacgacccggacgagggcaccatcaacatcgacggacaggacattcggaatttcaatgtgaactacctgcgcgagatcataggagtggtgtcccaggaacccgtgctgttctccaccacgatcgccgagaacatttgttacggccggggaaatgtgaccatggatgagatcaaaaaagccgtcaaagaggcgaacgcttacgagttcatcatgaaactgccacagaagttcgacaccctggtcggagaacgcggtgcacagctgtccggaggccaaaaacagcgcatcgcgatcgcaagggcgctggtccggaaccctaagatcttgctcctcgatgaagcgacgagcgcgcttgacaccgagagcgaagcggaagtgcaggcagcactcgataaggccagagagggccggacgacgatcgtgattgctcacaggctgtccaccgtccgcaatgcagatgtgatcgcaggatttgaagatggcgtgatcgtggagcaaggatcacacagcgaattgatgaaaaaagaaggggtgtactttaaacttgtgaatatgcagacttccggatcacaaatccagtccgaggaattcgagctcaacgacgaaaaagccgccacccgaatggcaccgaacggatggaagagtcggctgtttcgtcattcaacccagaaaaacctgaaaaacagccagatgtgccagaagagcctggacgtggaaaccgacgggcttgaggccaacgtgccaccagtttccttcctcaaggtgctcaaactcaacaagaccgaatggccctactttgtggtcggtaccgtgtgcgccatcgccaacggtggactgcaaccggctttctctgtgatcttcagcgaaatcatcgcgatctttggaccgggagatgatgcggtcaagcagcagaagtgcaacattttctctctgattttcctgttcttgggaattatctcattcttcacttttttcctgcaaggttttacgttcggtaaagccggtgaaatcctgactagacggctcagatctatggccttcaaggcaatgcttagacaggatatgagctggttcgacgaccacaagaatagcaccggagcgctgtcaacccgcctggccactgatgccgcccaagtccaaggagccactggaactcggctggcgctgatcgcacagaacatcgcaaatctggggaccgggatcattatctccttcatctacggatggcagctgactctgctgctgttggccgtggtcccgataattgctgtgtccggcatcgtcgagatgaagctgctggcgggtaacgccaagagggataagaaggaactcgaggcagcggggaaaatcgctactgaggctatcgagaatatccggactgtcgtgtccctcacgcaagaaaggaagtttgaatcaatgtacgtggagaagctgtacggaccgtaccggaattcggtgcagaaggctcacatctatggaatcactttttcaatctcccaggcattcatgtacttcagctacgcgggatgcttccggttcggtgcatacctgatcgttaatggacacatgagattccgcgatgtgatcctggtgttctcagcaatcgtgtttggagcagtggccctgggccatgcgtcctccttcgcgccggactacgcgaaggccaagctgtccgccgcccacctgttcatgctcttcgagcgccaaccattgatcgactcgtactcggaggaaggcttgaaacctgataagttcgaagggaacatcacgtttaacgaggtggtctttaactaccctaccagagcgaatgtccccgtgctgcaagggctctcgctggaagtgaagaagggacaaactctggctctcgtgggctcttcgggatgcggaaaatcgaccgtggtgcaactgctcgagcggttctacgacccactggcaggaaccgttttcgtggacttcggcttccaactgctggacggacaggaggcaaagaagctcaacgtgcagtggctccgggcacagctcgggatcgtctcacaagaaccgatcctcttcgattgctcaatcgccgaaaacatcgcctatggcgacaactccagagtggtcagtcaggatgaaatcgtctcggcggccaaggccgccaatatccacccctttatcgaaactctgccgcacaagtacgaaactcgggtgggggacaaggggactcaattgtcggggggacagaagcagcggatcgctatcgcgcgcgcattgataagacaaccgcaaatcctccttcttgacgaggctacgtctgccctggacaccgaatcagagaaagttgtgcaggaggcgctggataaggcccgcgaaggtcggacgtgcatcgtcatcgctcaccgcttgtcgactatccagaatgccgacctcatcgtggtctttcagaacggacgcgtgaaagaacacggaactcaccagcagctgctcgcccagaagggcatctatttctctatggtgtctgtccaagctggaacccagaatctc

SEQ ID NO: 200187 - DNA, 3858 bp, Artificial Sequence
  derived and/or modified sequence
atggatctagaagcggcgaaaaatggtacggcgtggcgtccgacgtcggcggaaggtgattttgaattaggtatatcgtcgaaacaaaaacgtaaaaaaacgaaaacggttaaaatgataggtgtattaacgctatttcgatattcggattggcaagataaactatttatgtcgttaggtacgataatggcgatagcgcatggttcgggtttaccgctaatgatgatagtatttggtgaaatgacggataaatttgtagatacggcgggtaatttttcgtttccggtaaatttttcgttatcgttattaaatccgggtaaaatattagaagaagaaatgacgcgttatgcgtattattattcgggtctaggtgcgggtgtattagttgcggcgtatatacaagtatcgttttggacgttagcggcgggtcgacaaatacgtaaaatacgtcaaaaattttttcatgcgatattacgacaagaaataggttggtttgatataaatgatacgacggaactaaatacgcgtctaacggatgatatatcgaaaatatcggaaggtataggtgataaagtaggtatgttttttcaagcggttgcgacgttttttgcgggttttatagttggttttatacgtggttggaaattaacgctagtaataatggcgatatcgccgatactaggtttatcggcggcggtatgggcgaaaatactatcggcgttttcggataaagaattagcggcgtatgcgaaagcgggtgcggtagcggaagaagcgttaggtgcgatacgaacggtaatagcgtttggtggtcaaaataaagaattagaacgatatcaaaaacatttagaaaatgcgaaagaaataggtataaaaaaagcgatatcggcgaatatatcgatgggtatagcgtttttactaatatatgcgtcgtatgcgctagcgttttggtatggttcgacgctagtaatatcgaaagaatatacgataggtaatgcgatgacggtttttttttcgatactaataggtgcgttttcggtaggtcaagcggcgccgtgtatagatgcgtttgcgaatgcgcgtggtgcggcgtatgtaatatttgatataatagataataatccgaaaatagattcgttttcggaacgaggtcataaaccggattcgataaaaggtaatctagaatttaatgatgtacatttttcgtatccgtcgcgtgcgaatgtaaaaatattaaaaggtttaaatctaaaagtacaatcgggtcaaacggttgcgttagtaggttcgtcgggttgtggtaaatcgacgacggtacaactaatacaacgtttatatgatccggatgaaggtacgataaatatagatggtcaagatatacgtaattttaatgtaaattatctacgtgaaataataggtgtagtttcgcaagaaccggtattattttcgacgacgatagcggaaaatatatgttatggtcgtggtaatgttacgatggatgaaataaaaaaagcggttaaagaagcgaatgcgtatgaatttataatgaaattaccgcaaaaatttgatacgttagtaggtgaacgaggtgcgcaattatcgggtggtcaaaaacaacgtatagcgatagcgcgtgcgctagtacgtaatccgaaaatactactactagatgaagcgacgtcggcgctagatacggaatcggaagcggaagttcaagcggcgttagataaagcgcgagaaggtcgtacgacgatagtaatagcgcatcgtttatcgacggtacgtaatgcggatgtaatagcgggttttgaagatggtgttatagtagaacaaggttcgcattcggaattaatgaaaaaagaaggtgtttattttaaattagttaatatgcaaacgtcgggttcgcaaatacaatcggaagaatttgaactaaatgatgaaaaagcggcgacgcgaatggcgccgaatggttggaaatcgcgactatttcgacattcgacgcaaaaaaatttaaaaaattcgcaaatgtgtcaaaaatcgttagatgttgaaacggatggtctagaagcgaatgttccgccggtttcgtttctaaaagttctaaaactaaataaaacggaatggccgtattttgtagtaggtacggtatgtgcgatagcgaatggtggtctacaaccggcgttttcggttatattttcggaaataatagcgatatttggtccgggtgatgatgcggtaaaacaacaaaaatgtaatatattttcgttaatatttttatttttaggtataatatcgttttttacgttttttttacaaggttttacgtttggtaaagcgggtgaaatactaacgcgtcgattacgatcgatggcgtttaaagcgatgttacgacaagatatgtcgtggtttgatgatcataaaaattcgacgggtgcgctatcgacgcgtttagcgacggatgcggcgcaagtacaaggtgcgacgggtacgcgtttagcgttaatagcgcaaaatatagcgaatctaggtacgggtataataatatcgtttatatatggttggcaattaacgctactattattagcggttgttccgataatagcggtatcgggtatagtagaaatgaaattactagcgggtaatgcgaaacgtgataaaaaagaattagaagcggcgggtaaaatagcgacggaagcgatagaaaatatacgaacggtagtttcgctaacgcaagaacgtaaatttgaatcgatgtatgttgaaaaattatatggtccgtatcgaaattcggttcaaaaagcgcatatatatggtataacgttttcgatatcgcaagcgtttatgtatttttcgtatgcgggttgttttcgatttggtgcgtatttaatagttaatggtcatatgcgatttcgagatgtaatattagtattttcggcgatagtatttggtgcggtagcgctaggtcatgcgtcgtcgtttgcgccggattatgcgaaagcgaaattatcggcggcgcatctatttatgctatttgaacgacaaccgttaatagattcgtattcggaagaaggtctaaaaccggataaatttgaaggtaatataacgtttaatgaagtagtttttaattatccgacgcgagcgaatgtaccggtattacaaggtctatcgctagaagttaaaaaaggtcaaacgctagcgttagttggttcgtcgggttgtggtaaatcgacggtagtacaactattagaacgtttttatgatccgctagcgggtacggtttttgttgattttggttttcaattattagatggtcaagaagcgaaaaaactaaatgtacaatggttacgtgcgcaattaggtatagtatcgcaagaaccgatattatttgattgttcgatagcggaaaatatagcgtatggtgataattcgcgtgtagtttcgcaagatgaaatagtttcggcggcgaaagcggcgaatatacatccgtttatagaaacgttaccgcataaatatgaaacgcgagtaggtgataaaggtacgcaattatcgggtggtcaaaaacaacgtatagcgatagcgcgagcgttaatacgacaaccgcaaatattattattagatgaagcgacgtcggcgctagatacggaatcggaaaaagttgtacaagaagcgttagataaagcgcgagaaggtcgaacgtgtatagtaatagcgcatcgtttatcgacgatacaaaatgcggatttaatagtagtatttcaaaatggtcgtgttaaagaacatggtacgcatcaacaactactagcgcaaaaaggtatatatttttcgatggtatcggttcaagcgggtacgcaaaattta

SEQ ID NO: 200188 - DNA, 3858 bp, Artificial Sequence
  derived and/or modified sequence
atggatctggaggccgccaaaaatggcaccgcatggcgacctaccagtgcggagggagacttcgagctggggatatcaagcaagcagaagaggaaaaagaccaagacggtcaaaatgattggagtccttaccctttttagatactcagattggcaagataagttgttcatgtccctcggcaccattatggcgattgctcatggatcgggtttgcctttgatgatgatcgtgtttggtgagatgaccgataagtttgtggatactgccggaaacttctcatttccagtcaactttagcctgtcacttctgaacccaggaaaaatcttggaagaagagatgaccaggtacgcatactactactcgggattgggtgcaggggtgctggttgcggcatacatccaggtttccttttggacccttgctgccgggcggcagattagaaagattaggcaaaagtttttccatgcgatcctccgccaagagattggctggttcgatatcaatgatactaccgaacttaacactcgactgaccgatgatatttcgaagatctccgagggaataggggataaggtgggtatgttcttccaggccgtggcaaccttctttgcgggattcatcgttggattcattcgtggttggaagctcacccttgttatcatggcaatctcaccaattttggggctgtcagccgccgtgtgggccaaaattctctcagcattttctgacaaggagttggcagcctacgcaaaggcgggtgctgtggcggaagaggcccttggagccatcagaactgtgattgcctttggcggtcagaataaagaactcgagcgataccaaaagcatctcgaaaacgctaaggagatcggtattaagaaagcaatttcagccaacatatctatgggtattgccttcctcctcatttacgcatcctacgccctcgcattttggtatggttcgactctcgtgatttctaaggaatacactatcggaaatgcaatgactgtgttcttttcgattttgattggtgctttctcggtgggtcaggctgcaccctgtattgacgcatttgccaacgcacgcggtgcagcatacgtcatttttgacattattgacaacaacccaaagattgattcctttagtgaacgtggccataaacccgatagcattaagggtaacctggagtttaacgatgtgcacttttcgtacccatcccgagccaatgtgaagatccttaagggtctgaacctcaaagtgcagtccggacagactgtagcacttgtggggagctctggttgcggtaaatcgaccaccgtgcagctcatccagcggctgtacgaccccgatgagggaaccattaacatcgatggtcaggatatcaggaacttcaacgtaaactaccttcgcgagattataggtgttgtgtctcaagaacctgtgctgtttagcactacgatagcggaaaacatatgctacggaaggggaaacgtgaccatggatgaaatcaagaaagcagtcaaggaagcgaatgcttacgaattcattatgaaactccctcagaaatttgacaccctggtgggagaaagaggtgcccaactcagcggtggtcaaaaacaacggatcgcaatcgcaagggcactggtgcggaaccccaaaatacttctgttggatgaggctactagcgctcttgataccgaatcagaagcagaggtgcaggcagcactggataaggcccgggaaggccgtacgaccattgtgattgcgcaccgactctccactgtcaggaatgccgatgtgatcgcagggtttgaagatggagtcatcgtcgaacagggttcacattccgagcttatgaagaaggagggagtgtactttaagttggtgaacatgcagacctcgggaagccaaatacaatcagaggaattcgaacttaacgacgagaaagcagccaccagaatggccccaaatggttggaaatccaggctgtttcggcattcgacccaaaagaacttgaagaactcccagatgtgtcaaaagtccctggacgtggagactgatggacttgaagccaatgtgcctcccgtgagcttcctgaaagtgctgaagctcaacaagaccgaatggccgtactttgtggtcgggactgtgtgtgcaattgcaaacgggggactgcagcctgcatttagcgtgatcttttccgaaatcatcgcaattttcgggcctggagatgacgcagtcaaacaacaaaagtgtaacatcttttccctcattttcctgtttttgggaataatctcatttttcactttcttcctccagggatttacgtttgggaaggccggtgaaatccttactagacggctgcgttcaatggcgtttaaggcaatgctgagacaagacatgtcgtggttcgacgaccacaagaactccaccggtgcgcttagcaccagactcgcgactgatgcagcacaagtgcagggtgcgactggcactcggttggcactgatcgcacagaatatagcaaatctcggtacggggatcatcatatctttcatatacggctggcagcttaccctgcttctgctggctgtcgtgcccatcatagccgtgtcggggatcgtcgagatgaagctgcttgcaggaaatgccaagagagataagaaggagctcgaggcagccggtaagattgccacggaggcaatcgaaaacataagaaccgtggtgtccctcacccaagaaagaaagttcgaatcgatgtatgtggagaagctgtacggcccatatcgtaactcagtgcaaaaggcccatatctacggaatcaccttcagcatctcacaggcatttatgtacttttcatacgctggttgctttcggtttggtgcatacctgatcgtgaatgggcatatgagatttagggacgtgattctggtgttttcagcaatcgtgtttggcgcagtggcattgggacacgcatccagctttgcccctgattacgccaaagcaaaactttcggcggcacatcttttcatgcttttcgaacggcagcctctcatcgattcgtattccgaagaggggctcaagcctgacaagtttgaaggaaacattacctttaacgaagtggtgtttaactacccaaccagagcgaatgtccctgtgctgcaaggcctgtcgctcgaagtgaagaagggacagactctggcacttgtgggatcctccgggtgtgggaagtcaacggtcgtgcagctcctggagcggttctacgacccacttgcaggaaccgtgtttgtggattttggctttcagctgcttgacggacaagaagcaaaaaagctgaacgtccaatggcttagagcccaacttggaattgtgagccaagaaccgatccttttcgactgttccattgcggagaatattgcatacggtgacaactcgagagttgtgtcacaagatgaaatagtgtccgcagcaaaggcagctaacattcacccctttatcgaaactcttccacataagtacgaaaccagggtgggagataagggcacccagctttccggcgggcaaaagcagaggattgcaatcgcacgggctctcatcaggcaaccacaaattctcctgctcgacgaagccacttcggctctggataccgagtcagagaaagtcgtgcaggaagctcttgacaaggcgcgagaaggcagaacttgtatagttatcgcacatagacttagcaccattcagaacgcagacctcattgtggtgttccaaaatggccgggttaaagagcacggaactcatcaacagctgctggcgcaaaagggaatctacttctcaatggtcagcgtgcaagcaggaactcaaaacctc

SEQ ID NO: 200189 - DNA, 3858 bp, Artificial Sequence
  derived and/or modified sequence
atggacttggaggccgccaagaatggcacagcttggcgaccaacttcagctgaaggcgactttgagctggggattagcagcaagcagaagagaaagaagactaaaacagtaaagatgatcggcgtactaaccctgtttcgatatagtgattggcaagacaagctttttatgtccctgggcactatcatggctatcgcgcatggatcaggccttccactgatgatgatcgtgttcggggagatgacagacaagttcgtggacacagctggcaatttctcctttcccgtgaatttctctctcagcttactcaatccaggtaagattctcgaggaagagatgacccgttatgcctactactactcaggtctgggggccggcgtacttgtcgcggcctacatccaggtgagcttctggactcttgctgctggacgacagatccgaaagatccgacagaagttctttcacgcaatcctgcgccaggaaatcgggtggtttgacatcaacgatacaaccgagctaaacaccaggctcacagatgatatctcgaaaatctcagaggggatcggggataaagtggggatgttctttcaagccgtggctacttttttcgcaggattcattgtaggtttcatacgtggttggaaactgacactagtcataatggctattagccccatcctcggactgagcgctgctgtttgggcaaaaattctttctgcttttagcgataaagagttggccgcttacgccaaggctggggccgtagcagaagaagccctgggggccataaggacagtgatagcatttggaggccagaacaaagaactagagcgataccagaaacacctagagaacgccaaggagattggcattaagaaagccattagcgccaatatctccatgggaatcgcttttctgctgatttacgcttcgtatgctttggcattctggtatgggagcacccttgtgatttctaaggaatacaccataggcaacgcgatgaccgtctttttctcaattctgattggcgcgttctctgtaggtcaggctgctccctgtatcgatgcatttgctaacgcaaggggggcagcttacgtgatttttgacataatcgacaataacccaaagattgactctttctctgaaaggggacataaacccgacagcatcaagggcaacctagaatttaacgacgttcacttctcgtatccatcaagagctaatgtaaagattctgaagggtctgaacctgaaggtgcaatcaggacagacagtagccctggttggcagtagcggctgtggaaaatctaccacagtgcagctgatccaacgtctctatgatccagatgagggcactataaacattgatggacaggatatccgaaatttcaacgttaactatcttcgagagattattggggtggtgtcccaggagccagtcctgttttctaccactatcgccgaaaatatctgctatggacgaggcaatgtgacgatggacgagataaaaaaggcggtgaaggaggcaaacgcctacgagttcatcatgaagctgcctcagaagtttgacactttagtgggcgaacgaggagctcagttgtccggggggcagaagcagaggatcgctattgcgcgagcactcgtccgaaatcccaaaatcctcctgctggatgaagcaacctccgccttggacaccgagtctgaggctgaagtgcaggctgctctagacaaggccagggaagggaggacaacgatagtcatcgcccaccgcctatctacagtacgaaatgccgatgtgattgctggctttgaagacggagtaattgttgagcagggctcccattccgagctgatgaagaaagaaggcgtctacttcaaactggtcaacatgcagactagtgggtctcagatccaatctgaagaatttgagctgaatgatgagaaagcagcgacaagaatggctcccaatggctggaagtccaggctctttcggcatagtacgcaaaaaaacttgaagaatagccagatgtgtcagaaatctctagacgttgagacggacgggctcgaggcgaatgtcccacctgtctccttcctgaaggtccttaaacttaacaaaacagaatggccctactttgtggtgggcacggtgtgcgcaatcgccaatgggggcctgcagccagccttttctgtaatcttctccgagatcattgccatcttcggaccgggggacgatgctgtgaaacaacaaaaatgcaatatcttctctctgatattcctgttcctgggcatcatctccttctttaccttttttcttcagggttttacgttcggaaaggcaggcgagatcctgacaaggcgactgaggagtatggccttcaaggcaatgctgcgccaggacatgagctggttcgacgaccataagaatagcaccggtgcactttccacacgcctcgcgactgacgctgctcaggtccagggagccaccggcactcgattggcactcattgcacaaaacattgcaaacttgggaacaggaattattatctcgtttatttatggctggcaacttacacttctccttctggcagtcgttccaataatagctgtcagcggaatcgtcgaaatgaaactcctcgcagggaacgcgaaaagagataagaaggaattggaagccgcgggaaaaatcgcgacagaagccattgaaaatatccgaaccgttgtttctctaacacaggagcgtaagtttgaatctatgtatgtggagaagctctacggcccataccgtaatagcgtacagaaggcgcatatctacggcataacgtttagtatctctcaggcattcatgtacttcagctacgctggatgcttcaggttcggagcctatctgatagttaatgggcatatgcgatttcgcgatgttatccttgttttctcggctatcgttttcggtgccgtagccttgggccacgcgagttccttcgctcctgattatgcaaaggctaaactttccgcggcccacctatttatgctgttcgaacgacagcctttaattgactcttacagcgaagaagggctcaaaccagacaaattcgagggtaacatcacatttaatgaggtggttttcaactatccgacaagagcaaacgtgcctgtgctgcaggggcttagcctggaagttaaaaagggccagacacttgccttggttggttcctcggggtgcggaaagagcacagttgtccaactcttggagaggttttacgatccactggcaggaaccgtttttgtcgactttggctttcaactcctggatggccaggaagccaaaaaactgaatgtacagtggctgagagcgcagctcgggatcgtttcccaggaaccaattctcttcgactgctccattgcggagaacattgcctatggagataactcaagagtggtgagccaggatgaaatagtgtccgccgccaaggctgcaaatatacacccctttattgaaaccctcccacataagtatgagactagggtcggtgacaaaggcacccaacttagcggtggccagaagcaaaggatcgccatcgcacgggccctgatcaggcaacctcagatcctactactggatgaggctacaagcgctctggatactgaatctgagaaagtggtccaggaagctctggacaaagcccgtgagggcagaacatgtatcgtgatcgcccaccgcctctccactatccagaatgccgatttgattgtcgtttttcagaatggcagggtgaaggaacacgggacccatcagcagctgttagctcaaaagggcatctatttttccatggtcagtgtacaagcagggactcagaatctg

SEQ ID NO: 200190 - DNA, 3858 bp, Artificial Sequence
  derived and/or modified sequence
atggacctggaagccgctaagaatggtactgcatggcggcccacctctgctgagggcgacttcgagctgggaattagctcaaaacaaaaacggaagaagaccaaaacagtcaagatgattggggtcttaacactgttcaggtatagtgattggcaggacaaattatttatgtctctgggcaccattatggcaatagcccatggatcagggctacccttaatgatgattgtctttggcgaaatgacagataaattcgtggatacagctggcaactttagctttcctgtgaactttagcctgagtcttctgaatcctggcaaaatcctggaagaagaaatgacaagatatgcctactattattctgggctgggcgccggtgtgttagtggccgcctacatacaggtgtcattctggactctggcagccggcagacaaattcggaaaatcaggcagaagttcttccatgcaatactaagacaggagatagggtggttcgatattaatgatacaactgagctgaatacccggctgactgacgatatatccaaaatttccgaggggatcggggacaaagtggggatgtttttccaggctgtggcaactttctttgctggcttcatagttggctttatacgcggctggaaactgaccctggtgatcatggccatatcaccaattctgggcctatccgcagctgtgtgggccaaaattctgagcgccttcagcgataaagagctggccgcttatgccaaggcaggagcagttgctgaggaagctctgggggctattcggaccgttatcgcatttggtggccaaaacaaagagttagagcgttatcagaagcacctggagaatgccaaagaaataggaatcaagaaagctatcagcgccaacataagtatgggcatcgctttccttctaatatacgcttcttacgctctggccttctggtacggcagcacactagtcatatccaaggaatacactatcggcaatgctatgaccgtttttttcagcatactgattggcgcattctctgtcggccaggccgcaccatgtattgatgctttcgcaaatgcacggggcgcagcctacgtgatttttgatattattgataataatcccaagatcgattccttttcagagaggggccacaagcctgattccatcaagggcaacctggagttcaacgatgtgcacttttcctaccccagcagagccaatgttaaaatcctgaaaggcctcaatctcaaagtgcagtcaggccagacagtcgccctggtgggcagttcaggctgcggaaaaagcactactgttcagctgatacaaagactgtacgatccagacgaagggactataaacatcgatggccaggacattcgcaatttcaatgttaattacttaagagaaataattggggtcgtgagccaggagcccgttctgtttagtaccactatagcagagaacatctgctatggaagaggaaatgtcacaatggacgagatcaaaaaagccgtgaaagaggcaaacgcatacgagttcataatgaaactgccccagaagtttgacaccttagtgggcgaaagaggggcccagctgtctgggggccagaagcagcgcatagccatagcccgcgcactggtgagaaatcctaagatattactcctggacgaagccacctcagctctggacactgaaagtgaagccgaagtccaggccgcactggataaagcacgtgaaggaagaactaccatcgtgattgctcatcgcctgtctaccgtgagaaatgcagatgtgatcgcaggcttcgaagacggtgttattgttgagcaggggtcccattccgagctcatgaagaaggagggcgtctactttaagctggtgaatatgcagaccagtggaagccagatccagtcagaggagttcgagctgaacgacgagaaagcagctactagaatggctcccaacggttggaaaagcaggctgtttcgacactcaacccagaagaaccttaagaacagtcagatgtgtcagaagagtctggacgtggaaaccgacgggctggaagccaacgtaccacccgtttcttttctgaaggttcttaagttaaacaaaaccgagtggccttactttgtcgtgggcacagtgtgtgccatcgctaatgggggtttgcagccagccttcagcgtcatttttagtgaaataattgccatttttggtcccggcgacgatgcagttaagcagcaaaagtgtaatatcttcagcctaattttcctgttcctggggataataagctttttcacatttttcctgcaagggtttacctttggaaaggccggggagattttaactaggcggttacgctcaatggcctttaaggccatgttgaggcaggacatgtcttggttcgacgaccacaaaaattccaccggggccctaagcacacggcttgcaacagatgcagcacaggtgcagggcgccaccgggaccagactcgcccttattgcccagaacattgcaaacctcggaaccggaatcataatatccttcatatatggatggcaacttactttattacttctagccgttgtccctattatcgccgtttccggcattgtggaaatgaaacttctggcaggaaatgctaagcgcgataagaaagagttagaggccgccggcaaaatcgccaccgaggccatcgagaatataaggactgtggtgtccctgactcaggagagaaagtttgagagcatgtatgttgaaaaattgtatggcccctacaggaattctgtgcagaaggctcacatctatggaattacattctccatctctcaggctttcatgtatttcagctacgctgggtgctttaggttcggagcctacctgatcgttaacgggcacatgagattccgagacgttatactggtgttctcagctattgtgttcggtgctgtggcacttggacacgcttcatcattcgcccctgactacgccaaggctaagctcagcgccgcacatctgttcatgctgttcgagaggcagcccctgatagacagctattctgaggaaggtcttaaaccagacaagttcgagggcaatattaccttcaacgaggtggtttttaactatcctactcgcgctaatgtgccagttttacagggtctatctctggaagtgaaaaagggccagaccttagctcttgtcggtagctcaggatgcggcaagtccaccgttgtccaactgctggaaaggttttacgacccactggcagggacagtgtttgtggattttggatttcagctgctcgatggacaagaggccaaaaagttaaacgtacagtggctgcgcgctcagctcggcatagtgtctcaggaacccatcctgttcgattgttccatcgcagagaacattgcctatggggataactcaagggttgtctcacaggacgagattgtttcagccgctaaggctgccaatattcacccttttatcgaaacattacctcataagtacgagactcgggttggtgacaaagggactcagctgagcggcggccagaagcagcgcatcgccatcgctagggccctaataaggcagccacagatcttactgctggacgaggccactagtgcccttgacactgaatcagagaaagtggtgcaggaggccctagacaaagctcgggagggccgtacctgcatagtcatcgcccatcgtctctctactatccagaatgccgatctcatcgtggtgtttcagaatggcagggtgaaagaacacggcacccaccagcagctgctagcccagaagggcatctacttctctatggtgtccgtgcaggctggaacccaaaacctg

SEQ ID NO: 200191 - DNA, 3858 bp, Artificial Sequence
  derived and/or modified sequence
atggatttggaagctgccaagaacggaactgcttggcgccccacctcggcagagggagacttcgaacttgggatctccagcaagcaaaagcggaaaaagaccaaaactgtgaaaatgatcggcgtgctgaccctcttccgatactccgattggcaggacaaactgttcatgtccttgggaactatcatggcaattgcgcacggctccggactgcccctcatgatgatcgtgttcggggagatgaccgacaagtttgtggacactgctggaaacttcagcttcccggttaacttcagcctgagcttgctgaatccgggaaagatcctggaggaagagatgaccagatacgcgtactactattccggactcggagcaggtgtcctcgtcgcggcgtatatccaggtatctttctggactctggctgcgggacggcagatccgcaagatccgtcagaagttctttcacgcaatcctccgccaagagataggctggttcgacatcaacgacacgactgagctcaacaccaggttgaccgatgacataagcaaaatctcagaaggaatcggtgacaaggtgggaatgttttttcaagcggtggcgacctttttcgcagggttcattgtcggttttatccggggatggaaactcactctggtgataatggccatttcaccaatcctgggactgtcggcagcggtgtgggcgaaaatcctttcggctttctcagacaaggaactggcggcatatgccaaggcgggggcggtggctgaagaagcactcggggcaatcagaactgtgatcgcctttggaggccaaaacaaggagctggagaggtaccagaagcacttggagaacgccaaggaaatcggtattaagaaagctatcagcgccaatatctcaatggggattgcgttcctgttgatctacgcatcatacgccctcgctttctggtacggatcaaccctcgtcatctcgaaagaatacaccatcggaaatgccatgaccgtgttcttctcaatcctgattggagccttctcagtcggacaagccgctccgtgcattgacgccttcgctaacgcccggggtgcggcatacgtgatcttcgatatcatcgacaataacccgaaaatcgactccttcagcgagcgcggccataagccggattccatcaaaggcaatctcgaattcaatgatgtccacttctcgtacccgagccgcgccaacgtcaagatcctgaagggactgaacctgaaggttcaatcaggccaaactgtcgctctcgttggcagttcgggatgcgggaagtcaactactgtccagttgattcagcgactgtacgaccctgacgaggggacgatcaatatcgatggacaagatatccgaaatttcaatgtgaactacctccgcgagatcattggagtggtgtcccaggagccggtgctcttctctactactatcgcagaaaacatctgttacggtcgaggtaacgtcactatggatgagataaagaaggccgtgaaagaagccaacgcgtacgaattcattatgaagttgccacagaagttcgacactctggtgggagagcgaggggcgcagctcagcggaggccagaagcagagaatcgctatagcgcgggcactcgtgaggaatccgaaaatccttctcctggacgaagcaacctcggcactggataccgaatctgaagccgaggtgcaagcagccttggacaaggctcgcgagggtagaacgaccattgttatcgcacatcgcttgtccactgtgcggaacgcagacgtcatcgccggcttcgaagatggagtgattgtggaacagggatcccattcggaactgatgaagaaggagggagtttacttcaaactggtgaatatgcagaccagcggcagccagatccagtcagaggaattcgagctgaacgatgaaaaggcggcaacccgcatggccccgaatgggtggaagtcacgccttttccggcactccacccagaagaacctcaagaattcccaaatgtgtcagaagtcgttggacgtcgaaactgacggtcttgaggccaacgtgcctccagtgtcgttcctgaaggtgcttaaacttaacaagaccgaatggccctacttcgtagtgggaaccgtctgcgcgatcgctaacggcggactgcagccagcgttctccgtcatcttctctgaaatcatcgccatcttcggaccgggagatgatgcggtgaagcagcagaagtgtaacatcttcagcctcatctttcttttcctgggaatcatctcgtttttcaccttcttcctgcaaggctttacttttggtaaagcaggcgaaatcctgacgaggcgcctgcggtctatggctttcaaggctatgctgcgtcaagatatgagttggttcgacgaccacaagaactcgacgggagcgctttcgaccagacttgccaccgacgccgcgcaggtgcagggagcaactggaactcggttggcgctgatcgcacagaacatcgccaatctcggaaccgggatcatcatttcgtttatctacggatggcaactgaccctgttgctgcttgccgtggtgcctatcattgctgtttccggtatagtggagatgaaactgctggccgggaacgctaaacgcgacaagaaagagctggaagcagctggaaagatcgccactgaagcaatcgaaaacatcaggaccgtggtttccctcactcaagagcggaaattcgaatcgatgtacgtcgagaagctctacgggccataccgcaattccgtgcaaaaggcgcatatctacgggatcactttttcaatcagccaagcctttatgtacttcagctacgccggctgctttcgcttcggagcgtacctgattgtgaatggccatatgagatttcgcgatgtcattctcgtgttctcagcaattgtgttcggggctgtggctctgggacacgcatccagcttcgcccctgattacgcgaaagcgaaactcagcgcggcccacctgttcatgctgtttgagcggcagccactcatcgactcatactccgaagaaggactgaagccagacaaattcgaaggtaacattacgttcaatgaggtggtgtttaactatcccactagggctaacgtcccggtcctgcaaggtttgtcgctggaagtgaagaagggacagactctcgctctcgtggggtcgtcaggatgtggaaaatcgaccgtcgttcagcttttggaaagattctacgatcctctcgccggcactgtgttcgtggacttcggattccagctcctcgacggccaggaggcgaagaaactgaatgtacaatggctgcgcgctcagctcgggatagtgtcgcaagaaccgatcctctttgactgctctattgccgagaacatcgcctacggtgataacagtcgcgtcgtcagccaggatgaaatcgtgagcgcagcaaaggccgcaaatatccatccttttatcgaaacccttccacacaagtacgagacgagagtgggagataagggtactcagctctccggcggtcagaagcagcggatcgccatcgcccgggcgctgattagacaaccgcaaatcctgctgctggacgaagcgacctccgctcttgacactgaatcggagaaggtggtccaggaggcgctggacaaggccagggaagggagaacctgcatcgtgatcgcccaccggctgtccaccatccaaaatgccgatctcatcgtggtatttcaaaatggaagggtgaaggagcacgggacccatcagcaactgctggcgcagaagggcatctacttctcgatggtgagcgtccaggccggaacccaaaacctc

SEQ ID NO: 200192 - DNA, 3858 bp, Artificial Sequence
  derived and/or modified sequence
atggacctcgaagcggcgaagaacggcactgcttggaggcccacgtccgcggagggcgactttgagctcggcatctcctctaagcagaagagaaagaaaaccaagacagtaaagatgattggagtgctgactcttttcagatactctgactggcaagacaagctgttcatgtctcttggcactataatggccattgctcacggtagcggtctccccttgatgatgattgtcttcggtgagatgaccgacaaattcgtggataccgcaggtaacttttcttttcctgtaaacttcagcctgtccctgctgaacccgggtaagatactggaagaggaaatgacgaggtacgcttactactattccggtttgggcgccggagtcctggtcgctgcctacattcaagttagtttttggacgctggccgctggtaggcagatcagaaaaataaggcagaaattcttccatgcgatccttagacaagagatcggatggttcgatatcaatgacacaacagaactgaatactaggcttacagatgacatctctaagatatcagagggtatcggcgacaaggtgggcatgtttttccaggctgttgccactttcttcgctggtttcatagttggattcatcagaggttggaaattgacgttggtcataatggctatttcaccaatcctgggtctctcagcggcagtctgggccaaaatcctctctgctttctcagacaaggagttggccgcctatgctaaggcgggagcagtggcggaggaagctctcggtgctattcgcacagttatagcgttcggtggtcagaacaaagagctcgagaggtaccagaagcacctggagaacgcaaaggagatcggcattaagaaggcaatctctgccaacataagcatgggcatcgcattccttttgatctacgcgtcatatgccctggccttctggtatggttccacactggtgatatctaaggagtacaccattggcaacgccatgaccgtatttttcagcatccttatcggcgctttcagtgttggacaagcagctccctgcatagatgccttcgccaacgccaggggtgcggcctatgttatctttgacatcatcgataataatccgaagatagattcattcagcgaaagaggtcataagcccgactcaataaagggcaacctggaattcaatgacgttcatttctcctacccttccagggcgaacgttaagatcttgaagggattgaacctgaaagtgcaaagtggccaaaccgtcgctctggtaggctccagcggatgcggaaagtctacaactgtccagctcatccagagactctacgaccccgatgagggcactataaatatcgacggtcaggacatccgcaattttaacgtgaactatttgagagagatcatcggcgtcgtttcccaagagcctgtcttgtttagtaccacgatcgccgagaacatttgttatggccgcggtaacgtgaccatggatgagatcaaaaaggccgtgaaagaggcaaatgcttacgagtttatcatgaagctgccacagaaattcgataccctcgtgggcgaaaggggtgcccaactttccggtggacagaagcaacgcatcgctatagcaagggcgcttgtgaggaatcccaagatcctcctgctggatgaagctacatctgcactggacactgagagcgaggcggaggtacaggcggcgctggacaaggctagagagggcaggacaaccatagttatagcacacagactgagcaccgtccgcaacgctgacgttatcgcaggctttgaagacggcgttatcgtggagcagggtagtcatagcgaactgatgaagaaggagggagtatacttcaagctggttaacatgcaaacttcaggatctcagatccagtctgaggaatttgagctcaatgacgagaaggctgcgaccaggatggcaccaaacggctggaaaagcaggctgttcagacacagcacgcaaaagaacctcaaaaatagtcaaatgtgtcagaagtccttggacgtggagacggacggtcttgaggccaacgtgccccctgtcagcttcctgaaggtcctgaagctgaacaaaaccgaatggccttactttgtcgtgggtactgtatgcgcgattgcgaacggaggtttgcaaccagccttctctgtcattttctctgagatcatagctattttcggacctggagacgatgccgtcaagcagcagaaatgtaacattttctccctgatctttttgttccttggtatcatctcctttttcacatttttcctccagggattcaccttcggcaaggccggcgagatcctgacccgcaggttgaggtctatggcttttaaagccatgctccgccaggatatgtcctggttcgacgatcacaagaactctaccggcgctctgtctacccgcttggccactgacgcggctcaggttcagggtgctacaggtaccaggctggcgctgatagcccagaacatcgccaacctcggaaccggtattatcatttcattcatctacggatggcagctcactctcctgctgctggctgtagtgcccattatcgcagtgtctggtattgtcgaaatgaagctcctcgctggtaacgctaaacgcgataagaaggagttggaagccgccggtaagattgcaaccgaagccatcgagaacattagaacggtggttagcttgacccaggaacgcaagttcgaatctatgtatgttgagaagctttatggtccatacaggaatagcgttcagaaggcgcacatatatggaattactttctctatcagtcaggcattcatgtacttctcttacgcaggatgcttcagatttggagcctacctgattgtcaacggccatatgcgctttcgcgatgttatcttggtgttcagcgccatcgtgtttggagctgttgcgttgggccatgctagtagcttcgcgcctgactatgctaaggccaaactgagtgccgcacacctgtttatgctctttgaacgccagccactgatcgactcatactctgaagaaggtcttaagcccgacaagttcgaaggtaatattacattcaatgaggtcgtattcaactaccctactagagctaacgtacccgtactgcagggcctgtcactcgaggttaagaagggtcagacactggcgttggttggctcctctggctgcggcaagtccaccgtggttcaactgctggaaagattttacgaccccctggccggaacagtgttcgtggatttcggcttccaactgctcgatggacaagaggccaaaaagctgaatgtgcagtggctccgcgcccaactgggcatcgtatctcaggagcccatcctcttcgactgttctatagctgagaacatcgcatacggtgacaactccagggttgtaagccaggatgaaatcgtgtccgccgccaaagccgctaacatccatccatttatcgagactcttccgcataagtacgaaaccagagtgggagataagggtacacagctgtccggcggtcagaagcaacgcatcgctatcgctagagccctgatcagacaacctcagatccttcttcttgacgaggcaacttccgcgctggacaccgagagtgagaaagttgtgcaagaggcactggacaaggctcgcgaaggacgcacttgtatcgtaatcgcccatcgcttgagcactatccagaacgcagacctcatcgtggtgttccaaaatggaagggtaaaggagcacggcacccaccaacagctgctggcccagaagggcatttactttagcatggtctctgtccaggctggcacccagaacttg

SEQ ID NO: 200193 - DNA, 3858 bp, Artificial Sequence
  derived and/or modified sequence
atggatctggaagcagccaagaacggtacggcctggcgtcctacttcagcggaaggagacttcgagttgggaatttcatccaagcagaagagaaaaaagactaagaccgtgaaaatgattggagtcctgaccctgttcagatactccgattggcaagataagctgttcatgtcgctgggtaccattatggctatcgcacatggctcgggattgccacttatgatgattgtgtttggagagatgaccgacaagtttgttgataccgcaggcaacttctcgtttccagtgaacttcagcctgtcccttctgaatcccggtaagattctggaagaagagatgactcgctatgcatactactactcggggctgggagcaggcgtgctggttgcagcatacattcaagtgtccttttggacccttgctgcgggtcgacaaataagaaagatcagacaaaagttttttcatgcaatccttaggcaagaaattggatggtttgacattaacgacaccactgagcttaatactagactgaccgacgacatcagcaagatttcagagggtataggagacaaggttggtatgttttttcaagctgtggccacgtttttcgccgggtttatcgtggggtttatacgaggatggaagctcaccctggtcatcatggcaatcagccctatactcggcttgagcgcagcggtgtgggccaagatcctcagcgcctttagcgacaaggaattggctgcatatgcaaaggcaggagctgtcgctgaggaagcccttggggcaattagaacggtcattgcatttggaggccaaaacaaggagctggagcgctaccaaaaacatcttgaaaacgcaaaggagattggaattaagaaggctatctcggcgaacatatcgatgggcattgcttttctgctgatttacgcctcgtacgcacttgcgttttggtacggatcgactctcgtgatttccaaggagtacactattggtaacgcaatgaccgtgttctttagcatccttatcggagcgttctcagtcggtcaagccgcaccatgtattgacgcttttgcaaacgcccggggcgcagcatacgtgatctttgatatcatagataacaacccaaagattgactcattcagcgagcgcggtcataaacctgattctataaagggaaacctcgagtttaatgacgtgcattttagctacccaagccgagccaacgtcaagattcttaaggggctcaatctcaaggtccaatccggacagactgtcgccctcgtgggaagctcaggttgtggaaaatcaactaccgtccagcttattcaacgcctttacgacccagatgaagggaccatcaacatagatggtcaagatatccggaactttaatgtgaattatctgagggagattattggagttgtgtcacaggaaccagtcctgtttagcacgaccatcgcagagaacatctgctacggacgtggcaacgtgactatggatgagattaagaaagccgtgaaggaagcgaacgcatacgagttcatcatgaagctgcctcaaaagttcgatacccttgtgggggagcgaggcgcacaactgtcgggaggccaaaagcaaaggattgcaatcgcaagagccctggtgagaaaccctaagattctccttctggacgaagcaacttccgccctcgatactgaatcagaagcggaagttcaagccgcgctggacaaggcacgcgagggaagaaccaccattgtgatcgcacatagactgtccacggtgaggaacgcagatgtcatcgcgggctttgaggatggcgttattgtcgaacaagggagccactcagaactgatgaagaaggaaggcgtgtactttaagctcgtcaatatgcagacctcgggttcgcaaattcaatcggaagaatttgaacttaacgatgagaaggcggcaacgcgcatggccccaaacgggtggaaatccagactgtttaggcattcgactcagaagaatctgaagaattcacagatgtgtcagaagagcctggatgtggagactgatgggcttgaagctaacgtgcctcccgtgtcatttcttaaggtgctgaaacttaacaagaccgaatggccttacttcgtggtgggaaccgtgtgcgccatagcaaatggaggactccaacccgctttttcggtcattttcagcgaaatcatagcaattttcggacccggagatgacgcagtgaaacagcagaagtgtaacatcttttcgctcatttttctgtttctcggaatcatttcgtttttcacgttctttctgcaaggtttcactttcggcaaagcgggggagatcttgactcggagacttaggagcatggccttcaaggcaatgctgagacaagatatgtcctggttcgacgatcataagaactcgactggggcactttcaacccggcttgcaactgatgcagcccaggtgcaaggagctactggaacccgacttgcactgatagcgcagaatatcgcaaacctcggaactggtatcattatctcgttcatctacggatggcaactcactctgctgctcctggccgtggtgcccattatagccgtgagcggcattgtcgagatgaaactgctggcaggcaatgcaaagcgtgacaagaaggagttggaggctgcaggaaaaatcgccaccgaagcaatcgaaaacattcgcactgtggtgtcgctcacccaggaacgcaagttcgaaagcatgtacgtggagaaactgtacggtccatacaggaatagcgtgcagaaggctcacatttacggtataacgttttccatttcccaagcatttatgtatttctcttacgccggatgcttcaggttcggcgcataccttattgtcaatggacacatgcgttttcgggatgtgattctcgtgtttagcgctattgtctttggcgccgtcgcactgggacacgcctcatcgtttgcacctgattacgcaaaagcaaaactctccgcagcccatctgttcatgctgttcgaaagacaaccccttatcgactcgtactccgaagaaggactcaagccggataagttcgaagggaacattacctttaacgaagttgtgttcaactacccaaccagagcaaatgtgcctgtgctgcaaggtctttcgctcgaggtgaaaaaaggtcaaaccctggcacttgtcggctcctccggctgtggtaaatccaccgtcgtgcaactccttgagcgcttctacgaccccctcgcgggtaccgtgtttgtggacttcggatttcaactgctggatggacaggaggctaagaagctgaacgtgcaatggctgcgggcccagctcggtattgtgagccaggagcctatcttgtttgattgttccattgcagaaaacattgcttacggagacaactcccgtgtggtcagccaagatgaaattgtgtccgcagcaaaggctgccaacattcacccttttatcgaaacccttccacataagtacgagactagagtcggtgataaaggaacccaactctcggggggacagaaacaacggattgccatagcacgggcactcattcgtcaacctcaaattcttctgctcgacgaagcgacttcggcgcttgacacggaatccgaaaaggtcgtccaagaagctctggataaggcgagagaaggaaggacgtgtattgtgatagcccataggcttagcacgatccaaaacgccgatcttatcgttgtgtttcagaacggacgcgttaaggaacatggaactcatcaacagctgcttgcacagaagggtatttactttagcatggtgtccgtgcaagccggtactcagaacctt

SEQ ID NO: 200194 - DNA, 3858 bp, Artificial Sequence
  derived and/or modified sequence
atggacttggaagctgctaagaacggcaccgcctggcgcccgacctctgcagagggcgattttgaattgggaatctcatccaaacagaaaagaaagaaaaccaagactgtaaaaatgataggcgtgctgacactgttcaggtactcagactggcaggacaagctctttatgagcctgggaaccatcatggctatcgcacatggatcaggacttccactcatgatgattgtattcggtgagatgactgacaagttcgtggatactgccggcaattttagttttcccgtcaacttctccctgtcattattgaaccctggaaagatcctggaagaggaaatgactcgttatgcctattactatagtgggcttggcgcgggcgtgctcgtggcagcatacatacaggtgtccttctggacgctagccgcgggaagacagatcaggaaaatacgtcagaagttcttccacgccatcctccgccaggagataggatggttcgatattaatgacacaaccgagctgaatacacgtctgaccgacgacatttctaaaatctctgaagggattggggacaaggtggggatgttttttcaggccgtggccaccttcttcgccgggtttatagtgggctttatccgagggtggaagctaacactggtgattatggctatttccccaattctggggttgagtgcggcagtctgggcgaagatactcagtgccttttctgacaaggaactcgctgcatatgcgaaggcgggtgcagtcgcggaggaagcacttggcgcaatccggaccgtcatcgcttttggcggtcagaataaggagcttgagcgatatcaaaaacacctagaaaatgcaaaggagatcgggataaagaaggccatcagcgccaatattagcatggggatagcctttttgttgatttacgcttcgtacgctctcgcgttttggtatggttctaccctcgtcatctcaaaagagtacacaattggcaacgcgatgactgtcttcttttcgattctgataggcgcttttagtgttgggcaggccgctccctgtattgatgcattcgccaatgcacggggcgccgcttacgtcatattcgacatcattgacaataacccaaagatcgattcatttagcgaacggggccacaagcccgacagcataaagggcaatctagagttcaatgatgtccacttttcttatccgtcccgtgcaaacgtgaagatactgaaggggttgaaccttaaagtgcagtccggtcagactgtagcacttgtgggatcttctggatgtggcaagtccacaactgtccagctgatccaacggctttatgaccccgatgaaggtacaatcaacatcgatggtcaggatattagaaactttaacgttaactatctcagagaaattatcggagttgtctcccaggagccagtcctttttagtacaacaatcgcagagaacatttgctatggcagaggcaacgttaccatggatgagatcaagaaagctgtgaaagaggccaacgcctacgagtttattatgaagcttccacaaaagttcgatacattagtcggtgagcggggggcacagctctcaggcggacaaaagcagcgcatagccatcgctagggctctggtgcggaatccaaaaatattgctattagacgaggctacttcagctcttgacacagaaagcgaggccgaagtgcaggccgctctggacaaagctagagaggggcgtactaccattgtgatcgcgcacagactgtccacggtgcgcaacgcggacgttattgccggctttgaagatggagtcatcgtcgagcaaggaagtcattccgagctgatgaaaaaggagggcgtttattttaagcttgtgaacatgcagacatcagggagccagatccaaagcgaggaattcgaattgaacgatgagaaggcagctacacgcatggcacccaacggttggaagagtcgcctcttccggcatagcacacagaagaatctgaagaactctcagatgtgtcaaaagtcattagacgtcgaaacagatgggttggaggctaatgtcccccccgtgtcgttcttaaaggtcctgaagctgaacaagactgagtggccctacttcgtcgtaggaactgtctgcgccatcgccaacggtggcttacagcccgcattttccgtcatcttttcagagatcatagccattttcggcccgggagatgatgccgtgaaacagcagaaatgtaacatcttttcactcatcttcctcttcctcggcatcatctccttcttcacattcttcctgcagggcttcacctttgggaaggcaggtgagatcctgacacggcggctcagatccatggcgtttaaggctatgctgcgtcaggatatgagctggttcgacgaccacaaaaattcaacgggcgcactgagtactagactggcaaccgacgctgcacaggtgcagggcgcaaccgggaccagactggctttgatcgcccagaacatcgccaacctgggtacagggattatcatttccttcatctacggctggcagttaactctgctgttgctggctgtggtgcctatcatcgcggtctcaggtatagttgagatgaagttgttggcaggtaatgctaagcgagacaaaaaggaactggaggccgcgggcaagattgccaccgaagccatagagaacatacgcaccgtggtgtcactgactcaggagagaaaattcgagtcaatgtatgtcgagaagttgtacggaccataccggaacagcgtccagaaggcgcatatctacggcattaccttttccattagtcaggccttcatgtacttctcgtacgcggggtgttttagattcggggcctacctcattgtgaacggtcatatgcgcttccgggacgtgatcctggttttttctgctatcgtgttcggagccgtggctttgggtcatgcgtcctccttcgcgcctgattatgcaaaagcaaaactgtccgccgcccacttgttcatgctgtttgagaggcaaccgctgattgatagctacagtgaagaaggtctgaagcccgataagtttgaaggaaatattaccttcaacgaggtggtgtttaattatcccacccgcgcaaatgtgcctgttctgcaaggcctgagcctcgaggttaagaagggccaaactctagctctggtggggagttcagggtgtggcaaatctaccgtggttcaactgctggaacgcttctatgaccccctggcaggaacggtttttgtcgactttgggtttcaactcctggatggccaggaagctaaaaaactcaatgtgcagtggctaagagctcagctaggaattgtcagccaggaaccaattcttttcgactgctctattgccgagaatatagcttatggggacaatagccgcgtggtctcgcaggacgagatagtgtctgccgctaaggctgcaaacatccatcccttcattgaaacactacctcacaaatatgaaactagggttggagacaaaggcactcagttgtctggcggacagaaacagaggatcgcgatcgctagagccctaatccgacagccccagatcctgctactggatgaggccaccagcgcactggacaccgagagtgaaaaagtcgtccaggaggccctggacaaagcgagagaaggacgaacttgtattgttatcgcccataggctctccacaattcagaatgccgacctcattgtagtcttccagaacgggcgagtgaaggagcacgggactcaccagcagctgctggctcagaaaggtatttacttttcgatggtttccgtgcaggccggcacccagaacctc

SEQ ID NO: 200195 - DNA, 3858 bp, Artificial Sequence
  derived and/or modified sequence
atggacctcgaagctgctaaaaacggaacagcgtggcgacccacctccgcagaaggcgactttgagctgggtataagtagcaagcaaaagcggaagaagacaaaaactgttaaaatgattggcgtcctgaccctattcagatacagtgactggcaggacaagctcttcatgtcactcgggacgataatggctattgctcacggatccggtctgccgttgatgatgatcgtgttcggggaaatgaccgataagtttgtcgacacggctggaaatttctccttccccgtcaacttttcactgagcctgctcaatccgggaaaaattcttgaagaagaaatgacacgatacgcctattattattccggtttgggcgccggcgtactagtcgcagcctacatccaagtaagcttctggacactggccgctgggcgacagatccgcaaaatccgtcagaaattcttccatgctatcctgagacaagaaatcggttggttcgatattaacgacactaccgaactcaacaccagactgacagacgacattagcaagatttccgagggcattggcgataaagtcggaatgttctttcaggcggtagcaaccttctttgcggggttcatcgtcggcttcattcgcggatggaaactcactctggtgattatggcgatttctcctattttaggactgtcagccgccgtatgggctaagatcctgtcagcgtttagtgacaaggaactggccgcatacgccaaagctggagccgtcgccgaagaagccttgggtgcaatcagaaccgtaattgcgtttggtggacagaacaaggaactcgagagataccaaaagcatctggagaacgcgaaagaaataggtattaaaaaagcgataagcgctaacatctctatgggtatcgcctttttgttgatctatgcttcctacgcacttgccttttggtacggatctacattggttatcagcaaagagtacaccatcggtaatgccatgacagtgttcttttcgatcctgattggagcgttttccgttggacaggccgccccatgtatcgacgcctttgcaaacgcgagaggtgccgcttatgtgattttcgacattatcgacaacaaccctaagattgattcgttctcagagagaggtcacaagccagactctatcaaaggtaacctggagttcaacgacgtacattttagctatccaagccgggccaacgtcaaaatactgaaaggcctcaacctgaaagtacagtcaggacaaacagtagccctcgtggggtcatcggggtgtgggaagagcaccaccgtgcaactgattcaaagattgtatgacccagatgaaggcacgatcaatattgatggacaagatatcaggaacttcaacgtaaactacttgagagagataatcggcgtggtgtctcaagaaccagtgctctttagcacaacaattgcagaaaacatatgttacggcagggggaatgttaccatggacgaaattaagaaagcggtcaaggaagctaacgcctacgaatttatcatgaaactgccccaaaagtttgacaccttggtgggagaaaggggagcgcagctaagcggtggccagaagcagcgcatcgcaattgccagagctctggtccgaaatcccaaaattttgctattggatgaagctacctcagccctcgacacagagtctgaggccgaggtgcaagctgcattagataaggccagagaaggacgcaccactattgttattgcgcaccgcttaagtacagtgcgaaacgcagacgtgattgcaggcttcgaagatggagttatcgtggagcagggcagccatagcgagctaatgaagaaggagggggtgtacttcaagttggtgaatatgcaaactagcggctcacagatccagtctgaggagttcgaactcaacgacgagaaagccgcgacccgtatggctccaaacggatggaaaagccgcctgttccgacattctacacagaagaacctgaagaattctcaaatgtgtcaaaaatctctggatgtcgagaccgacggactagaggcaaacgttccaccggtgagtttcctgaaagtgctgaaactaaacaagacggaatggccttattttgtggtgggcacagtttgtgcgattgcaaacggaggtctgcagccggccttttctgtgattttctctgaaattattgccatcttcggcccgggtgacgacgctgtgaagcagcaaaagtgcaacatcttcagcctcattttcctgtttctagggattatctcttttttcactttttttcttcaaggctttactttcgggaaggcaggagaaattctgactcgccgcctccgttccatggctttcaaagctatgttgagacaggatatgagctggtttgatgaccacaagaattccaccggcgccctgagcacgcgtctcgccaccgatgcagcccaagtacagggggccacagggactaggctggcgctgattgcccagaacattgcgaatctcgggaccggtatcataatttcattcatatacggctggcaactgacactcctactgttggcagtggtgcctattatcgctgttagcgggatcgtcgaaatgaaacttctggctggcaatgccaagagggacaaaaaagaactcgaggccgcggggaagattgcaactgaggccatcgaaaacatccgcacagtggtttccctaacacaggagaggaagtttgagagtatgtatgttgaaaaactctatggaccctataggaactctgtccagaaagcccacatatacggtatcacgttctcgatctcacaggcttttatgtatttctcatatgcaggttgtttcagattcggagcatatctaatagtcaacgggcatatgaggttccgagatgtgatcttggtgttctcagccattgtctttggtgcagtggcattgggacacgccagttcctttgcaccagactacgccaaagctaagctctccgcggcgcacctctttatgctgtttgaaagacagccacttatcgatagctacagcgaagagggcttgaagcccgataaatttgagggaaatattactttcaacgaagtggtgttcaactaccctacacgcgccaacgttcccgtcctccagggactgagcctcgaggtaaagaagggacagaccctggccctcgtagggagcagcggttgcggaaaatcaacggtggtccagttgcttgaaaggttctacgatccgctggcaggtacagttttcgtagactttggcttccagctgctcgacggtcaagaggccaagaaacttaatgttcagtggctgcgcgcccagctggggatagtgtcccaagagcctatcctattcgattgcagcatcgcagaaaatatcgcctatggagataactcacgtgtcgtgagtcaagacgagatcgtttccgctgcgaaagcggcaaacattcatccatttatagaaaccctgcctcacaagtatgaaacgagagtgggggataagggcacacagcttagcggcggccaaaaacagcggattgcaattgctagggccttgataaggcagccgcagatcttgctcctagacgaagccacaagtgccctagataccgaaagcgaaaaggtggtccaagaagccctggataaggccagagaaggcaggacctgtatcgtcatcgcacatcgtctgagtacgattcagaacgctgacctcattgtggtattccagaacggaagggtgaaggagcacggcacgcaccagcaactgctggctcagaagggcatttacttttccatggtcagtgtccaagcgggaacgcagaacctg

SEQ ID NO: 200196 - DNA, 3858 bp, Artificial Sequence
  derived and/or modified sequence
atggacctcgaggccgctaagaacggcaccgcctggcgtccgactagcgctgagggtgatttcgagcttggcatttctagcaaacagaagcgtaagaagaccaagactgtcaagatgattggtgtgctgaccctgttccgctacagcgattggcaggacaagcttttcatgtcgctcggcaccatcatggccatcgcgcatggctccgggttgcccctgatgatgattgtgttcggcgagatgaccgataagtttgtcgatactgccggtaacttctctttcccggtcaacttttctttaagtttgctcaatccaggcaagattctggaggaggagatgacccgctatgcttactactactccggtttgggtgcgggcgtactcgtcgccgcctacatacaagtgtctttctggaccttagcggccggtcggcagatcaggaagatccgccagaagttcttccacgccatactgcgccaggaaatcgggtggttcgacatcaacgatacgactgagctgaacacacggctgactgacgacatttccaagatctcggagggcattggtgataaggtcggcatgttcttccaggccgttgcgacgttctttgccggtttcattgtcggtttcattcgtggctggaagctcacgctggtcatcatggcgattagccccattctgggtctctcggcagccgtctgggccaagattttgtctgccttctcggacaaggagctcgccgcgtacgctaaggccggtgccgtcgctgaggaggcgctgggtgcgatccgcaccgttatcgcgttcggtggtcagaacaaggagctcgagcgctaccaaaagcatctcgagaatgcgaaggagatcggtatcaaaaaggccattagtgcaaacatctcaatggggatcgcgttcttgttgatctatgcctcctatgcgctcgctttctggtacggtagcactcttgtcatttccaaggaatacaccatcggtaacgcaatgactgtgttcttttcgatcctcatcggtgccttcagtgttggacaggcagctccctgcattgatgctttcgccaacgcccgcggcgctgcttacgttatcttcgatatcatcgacaataacccgaagattgattcctttagcgagcgtggccacaagcccgactccattaaggggaacttggaatttaacgatgttcatttctcgtaccctagccgcgctaacgtaaagatccttaaaggtcttaacttgaaggtgcaatccggtcagaccgtcgctttagtgggctcctctggctgcggtaaatctacgacggtgcagctcattcaacgtctttacgaccccgatgaggggactatcaacattgacggtcaggacattcgaaacttcaacgttaactacctccgtgagataattggggtcgtgtcgcaggagcctgttttgtttagtaccactatcgctgagaacatctgctacggtcgcggcaacgtcaccatggacgagatcaaaaaggctgtcaaggaggccaacgcttatgagtttatcatgaagctaccccaaaagttcgacactctcgtgggcgaacgaggggcccagttgtctggaggccagaagcaacgtatcgccatcgctcgtgcactcgtcagaaaccccaagatcctcttactggacgaggcgacttcggccttggatactgaatctgaggctgaggttcaagccgcgctggataaggcccgtgagggacggactaccatcgtgatcgcgcaccggctctcgacggtccggaacgctgacgtgattgctggcttcgaggacggagtcattgtagagcagggtagtcactccgagcttatgaagaaggagggtgtatactttaagcttgtgaacatgcaaacatcgggctcccagatccaatccgaagagttcgagcttaacgacgaaaaggctgctacccgcatggcacccaatggctggaagtcgcgcctgttccgccattccacgcagaagaacctgaagaatagccagatgtgtcagaaatccctggatgtggaaacagacggcttggaggccaacgtaccccctgtcagcttcctgaaggtcctgaaattaaataagaccgaatggccctatttcgtcgtgggtaccgtttgcgccatcgctaatggtggcttgcagcccgctttctcggtcatcttctctgagattatcgctatctttggacctggtgacgacgcggtgaagcaacagaaatgcaacatcttcagtctgattttcctctttctaggcattatctcgttcttcaccttcttccttcagggttttaccttcggaaaggcgggcgaaatcctcactcgcaggttgcgttcgatggcttttaaggcaatgctccgccaggacatgtcgtggttcgatgaccacaagaacagcactggcgctctttccacccgccttgccactgacgctgcccaggtccagggggccaccggcaccagactggccctcatcgcccagaatattgcaaacctcggcaccggaatcatcatctcattcatctatggttggcagctcaccctactcctcttggccgtcgtgcccattattgcggtgtccggaatcgtagagatgaagctgctcgctggtaatgctaagcgcgataagaaggaattggaggccgcgggcaagattgcgaccgaggctatcgagaacatccgcacagtcgtcagtctgacccaggagcgaaagttcgagtctatgtacgttgagaagttatacggaccgtaccgcaactcagtccagaaggctcatatttacggcatcaccttctccatttctcaggcctttatgtatttttcctacgcgggctgcttccgctttggcgcctatctcattgtcaacggccatatgcgatttcgcgatgttattctggtcttctccgcgattgtttttggggccgtggccctgggccacgcgtcctcttttgctccggattacgcgaaggccaagctttcggccgcccaccttttcatgctcttcgagcgtcagcctctcatcgattcctattcggaggagggattaaagccggacaagtttgagggcaacatcacattcaacgaggtcgtgttcaactacccaaccagggccaacgtccctgtcttgcagggcctttcgctcgaggtcaagaagggccaaacactcgccttggtcggttcttcgggatgcgggaaatccactgtcgttcagttgctcgagcgcttctacgaccccttggccggaaccgtgtttgtcgacttcggcttccaactgttggacggccaggaggccaagaagctaaatgtgcagtggctccgggcccagctcgggattgtttcccaggaaccgattctgttcgactgctcaatcgcggagaatatcgcctacggcgataactccagggtcgtttcccaggatgagatcgtgtctgccgccaaggctgctaacattcatccatttatcgagaccctgcctcacaagtacgagacccgggtcggtgataagggcacccagctgtctggtggccagaagcagcgtatcgccatcgcgcgcgctctcatccggcagccgcagatccttctcctggacgaggctacctcggccctagacaccgagagcgagaaagttgtccaggaggcactcgacaaggctcgtgagggccggacgtgcatcgtcattgcccaccggctctcaacaattcagaacgcggatctcatcgtggtgtttcagaacggacgcgttaaggaacacggaacgcaccagcagctattggcacaaaagggcatttacttctctatggtctccgttcaggccggtactcagaacctc

SEQ ID NO: 200197 - DNA, 3858 bp, Artificial Sequence
  derived and/or modified sequence
atggatcttgaagcagcaaagaatgggaccgcatggcgtcctacctcggcagaaggagactttgaactggggatttcctccaagcagaaaagaaaaaagactaaaactgtgaaaatgattggtgtcctgacccttttccgctactcggattggcaagacaagttgttcatgtcccttggaaccattatggctatcgctcacggatctggactgccactcatgatgattgtctttggagaaatgaccgacaagttcgtcgacaccgcaggcaactttagcttcccagtgaacttttcattgtcactgcttaaccctggcaagattctggaagaagagatgacgaggtacgcgtactactactccgggcttggagcaggggtcctcgtggcagcatacattcaagtctcattttggaccctggcagcaggacgacagatccggaagattaggcagaagttttttcatgcaatccttcgacaagaaatcggatggtttgatatcaatgacaccactgagcttaatacccggctgacggatgatatatccaagatatccgaaggcatcggagataaggtgggaatgttctttcaggcagttgcgactttctttgcaggattcatagtgggattcattagaggatggaagctcaccctcgtgatcatggcgatttcgcctatcctcggtctttcggccgccgtgtgggcaaaaatcctgtccgcatttagcgacaaggaactcgccgcatacgcaaaggctggggccgtcgcagaagaagcactgggcgcaatccgaaccgtcatcgcatttggtggtcaaaacaaggagcttgagcgctaccagaaacacctggaaaatgctaaggagattggcattaagaaggcaatttcggcaaatatctcaatgggtatcgcatttctgctcatttacgcatcgtacgcacttgcattttggtacggttcgactcttgtgatctcgaaggagtacactattggaaacgccatgactgtgtttttctccatactgattggggcattctctgtgggtcaggcggctccttgcattgacgcctttgccaacgcaagaggtgccgcgtatgtgatttttgatatcatagacaacaacccaaagattgattcgttttccgaacgggggcataagcctgactcgatcaagggcaatctcgagttcaatgacgtccatttctcgtacccttcacgtgccaacgtcaagattcttaagggtcttaaccttaaggtgcaaagcgggcaaacggtggcactcgtcggctcgtcaggctgcggtaagtcgaccactgtccaactgatacaacgcctctacgatccagatgaaggaactatcaacattgatggacaggatattcggaactttaacgtgaactacctgcgggagatcattggagtggtgtcgcaggaacctgtgctgttcagcactactattgcagaaaacatctgctatggacgaggaaacgttaccatggatgagattaagaaggccgtgaaagaagcaaacgcgtacgagtttatcatgaagctcccacaaaagttcgacactttggtgggagaacgtggtgcacaactgtccggcgggcagaagcagcggattgcaattgcgcgcgcacttgtgcgtaacccaaagatactgctgctcgatgaagcgacctcggcccttgatactgagtcggaagccgaagtgcaagcagcccttgacaaagccagggagggccgaactaccattgtcattgcccatcgcctttccactgtgcgtaatgccgatgtgattgccggtttcgaggacggtgttattgtagaacaaggaagccactcggagttgatgaagaaggagggcgtgtactttaaactcgtcaacatgcaaacctcgggatcccaaattcaatctgaagaattcgagctcaacgatgagaaagccgcaaccaggatggctcccaatggatggaagagcaggctcttcagacactcgacccaaaagaacttgaaaaactcgcaaatgtgtcaaaagtcccttgacgtcgaaaccgatggtcttgaggcaaacgtcccacctgtctcctttctcaaagtgctgaagctcaacaaaaccgaatggccctacttcgtggtgggtactgtctgcgcaatcgcaaacggtggacttcaaccagcattttcagtcattttcagcgagataattgcaatctttgggcctggagacgatgccgtcaaacagcaaaagtgtaacattttctcccttatctttcttttcctcggcataatcagctttttcacgttctttcttcaagggttcacctttggtaaggccggggaaattctgactaggcgtctccgaagcatggcttttaaggcaatgttgcgccaggatatgtcttggtttgatgatcacaaaaacagcaccggtgccctttccaccagattggcaactgatgcagcacaggtgcagggagcaaccggtactcggcttgcactgatcgcacagaatatagccaacctgggaactgggatcattatctcgttcatttacgggtggcagcttaccctcctgctcttggcagtggtccctattatcgccgtgtcgggaattgtcgagatgaagctgcttgccgggaacgcaaaacgggataagaaggagcttgaagcggctggcaagattgcgacggaggctattgagaacatccgaaccgtggtgagcctcacccaggaaagaaagtttgaaagcatgtacgtggaaaagctctatggaccataccgcaactcggtgcagaaagcacacatctacggaatcaccttttcaatttcacaggcattcatgtacttctcgtacgccgggtgttttcgattcggcgcatatctcatcgtgaatggtcatatgcgtttcagggatgtgattcttgtgttctcggcaatcgtgtttggagctgtggctctgggccatgcctccagcttcgcacctgactacgcaaaagcaaaactctcggctgctcatttgttcatgcttttcgaaagacaaccacttatcgactcatactccgaagaagggctcaaacctgataagtttgagggtaacataaccttcaacgaagtcgtgttcaactaccctacccgagccaatgtgcctgtgcttcagggtctgtcgctggaagtgaaaaagggacagacgctggctcttgtgggttcctcggggtgtggtaagtcaaccgtggtgcagctgctcgagaggttttacgatcctctggcaggtaccgtgtttgttgatttcggttttcagctgctcgatggacaagaagcgaagaagctgaatgtgcaatggctgagagcgcaactgggcatcgtatcacaagagcctattctttttgattgttccatagctgaaaacatcgcctacggggataattcccgcgtcgtgtcacaggatgagattgtgtccgcagcaaaagcggcaaacatccatccattcatagagactctgcctcataagtatgaaacccgggtcggagacaaagggactcaattgtcgggaggccagaaacaaaggatagcaattgcaagggcccttatcagacagccccaaattctcttgcttgatgaggcaacctcagccctggataccgaatccgaaaaggtggtgcaggaagcgctggataaagcgagggagggaagaacgtgtatagtcattgcacataggctgtccactatacagaacgcagacctgatagtggtgtttcaaaacgggcgggtgaaagagcatggaactcatcaacaactgctggcacaaaagggaatttacttctcgatggtgtcagtgcaggcagggactcaaaatctg

SEQ ID NO: 200198 - DNA, 3858 bp, Artificial Sequence
  derived and/or modified sequence
atggatctggaagcagcaaagaatggcaccgcctggaggccaacgagcgcagaaggcgatttcgagctgggaatctcctcaaaacaaaaacgcaaaaagacgaaaacggtcaagatgatcggagtcttgaccctgttcagatattctgattggcaggataaactcttcatgtccctggggaccatcatggccatcgcgcacggaagcggcctgcctctgatgatgattgtctttggtgaaatgaccgataagttcgtcgacactgccggtaacttttcgttcccagtcaacttttcgctgtccctgctgaatccgggtaaaatcctggaagaggagatgacccgctacgcctattactactcaggactgggggccggagtgctggtggctgcgtacattcaggtgtcattctggactttggcagccggacgccaaatccggaaaatcagacagaagtttttccacgccatcctccggcaggaaatcggctggtttgacattaatgacactactgaactgaatactcgcctgactgatgatatctcaaaaatctccgaaggaattggagacaaggtcggcatgttcttccaagctgtggcaaccttcttcgcaggattcatagtgggcttcatcagggggtggaagctgactctggtgatcatggcgatctcacccatcctgggcctctcggccgcggtctgggcgaagatactgtcggccttctccgataaggaactcgcggcctacgcaaaggctggggccgtcgctgaagaggctctgggcgccatcaggactgtcatcgccttcggcggccagaacaaggaacttgagaggtaccagaagcatctggagaatgcaaaggaaattggaatcaagaaggcaatttccgccaatatctcgatgggaatcgccttcctcttgatctacgcctcgtacgcgctggcattctggtacggttcaacgctcgtcatctcgaaggagtatactattgggaatgcaatgactgtgttcttctccatcctcatcggagcttttagcgtgggtcaagccgctccctgtattgacgcctttgcgaatgcccgcggggcggcttacgtgatctttgatatcatcgacaacaatccaaagatcgacagcttttcagaaaggggtcataagcccgactccatcaagggaaacctcgaattcaacgatgtgcatttctcctatccttcaagagccaacgtcaagatcctgaagggactgaatctcaaggtccagtcaggacaaactgtggctcttgtcggatcctcaggctgcggaaagtccactaccgtccagctcatccagaggctgtatgaccctgatgaaggcactattaacatcgatggtcaggacatccgcaacttcaacgtgaactacctcagagaaatcatcggggttgtgtcacaggagccggtgttgttctctactaccatcgcggagaatatctgctacggacggggcaatgtcaccatggatgaaatcaaaaaagcggtgaaggaagcgaatgcctacgagtttatcatgaagctgccgcagaagttcgacactctggtgggggaaagaggcgcacagctgtccggtggacagaaacagagaatcgctatcgctcgcgccctggtcagaaaccccaagattctcctgctggatgaggccactagcgccctcgacaccgagagcgaagcggaggtccaggccgctctcgacaaggcccgcgaaggaagaaccaccatcgtgatcgcccatagactgagcactgtgcggaacgcagacgtcatcgcagggttcgaagatggagtgatcgtggaacagggttcgcactccgagctcatgaagaaggaaggggtgtacttcaagctcgtgaacatgcaaacctccggctctcaaattcaatcggaggaatttgaattgaacgatgaaaaagcggctactagaatggcccctaacggttggaagagcaggctgtttcgccactcgacccagaaaaacctcaagaattcgcagatgtgccaaaaatcgctggatgtggagacggacggactggaggcaaatgtgccaccggtcagctttctgaaggtgctcaagctgaataagaccgaatggccgtactttgtggtgggcaccgtgtgcgccattgccaatggaggactccagccagcgttctcagtcatctttagcgagatcatcgcgatcttcggccccggagacgacgccgtgaagcaacagaagtgcaacatcttctcgctcatcttcctcttcctcggaatcatttcattcttcaccttctttttgcagggctttaccttcggcaaggccggagaaatcctcactcgccgcctccgcagcatggcgtttaaggcgatgttgaggcaggatatgtcgtggttcgatgatcataagaattccaccggtgctctgtccaccagattggctaccgatgcagcccaggtccagggggccactgggacccggcttgccctgattgcgcagaatatcgcgaatctgggcacgggaatcataatctctttcatctacggctggcaactgaccctccttctgctggcagtggtgcctattatcgcggtgtccggaattgtcgaaatgaaactgctggcaggtaacgcaaagcgcgacaaaaaggagctggaagccgcgggtaagatcgcaactgaggccatcgagaacatccggacggtggtcagcctgactcaagaaagaaagttcgaatccatgtacgtcgaaaagctgtacgggccgtacaggaattcagtccaaaaggcgcacatctacggaattaccttctcgatctcgcaagcattcatgtacttctcgtatgcaggatgcttcaggttcggagcatacctgatcgtgaacggccacatgcggtttcgcgatgtgatcctcgtctttagcgcgatcgtgttcggcgcagtcgctctgggacacgcctcgtcgttcgcccccgactacgctaaagcaaagctgtcagcggcgcacctgttcatgctgttcgagcgccagcctctgattgactcctactccgaagaggggctgaagcctgataagttcgagggcaacatcacgttcaatgaagtggttttcaactacccgactcgggcaaatgtaccggtgctgcaaggattgtcccttgaagtgaagaagggacagaccttggctctggtgggatcgtccggttgtggaaagtcaactgttgtgcagctgctggagagattttacgaccctctcgcagggaccgtgttcgtggacttcggattccaattgctcgacggacaagaagccaagaaactgaacgtgcagtggctgcgcgcacagctcggcatcgtgtcccaagaaccgatcctgtttgactgttccatcgcggaaaacatcgcctacggagacaactccagagtggtatcgcaggatgaaatcgtgtcggcggcaaaggctgccaacatccaccccttcattgagactttgccacacaaatacgaaactcgggtgggagacaagggaactcagctgtcggggggacaaaaacagcggatcgccatcgcgcgcgcgctgatccgccagccgcagatcctgctcctggacgaggctacctcggccctggacactgagtctgaaaaagtcgtgcaagaagccttggacaaggccagagaaggaagaacgtgcatcgtcattgcacatagactctcgaccatccagaacgccgaccttatcgtggtctttcagaacgggcgcgtcaaggaacatggaactcatcagcagctccttgcacagaagggaatttacttctccatggtcagcgtgcaggcaggaacccagaatctg

SEQ ID NO: 200199 - DNA, 3858 bp, Artificial Sequence
  derived and/or modified sequence
atggatctggaggccgccaagaatggcactgcctggcgcccgacgtctgcggaaggcgatttcgaactgggcatctcctccaagcagaagcggaagaaaacgaaaaccgtgaagatgattggcgtgctgactctgttccggtactctgactggcaagacaagttgttcatgtcactgggaaccatcatggctatcgctcatggttcgggcctcccattgatgatgatagtgttcggagaaatgacggacaagttcgtcgataccgccggaaacttcagcttcccagtcaatttctcactgtccctgctgaaccccggaaagattctcgaagaggaaatgactaggtacgcatactactactcgggcctgggagcgggcgtccttgtcgccgcctatatccaagtctcgttctggacgctggcagccggacgccaaattcgcaagattagacagaagttcttccatgccatcctgaggcaggagatcggctggttcgatatcaatgacactaccgagctcaacacgcgcctgactgacgacatctccaagatctcggagggaatcggagacaaggttggaatgttcttccaggcagtggctaccttctttgcaggtttcatcgttgggtttatccgcggatggaagctgaccctcgtcatcatggccatcagcccaatactggggctgtcagccgccgtgtgggccaagattctctccgcgttctccgataaggaattggcggcttacgcaaaggccggggcagtcgccgaagaagcgctgggagccatccggaccgttattgcttttggaggacagaacaaggagcttgaacgctatcagaagcacctcgagaatgccaaggaaatcggtatcaaaaaggcgatctccgcgaatatctcgatgggcatcgcattcctgctcatctacgcctcgtacgccctcgccttctggtacggctccacgctggtcatcagcaaggaatataccattgggaacgcgatgactgtgtttttctcaatcctgatcggagcgttttcagtgggacaggcggcaccttgcatcgacgcgttcgccaacgcccgaggagcagcctacgtcatctttgacatcatcgacaataacccaaaaatcgattcattctccgaaagaggacacaagcctgacagcatcaagggaaacctcgagttcaatgacgtgcacttctcataccctagccgggccaacgtgaagatcctgaagggtcttaacctcaaggtccaatcgggacagacggtcgcgctggtgggcagctcggggtgcggaaagtccactaccgtccagctgatccagcggctctacgacccggacgagggaactatcaacatcgatggacaggacatccggaatttcaatgtgaactacctccgcgaaatcatcggggtcgtgtcgcaagaaccggtgctgttctcgactaccatcgccgagaatatctgctacggaaggggaaatgtgacgatggacgaaatcaagaaagcagtgaaggaagcaaacgcgtacgaattcatcatgaagctgccacagaaatttgataccctcgttggggagcggggagcgcagctgagcgggggacaaaagcagcggattgccatcgcaagggccctcgtgcgcaaccctaagatccttctgctcgatgaagccacgtccgcactggatacggagtccgaggcggaagtccaggccgctctggacaaggcgcgggaggggcgcaccaccatcgtcattgcccatagattgagcactgtgaggaacgcagacgtgattgcaggattcgaagatggagtgatcgtggagcagggctcgcatagcgagctgatgaaaaaggaaggcgtgtacttcaagctcgtcaacatgcagacctccggaagccaaatccagtccgaagagtttgaactgaacgacgaaaaggctgcgactaggatggcgcctaatggttggaaatcccgcctgttccgccactcaacccagaagaatctcaaaaactcgcagatgtgccagaagtccctggatgtcgaaactgacggactcgaggcgaacgtcccgcctgtatcatttttgaaggtgctgaaactgaataagactgagtggccgtacttcgtcgtgggaaccgtgtgcgctatcgccaacggagggctgcagccagcatttagcgtgatcttttccgagatcatcgccattttcggaccgggtgatgacgctgtcaagcaacagaagtgcaacatcttctccctgatctttctgttccttggcatcatcagcttcttcacgttcttcctccagggattcaccttcggcaaagccggcgaaatcctgacccgcagactccgctcgatggcgttcaaagctatgttgcgccaggacatgtcgtggttcgatgaccacaagaattcaacgggtgctctgtcgaccaggctggcaactgacgctgcccaggtccaaggagccaccggcacccggttggccctcatcgcccagaatatcgcgaacctcggaaccggaattatcatttcattcatttacggatggcaactcactcttctccttctggcagtagtgccgatcatcgcggtgtccggtatcgtcgagatgaaacttctggccggaaacgctaagcgggacaagaaagagctggaagcagccggcaagatcgctaccgaagccatcgaaaacatccggactgtggtgtccttgacccaagagcgcaagttcgagtccatgtacgtggaaaagttgtacggcccataccggaattcggtgcaaaaggctcatatctacggcatcactttctccatctcacaggcttttatgtacttcagctacgctggatgcttcagattcggagcatacctgatcgtcaatggccacatgagattccgcgacgtcatcctggtgttcagcgcgatcgtttttggagccgtggccctgggccacgcatcctcgttcgcaccagattacgccaaggcaaaactctccgcagcccatctgttcatgctctttgagcggcagccccttatcgattcgtactccgaagaaggactcaagcctgacaaatttgagggaaatatcacttttaacgaagtggtgttcaattatcccacccgggccaatgtgccggtgctgcagggccttagcctcgaggtcaaaaagggccagaccttggccctggtgggaagctcaggctgtggcaagtcgaccgtggtgcaattgctggaacggttctacgaccctctggcgggaactgtatttgtggattttggattccagctgctggacggacaagaagccaagaaactgaatgtgcagtggttgcgcgcacaactgggcatcgtgtcccaagagccaatcctgttcgactgcagcattgcggaaaacattgcctacggggacaattcccgggtggtgtcgcaggatgagatcgtctccgccgccaaggcggccaatatccatcctttcatcgagactctcccgcacaaatatgagactagagtcggcgataaagggactcaattgagcggtggccagaaacagcgtatcgcgattgcaagagcactgatcagacagcctcagattttgctcctggatgaggcaaccagcgccctggataccgaatccgagaaggtggtgcaggaggcgctcgataaagcgcgcgagggaagaacttgcatcgtgattgcacaccggctgtccactatccagaatgcagatctcatcgtcgtgttccagaacgggcgcgtgaaagaacacggcacccaccagcaactgctggcccaaaagggaatctacttctccatggtgtcagtgcaagcaggtactcagaatttg

SEQ ID NO: 200200 - DNA, 3858 bp, Artificial Sequence
  derived and/or modified sequence
atggacctggaggccgcgaagaatggcacagcctggcgaccaacctcggcggagggagacttcgagctgggcatttcgtccaagcaaaagcgcaagaaaactaaaacagttaagatgattggcgtcctgacgctgttccgatacagcgactggcaagataagttgtttatgagcttaggaacaattatggccattgcacatggttccggcctcccgttgatgatgatcgtatttggcgagatgactgataagtttgtcgacaccgctggaaatttttctttccccgtaaactttagcctaagcctgctgaacccaggtaaaatcttggaggaagagatgacacgttacgcgtattattattcgggactcggtgcgggagtcctagttgccgcctacattcaggttagtttctggaccttggccgcaggacggcaaatcagaaaaatcagacagaaatttttccacgccatcctgagacaggagatcggctggttcgacatcaacgatactactgagctcaataccagactgaccgacgatatctcgaagatctcagagggcattggcgataaggtgggtatgttctttcaggctgtggccacgttcttcgcaggcttcatagtcggattcatccgtggttggaagctgaccctggtaattatggcgatctcccctatactgggattgagcgccgccgtgtgggccaagatcctctcggctttttccgataaagagttagcagcgtatgccaaagccggggccgttgcggaagaggccctgggcgccattcgcaccgttattgcatttggtggccaaaataaggagctggagcgttaccagaagcacctggagaacgcaaaagagatcgggattaagaaggcaataagtgccaatattagcatgggtatagccttcctgctcatctacgcgtcttatgcgctggctttctggtatggaagcacattggtgatttcgaaagaatacaccatcggcaatgccatgacagtattcttctctattctgataggcgcattttcggtgggtcaggccgccccctgtattgacgccttcgcgaacgcgcgtggcgccgcgtatgttatttttgacatcatcgacaataacccaaaaatagactccttcagtgaaagaggacataagcccgatagtatcaaaggcaatctagaattcaatgatgttcatttctcctacccatcccgggccaacgtcaagatcctgaagggcttgaacctgaaggtccaatccggccagaccgttgctctggttggatcttccggttgtggtaagtcaacaacagtgcaactcatacagcggctgtatgacccggatgaaggcaccatcaacattgacggacaagatatacgaaattttaacgtgaactacctaagggagatcattggcgtcgtgagccaggagcccgttctgttcagcacgaccattgccgagaacatatgctacggacgcggtaacgtgacaatggatgagatcaagaaagcggttaaggaggcaaacgcctacgagtttatcatgaaactgccgcaaaagttcgatacgctggtaggcgagcgcggcgcacagttgtcaggcggccagaaacagaggatcgccatagcccgtgctttagtcagaaatccgaaaatattactgttagacgaagccaccagtgctctggatacggagtcggaagccgaggtacaggcggcccttgataaagcccgcgaaggtaggaccacaatcgtgattgcgcatcggctgagcactgtgcgcaacgccgatgtcattgcaggatttgaggacggcgtcattgtcgagcagggtagtcactcggaattgatgaagaaggagggagtgtacttcaaactcgtgaatatgcaaacgagcggctcgcagatacaatcggaagagtttgaactcaacgatgaaaaggctgccacgcgaatggccccgaacggatggaagtcccgcctgtttaggcactccactcagaaaaatctgaagaactcgcagatgtgccaaaagtcgttggacgttgaaaccgacggactggaggcaaacgtccccccggttagtttccttaaggtcctaaagctcaataaaaccgaatggccatacttcgtggtcggcacagtgtgtgccatagcaaacggcgggcttcagcccgcttttagcgtgattttctccgaaatcattgctatatttggtcccggagatgacgcagtgaagcagcagaagtgtaacatattttcgttaattttcctgtttctgggtatcatcagtttcttcacgttcttcctccaaggctttacttttggtaaagccggtgagatcttgacacgccgcctgcgttccatggctttcaaagcaatgctcagacaggatatgagctggttcgatgaccacaaaaatagcactggcgcactgagtacgcgcctggccaccgatgcagcccaagtgcagggcgccacggggacccgactggctttgattgcccagaacatcgcaaacctgggtaccggtattatcatttccttcatttacgggtggcagcttacgctgctgcttctagccgtcgttccgataatcgcagtcagcggcattgttgaaatgaaattgttagcgggcaacgcgaagcgagacaagaaggagctggaggcagctggaaagattgccaccgaggccatcgagaacattcgtacggtggtcagcctaactcaggagcgaaagttcgaatcgatgtacgtggagaagctatatggcccttatcggaactcggtgcaaaaggcacatatatatggcatcactttcagcatcagccaggcgttcatgtacttcagctacgccggctgcttcagattcggcgcctacctgatcgtgaatggacacatgaggttccgtgacgtgatactggtgttttcagcgatagtgtttggagcggtggctctgggtcatgccagctcattcgcccccgattatgctaaggcaaagctcagcgctgcacacctgtttatgctgttcgaaaggcagccactgatcgactcgtactcggaggagggactcaaaccagataagtttgagggcaatataacatttaacgaagtggtgttcaattaccccacgagggcaaatgtgcctgtattgcagggcttgagtctggaggtcaaaaaggggcagacgctcgcccttgtaggatcaagtggatgcggtaaatcaactgtggtgcagctattggagcgcttttatgatccgttggcaggaacggttttcgtcgactttggctttcagttgctggatggccaggaggcaaagaaactgaatgtccagtggctgcgcgcgcagctgggaatagtatcccaggagcccatcttgttcgattgttccattgccgagaatatcgcatacggtgacaattcccgcgtggtgtcacaggacgagatagtgtccgccgcgaaggctgctaatatccacccgtttatcgaaacactcccccataagtacgaaactcgggttggggataagggcacgcagttaagtggcggccagaagcagaggatcgccatcgcacgggcgctgattcgtcaaccccagatactacttctggatgaggccaccagcgcactggatacagaatcagagaaggtggttcaggaggctctcgacaaggcccgcgaggggcgcacctgcatcgttatcgcccaccgcctgagtacaattcaaaacgctgacctaattgtggtcttccagaacggacgtgtgaaggagcatggcacacaccagcaactgctagcacagaaaggaatctattttagtatggtttcggtccaggctggaacccagaatctg

SEQ ID NO: 200201 - DNA, 3858 bp, Artificial Sequence
  derived and/or modified sequence
atggacctggaggcagccaagaatggcactgcctggcgccctactagcgctgaaggtgacttcgaactgggaatctcatctaagcagaagagaaagaagacaaaaactgttaaaatgatcggcgtcttgacgctgttccggtacagtgattggcaggataagttgtttatgagcctcgggactattatggcaattgcacacggttcggggcttcctctcatgatgatcgtgtttggcgagatgacagataaatttgttgacactgccggcaacttctcgttccccgtcaatttcagcctgtctctgttgaatccagggaaaatccttgaggaggagatgacccgatacgcttattactattccggactaggagccggtgtgctggtagctgcttatattcaggtctctttctggacccttgccgccgggaggcagatccgcaagatccgtcaaaaattttttcacgccattctgagacaggaaataggatggttcgatataaatgacaccactgagctaaatactcgactgaccgacgacattagtaaaatatcagaaggcattggagacaaagttggcatgttttttcaagctgtggctacattctttgccggattcattgttggcttcatacggggctggaagttgacacttgtcatcatggctatcagtcctattctcggactgagcgctgctgtctgggccaagatattatccgcgttctcagataaggaattagccgcctacgccaaggcaggggccgtggctgaggaagcgttgggtgccatccgcacagtgatcgctttcggcggccagaacaaagagctggaaagataccaaaaacatttagagaatgccaaagagatcgggattaaaaaagctatttccgccaatatcagtatgggtattgccttcctccttatctacgcctcctacgcccttgctttctggtacggtagcacgcttgtgatctcgaaagagtataccatcggcaatgcaatgacagtctttttcagcatactgatcggggcttttagcgtagggcaagccgccccatgcatcgacgcgttcgccaatgcgagaggtgcagcgtacgtgatcttcgatatcatcgacaataacccaaagatcgattccttttcagaaagggggcacaaacctgattccataaaaggcaacctggagttcaatgacgttcattttagttatcctagtcgcgcaaacgtaaaaatcttaaagggacttaacctcaaggttcaaagcggccagacagtggctctcgtgggttcttcgggctgcggcaaatctactaccgtgcaacttattcagagactatatgatccagacgaaggtacaatcaacatcgacgggcaagatataaggaactttaacgtgaactacctgagggagataatcggagtggtgtctcaggaacccgtgctcttttcgaccactattgccgaaaatatttgctacggccggggaaatgtgacgatggatgagattaagaaggctgtgaaggaggcaaacgcatatgagtttatcatgaagttaccacagaaattcgacacactggtcggcgagcggggcgctcagctctccgggggacagaaacagagaatcgccattgcgcgcgccctggtcaggaatccaaaaatcttgctacttgacgaggctactagcgcgttggataccgagagtgaggccgaggtccaggctgctctggataaagcccgagagggccgcacaactattgtgatagctcaccgtctctccacagtcaggaacgctgacgtaatagcggggttcgaagatggcgtgatcgtggagcagggaagccactctgagcttatgaaaaaagaaggggtgtactttaaactagtaaatatgcaaacctcagggtcacaaatccagtccgaggaattcgagctcaacgacgagaaagctgcaacccgaatggcgccaaacggatggaaatcccgcctgttccgacactccacccagaagaaccttaagaatagtcaaatgtgtcagaaatcattggacgtcgaaaccgacgggttagaagctaacgttcctcccgtcagtttcctgaaagtgctcaagctgaacaagactgagtggccctattttgtagttggaactgtgtgtgctatcgctaatggaggactgcagccagcattctctgtcattttcagtgagattatcgcaatcttcggccccggagacgatgcagttaaacagcagaagtgtaacatcttttcactaatttttctatttttgggaattatctcctttttcacattcttcctgcagggctttacattcggcaaggccggcgagatattgacccgcaggcttagaagcatggctttcaaagctatgttaaggcaagatatgagctggttcgatgaccacaagaactccaccggagccctttctacgcggctggcaaccgatgctgcccaggtgcagggggcaactgggacgagactggctctaatcgcacagaatatcgctaatttgggcacgggcatcattataagttttatttatggttggcagctgacacttcttttgctggcagttgtacccattattgcagttagcggaatcgtggagatgaagctgctcgcgggcaatgcaaagagagataaaaaagagctcgaagcagctggtaagatcgccactgaagccatcgagaacatccggactgtggtgtcgctcacacaggagcgcaagttcgagagtatgtacgtcgagaaattgtatggcccctacaggaactctgtgcaaaaggcccacatctacggaattacattcagtatatcccaggctttcatgtatttttcctatgcgggctgcttcaggttcggggcttacctgatagtgaatggccacatgcgctttagggacgtgatcctggtctttagcgctatcgtgttcggagccgtggcgcttggccatgcctcctcctttgcccctgattacgccaaagccaagctgtccgctgctcaccttttcatgctttttgagcgccagccgttgattgacagttactcagaggaaggcctgaaacccgacaagttcgaaggaaacattacattcaacgaggtggtatttaattacccaacccgtgccaacgtgcccgtcctacagggcctctccctagaggttaaaaagggacagaccctagcactggttggatcaagtgggtgtggtaagagtacggtggttcagcttctggagcgtttctatgatccactggcgggtactgtcttcgttgactttggattccagctcctcgacggtcaagaggccaaaaaactgaatgtccaatggctccgggcccagctcgggattgttagtcaagaacctatcctattcgattgtagcattgctgaaaacatcgcctacggtgacaattctagggtcgttagccaggacgaaatcgtttcagcagccaaggctgccaatatccatccctttatagagacgctcccacacaagtacgagaccagagtcggtgacaaagggacacagctctccggaggccagaaacaacgcattgccattgccagggcactgattcgacagccacagatcctcctgctcgacgaggccacaagcgctctggatacagaatctgagaaagttgtccaggaggccttggacaaggctagggaggggaggacgtgcattgtaatcgctcaccggctctcgacaatccagaatgctgatctgatcgtcgtctttcaaaatggcagagttaaagaacacgggacacaccaacagctcctagcccagaaaggtatctatttctcaatggtgagcgtgcaggccgggacacagaattta

SEQ ID NO: 200202 - DNA, 3858 bp, Artificial Sequence
  derived and/or modified sequence
atggacctggaagccgctaaaaatggcaccgcatggcggccaacctctgccgaaggagatttcgagttggggatctcttcaaaacagaagagaaagaaaaccaaaacagtgaagatgataggggtgctgacattgtttagatatagcgattggcaggataagctcttcatgtctctgggcaccatcatggccatcgcacacggctcaggtctccctttgatgatgattgtgttcggggagatgactgacaagttcgttgataccgcaggcaatttctccttcccggtgaatttttcactgagtctcctcaaccccggaaaaatcctcgaggaggagatgacaaggtacgcgtattattatagtggactgggcgcaggtgtcctggtggccgcatacatacaggtgagtttctggaccttagccgctggacggcagatcaggaagataagacagaagttcttccatgcaatattacggcaggaaataggctggttcgacatcaacgacaccacagaactcaatacgcgactgacggatgatatctcaaagatcagcgaaggcattggagacaaggtcggtatgttcttccaagccgtcgccaccttcttcgccgggtttatcgtgggttttataaggggctggaaactgacgctggtgatcatggccatttcaccgatcttgggtctgagcgcggcagtgtgggcgaagattctgtcagcattctccgataaagagttggctgcgtacgccaaggccggagctgtggccgaagaggcccttggcgctatcagaactgtgatagcgtttggcgggcagaacaaggaattagaacgctatcagaagcatctggagaacgctaaagagattgggataaaaaaagccatctcagccaacatctccatggggatcgctttcctcttgatttatgcctcttacgccctcgccttttggtatggcagtaccttggtcatttccaaggagtataccatcggcaacgctatgacggtattttttagtatcctgatcggtgccttttccgtgggccaggcagcgccttgcatagatgccttcgctaacgcacgtggagctgcttatgtcattttcgacattatcgacaacaaccccaaaatcgatagcttttcagagcggggacataagccggattccattaagggcaatctcgagttcaacgatgtacactttagctatccttctcgtgctaatgtgaagattcttaagggcctgaatctgaaagttcagagtggccagaccgtggccctagtgggctcgtcaggatgcgggaagtccaccaccgttcagcttattcagaggctatacgacccggatgagggtacaattaatatcgatggtcaggacatcaggaacttcaatgttaactatctgcgagagattatcggcgtcgtctctcaggaacctgtgctgttcagcaccaccatcgcagaaaatatttgctacggacgagggaacgtgactatggacgaaatcaagaaggcggtgaaggaggccaacgcttatgagtttatcatgaagctccctcagaaatttgatacactggttggtgagcggggggcacagcttagtggaggccagaaacagcgcattgctattgcgcgggctctagtgcggaaccccaaaatccttcttctggacgaggctaccagtgccctagacacagagagtgaggccgaggtgcaagcagcactagataaggctagagagggcagaactactatcgtgattgctcataggctctccactgtgaggaatgctgacgtaatagctggatttgaggacggagtgatcgtggagcaagggtctcactcagaactgatgaagaaggagggagtgtattttaagctggtgaacatgcagacctcaggatcacagatccaatcagaggaatttgagctaaatgacgagaaagccgcaactaggatggcccccaacggctggaagtccagactctttaggcactctactcagaagaacctgaagaatagccagatgtgtcagaaatcccttgacgtagagaccgatgggctggaagccaatgtcccccctgtatcatttctaaaagtgcttaagttgaacaagactgagtggccctacttcgtggttgggacagtgtgcgcaattgcaaacggagggcttcagcccgccttttcagtgattttctctgagatcatcgccatctttggccccggggatgacgctgtaaagcagcagaagtgtaacatcttctcactcatttttctctttctaggcattatctctttcttcaccttctttctgcagggatttacctttggaaaagcaggggaaatattgacaaggcggctgcgatccatggctttcaaagctatgctgcggcaagacatgtcatggttcgatgatcataagaatagcaccggcgctctatcaacacggctggccactgatgcggcacaagttcagggtgcaactggtacccgactggctctgattgcacagaatatcgcgaacttgggcaccggtattattatctccttcatttacggctggcaactgacattattactcctggctgtcgtgccaatcatcgcagtgagcgggatcgtggagatgaagctgctcgctgggaacgccaagcgggataaaaaggagctagaggccgccggcaagattgccacagaggcaatcgaaaacattaggactgtggtttctctcacacaggagagaaagtttgaatccatgtacgttgagaagctgtatgggccataccggaactctgtgcagaaagctcatatttacggaatcacgttttcaatttcccaagcgtttatgtacttcagttacgcaggctgctttcgctttggagcctatctcatcgtaaacggacacatgcgcttccgggacgtgatcctggtgttcagtgcgatcgtgttcggtgccgtggccttaggtcacgcatcttcttttgcgcccgattatgccaaggctaagctctctgctgctcacctcttcatgctcttcgaaaggcagcctctgatcgatagctattccgaggagggccttaagcccgacaaatttgaggggaacatcacttttaatgaggtggtgttcaattatcccaccagggccaacgtgcctgtcctgcaggggcttagccttgaagtcaagaaaggacagacccttgctctggtcggtagctcagggtgcggtaaatccacagtggtgcagctcctggagcgtttctatgaccccttggctggtactgtgtttgtggattttggatttcagctactggatggccaggaggccaaaaagctcaacgttcagtggctgcgcgcgcaactggggatcgtgtctcaggaacctattctttttgattgctcaattgctgaaaatattgcgtacggcgacaactcacgtgtagtctcacaggatgagatcgtcagtgccgctaaagcagccaatattcacccctttatcgagacactcccgcataagtatgaaacgcgggttggcgataagggtacccagctgtccggcggtcaaaagcagcgcatcgccatagcccgggctttaatccgacagccacagattctgctgcttgacgaggcaacctctgcactcgacaccgagagcgagaaagttgtccaggaagcacttgacaaagctagggagggcagaacttgtatcgtgatcgcgcataggctcagcactattcagaacgctgacctgattgtagtgtttcaaaacggaagggtgaaagagcacggtactcatcagcagctgctggcgcaaaaggggatatatttctctatggtctcagtgcaagccggcacacagaatctc

SEQ ID NO: 200203 - DNA, 3858 bp, Artificial Sequence
  derived and/or modified sequence
atggacttagaggccgctaaaaatgggactgcgtggcgtcctacctccgcagaaggagattttgagttaggtattagctctaaacagaagcggaagaagacaaaaaccgttaagatgatcggtgtactcaccctcttcagatactccgattggcaggacaagctttttatgtcactgggcaccattatggctatcgcccacggatctggactgccgctgatgatgattgttttcggcgagatgacagacaaatttgtggacacggctgggaatttcagtttcccggtgaatttctccttgtccctgctgaatcctggaaagattctcgaggaggaaatgacccggtatgcgtattactactctggactcggtgccggggtgctggtggccgcctatattcaggtgagcttttggaccttggcggccggaaggcaaattagaaaaatcaggcagaagttcttccacgccatcctacgccaggagattggctggtttgatattaacgacacaacagagctcaatactaggcttaccgatgatatttccaagatctccgaagggattggcgacaaagtaggtatgttttttcaggcagtagcgacgttctttgccggttttatagtaggcttcatcagagggtggaaactaacacttgtcattatggcaatttcacctattctgggcctgtcagccgctgtatgggccaagatcctatccgcattttcagataaggaactggccgcttacgctaaagctggcgccgtggcagaggaagccctgggcgccataaggactgtcatcgcattcggcggccagaataaagaattggagaggtatcagaaacacctagagaacgcaaaagagatcggcattaagaaagctatttcggctaacataagcatggggatagctttcttattaatctatgcatcttacgcgctggctttttggtatgggtccacattggtcataagcaaagaatacaccatcggcaatgcaatgactgtgttcttttctatactgattggtgcattcagcgtgggtcaggctgctccatgcattgacgcctttgcgaatgccaggggagcagcttatgtcatcttcgatatcatcgataacaacccaaaaatcgacagcttttctgaaagaggccacaagccggatagtatcaaaggaaacctcgaattcaatgacgttcatttctcttatccctctagagcgaacgtgaaaatcctcaaggggctgaatctgaaggtgcagtcaggacagactgtagcgctcgtggggagcagtggatgtggcaaaagcaccacagttcagttgatacaacggctgtatgaccccgatgaaggaaccattaacattgatgggcaggatataagaaactttaatgttaattatctgagggaaataataggcgtcgtttcccaagaaccggtactgttttcaacgactattgccgagaatatttgttatgggcgaggaaacgtgacgatggatgagatcaagaaggctgtgaaggaggccaatgcctatgagttcataatgaaactccctcagaagtttgatacactggtcggtgaacggggagcacagctttctggaggtcagaagcagagaatcgctatcgcacgggccctggttcgcaatccgaagattctgcttctggacgaggcgactagcgcattagacaccgagagtgaagccgaggtgcaggccgccctggacaaggcaagagagggacggactacaatcgtgattgcccaccgtctcagcacagtccgtaacgcagacgttatcgcgggtttcgaagatggcgtaattgtcgagcagggctctcactccgagttaatgaaaaaggaaggagtttatttcaaactggttaacatgcagacatcaggcagtcagattcagtcagaggaattcgagctgaatgatgagaaagccgcgacgagaatggcacctaatggatggaaatctcggcttttcaggcactccactcagaaaaatctaaaaaacagtcagatgtgtcagaaaagcctggacgtcgaaacagacggtcttgaggccaacgtgccacctgtgtcctttctcaaggttttaaaactgaataaaaccgagtggccctacttcgttgtgggaaccgtctgcgctattgccaatggaggcctccagcccgccttcagtgtaatcttctccgaaatcatcgccatatttggacccggggacgatgcggtgaagcaacagaaatgtaacatcttctctctcattttcttgttcttggggatcatctccttcttcaccttctttctccagggattcactttcggtaaagccggagagattttgacaagacgcctgcgatcgatggccttcaaagcaatgcttcggcaggatatgagctggtttgacgatcataaaaacagtaccggggcactgtcaacccggctggcaacagacgcagctcaggtgcaaggagcgacgggtaccaggttggctctgattgctcagaacattgctaatctcggcactggcattatcataagctttatatacggctggcagctcactctgctgctccttgccgtcgttccaattatcgccgttagcggtatcgtcgaaatgaagctgcttgcaggtaatgccaagcgcgacaagaaagaacttgaggctgccggcaaaatcgctacagaggcaatcgaaaatataaggacagtagtcagcttgacacaggagagaaaattcgagtcgatgtatgttgaaaagctatatggtccttataggaactctgtgcagaaagcacacatctacggaattaccttttctatttcccaggcgtttatgtatttttcctacgctggttgtttcagatttggcgcctacttaattgtgaatggccacatgcgctttcgtgacgtgatcctcgttttctcagcgatcgtgttcggggcagtggcgctcggacatgcttcatcctttgccccagattacgctaaggcaaaactctccgctgcccatctgtttatgctgttcgaaagacaaccactgatcgattcttattccgaagaggggctgaagccagataagttcgaggggaatataacgtttaacgaagttgtattcaattacccaacaagggccaatgtgccggtccttcaagggctgtccctggaagtcaagaaggggcaaaccttggccctagttggctcctctggatgcgggaaaagtaccgtggtgcagctgcttgagcggttttatgatcctcttgccgggacagtgtttgtggattttggattccagcttctggatggccaggaggctaaaaaactgaacgtccagtggctgagagcccaattaggtattgtctcccaggagcccatactctttgactgtagcatagcggaaaatattgcatatggtgacaactcccgcgtcgtgtctcaggacgagatagtttctgcggcaaaggccgctaatatccaccccttcatcgaaacgctcccgcacaagtatgagaccagagtaggcgacaagggaacacagctgagcggtggccaaaagcaaaggattgctatcgctagagccctgattagacagccccagatcctcctacttgatgaggccacaagtgccttggataccgaaagcgagaaagtggtgcaggaggctttggacaaagccagggaggggaggacttgtatcgtcattgcacacaggctaagcaccatccagaacgccgatcttatcgtcgtttttcagaatggccgagtgaaggaacatggaacacaccaacaactactggcccagaaggggatctatttctccatggtgagtgtccaggctggtacccagaatctg

SEQ ID NO: 200204 - DNA, 3858 bp, Artificial Sequence
  derived and/or modified sequence
atggaccttgaagcagcaaaaaatggaactgcatggcgaccaacttctgccgagggagatttcgaacttggaatctcgtcgaaacaaaaacgcaagaaaacaaaaacagtaaaaatgatcggggtgcttacactctttcgatattcagactggcaagacaagctttttatgagcctcgggactataatggcgattgcacatgggtcgggacttccgttgatgatgattgtgtttggagaaatgactgataagttcgtcgatacagcagggaacttctctttccccgttaatttctcattgtcgctgcttaatccaggaaagattctagaagaggagatgactagatatgcatactactatagtgggttaggagcaggagttctagttgcagcatacattcaggtctcgttctggaccttggcggctgggcggcaaattcgaaaaattcgccaaaaattcttccacgctattctccgtcaagagataggatggtttgatattaatgataccaccgaactcaacacccgcctcaccgacgacatttccaagatttcagaaggaattggggacaaggttggaatgttcttccaagcagttgcaacgttctttgctgggttcattgtgggtttcatacgaggctggaagctaaccctggtgattatggcgatctcgccaattctgggactctcggccgcagtgtgggccaaaattctttccgcattttcggacaaggagctcgcagcctacgccaaggcaggagccgttgcagaggaggcattgggtgctattagaacagttatcgctttcggtgggcaaaataaagaattggagcgctatcaaaaacacctagaaaacgccaaagaaatcggaattaaaaaagctatatcagccaacatatcaatgggaatagcattcttgctgatatacgcttcatacgcactggctttctggtatggctccactctcgtgatctcaaaggagtacactatcgggaatgcaatgacagttttcttcagcatattaattggtgccttctcggttggtcaagctgcaccctgcattgatgcgttcgctaatgcgagaggcgccgcatatgttatcttcgacattattgataataacccaaaaattgactcatttagtgaaagagggcataagccagactcaattaagggcaatcttgaatttaatgacgtgcatttttcgtatccatctcgagctaatgtgaagattctaaaaggacttaatcttaaggttcaatcaggacaaacggttgctttggtgggcagttcggggtgcggaaagtcaacaacagtgcaactcatccaacgtctctatgatcccgatgaaggaactattaacatcgatggacaagatatacgtaacttcaatgttaactaccttagagaaattattggggtcgtatcacaggagccggtccttttctctacaacgatcgcagaaaatatctgctacggacggggaaatgtaaccatggatgaaataaaaaaagctgttaaggaggcaaatgcctatgaatttataatgaagcttccacaaaaatttgacacgctggtcggtgaacgtggagcacagctgagtggaggtcaaaagcaacgaattgctatagccagagctctagttagaaacccaaaaattttgcttctagacgaagcgactagtgcattggataccgaaagtgaggccgaagtccaagcagcactggacaaagccagagagggtcgcactaccatagttatagctcacagactctcgacagtacggaacgctgatgttatcgccggcttcgaggacggagtcattgttgaacaaggatcgcattcagaacttatgaaaaaagaaggtgtatatttcaaacttgttaatatgcagacatctggatctcagattcaatcggaggagtttgagttgaacgatgaaaaggctgcaactagaatggccccaaatggttggaaatcacgtctcttccgacactctacccaaaagaatttgaaaaactcacagatgtgccagaaatctttggacgtcgaaactgatgggctagaagcaaacgtcccacctgttagttttttgaaggtcttaaaattaaacaaaactgaatggccatatttcgtggtggggactgtgtgtgctattgccaacggaggtttacaaccggcattctctgtaatattctccgaaattattgctatatttggacctggagatgatgccgttaaacagcaaaagtgtaatatttttagcctcattttcttgtttttgggcattatctcattctttacattctttctacaaggatttacattcggtaaggcaggtgaaatccttacacgtcgactacggtcaatggctttcaaagctatgctgcgtcaagatatgtcttggtttgatgaccataaaaattccacgggagcattaagtactagactagcgactgatgcggcccaagttcaaggagctactggaactagactcgcgttgatcgcgcaaaacattgcaaatttaggaactggaataattatctccttcatttacggatggcagttaacgctactattgcttgcggttgtgccaatcattgctgtttctggtatcgttgaaatgaagctccttgctggaaatgccaagcgtgataagaaagaacttgaagctgcgggcaaaatcgcaactgaagctattgagaatatccgaacagtagtatcactcacacaggaacgaaagttcgaaagtatgtatgttgagaagctatacggaccttatagaaattcagtacaaaaagctcacatctacggaattacgttctctatcagccaggcctttatgtatttctcgtatgccggttgttttagattcggagcttacttaatcgtaaatggtcatatgcgattccgagacgtaatattggttttcagtgcaattgtgttcggtgcagtggctcttggccatgcatccagctttgccccagattatgcgaaagcgaagttgtcggctgctcatttgtttatgttgtttgagcggcagcctcttattgattcttactcggaagaaggacttaaaccagataagttcgaagggaatatcacttttaacgaagtcgtttttaattatccaactcgggccaatgtaccagtgctccaaggattgtccttagaggtgaagaaaggccaaacattagccctggtcggtagtagtggttgcggaaaatctactgttgttcagctgctggaaagattttatgatccgttggcaggtactgtttttgttgattttggatttcaactattggatggccaagaagcaaaaaaacttaacgttcaatggttacgcgctcaactggggattgtaagtcaagagccaattttgttcgactgctctattgcagaaaacatcgcttatggagacaattctcgcgtagttagtcaagatgaaatagtgtcggctgcaaaggcggcaaatattcatccgtttatagagactctaccacataagtatgaaactagggttggagacaagggcactcaactgtctggaggacaaaaacagcgaattgcaattgcgcgagcattgattcgtcaaccacaaattttactgctagacgaggcgacttctgcattagatactgagtctgagaaagttgttcaggaggcactcgataaggcgagagagggacggacttgcatcgtgatcgcgcatcgcctcagcactattcagaatgcagatctcatcgttgtatttcaaaatggaagagtcaaagagcacggaactcatcagcaacttctggcacagaaaggcatttatttctcaatggtgtccgttcaggccggcactcaaaaccta

SEQ ID NO: 200205 - DNA, 3858 bp, Artificial Sequence
  derived and/or modified sequence
atggatttggaagccgcaaagaatggtaccgcttggaggccgaccagcgccgaaggagattttgaactgggcatttcatccaagcagaaacgaaagaaaactaaaaccgtcaaaatgattggtgtgctgactctgtttcgctactcagactggcaagataagctgtttatgtcacttggtactataatggcaattgcgcatggatcgggactgcctctgatgatgatcgtgtttggagaaatgaccgacaagttcgttgacaccgccggaaacttctcatttccagtgaacttcagcctttcgctgctgaatcctggtaagatcttggaggaagaaatgactcgctatgcatactactactccggactcggcgcaggtgtgcttgtggccgcatacatacaagtgtccttctggaccctggctgccgggcggcaaattcgcaagatcagacagaaattctttcacgcgatcctcagacaggagattggatggttcgacataaatgacaccactgaactgaacactagactgactgatgatatatcgaagatatcagaaggaattggagataaggttggtatgtttttccaagccgtcgccaccttttttgccggctttatcgtgggattcatccgtggttggaaactgacgcttgtgataatggcaatatcgccaatccttggactttcggcagcagtgtgggcaaaaatcttgtccgccttttctgataaagaactggcagcatatgcaaaagctggtgccgtcgcagaagaagcacttggggctatccgcactgtcatcgcatttggcggacaaaacaaggagttggagagataccaaaagcatcttgaaaatgcaaaggagattgggattaagaaggcgattagcgcaaatatctctatgggcattgcatttcttcttatctacgcatcctacgcactcgcattttggtacggatccaccctggtgatcagcaaagaatacaccattggaaacgcaatgaccgtgttcttctcgattctgatcggtgctttttcggtcggccaagcagcaccctgtattgatgcattcgccaacgctcgcggcgcggcctacgtgatttttgatatcattgacaacaatcccaagatagattcttttagcgaaagaggccataagccagattccataaagggtaaccttgaattcaacgacgtgcatttctcctatccttcacgtgcgaacgttaagatcctcaagggccttaaccttaaggtgcagagcggacaaactgtggcgcttgtgggttcgtcggggtgtgggaagtctactactgtccagcttattcaaaggctgtacgatcccgacgagggaactataaacattgacggacaggatattagaaactttaatgtgaattacctgcgcgagataattggcgttgtgtcccaagaacctgttctgttctcgactaccatcgccgagaatatctgttacggaagaggtaacgtgactatggatgagataaagaaagcggtgaaggaagccaacgcgtacgagtttatcatgaaactgcctcaaaagttcgacaccctcgtgggggaaagaggagctcaactgtcgggtggacagaagcagcgcatcgcgatagcacgcgcattggtgaggaaccctaagattctgcttctggatgaagcaaccagcgcactggacactgaatcagaggcagaagtgcaggcagcgcttgataaggcacgtgagggtagaacgaccatcgtcatcgcccacagactctcgacggtgcgcaacgcggatgttatcgcaggattcgaggacggagtcatcgtggagcagggatctcacagcgaacttatgaagaaggagggggtgtactttaagctggtgaacatgcagacgagcggtagccaaatccagagcgaagaattcgaactcaatgacgagaaggcagcaactcggatggcaccgaatggttggaagtcgcggctctttaggcattccactcagaagaacttgaagaattcgcaaatgtgtcagaagtcacttgatgtggagactgatggacttgaagctaatgtccctccggtgtcgtttctgaaagtgctgaagttgaacaagaccgaatggccatacttcgtcgtgggaaccgtgtgtgcgattgctaacggtggactgcaacccgcattttccgtgattttctcggagattatcgcaatctttggtcctggcgacgacgccgtcaagcagcagaaatgcaacatcttttcgctgatctttctgttcctcggcattatctcatttttcaccttttttctgcaagggtttactttcggaaaggcaggggaaattctcactcggcggctgcgatcgatggcctttaaggccatgctcaggcaagatatgtcgtggttcgacgaccataagaactccactggggcattgtcgacccgcctggcaacggacgccgctcaggtgcaaggcgccaccggaacccggctggcgttgatagcgcagaatattgcaaacctgggtactggtattatcatctcatttatctacggctggcaactcactctccttctccttgcggtggtgccgataattgcagtctcaggaattgtcgagatgaaactgcttgctggcaacgcgaagcgcgataagaaggagctggaggcagcaggtaagattgcaactgaagcaatcgaaaacatcagaacggtggtcagcctgacccaagagaggaaatttgaaagcatgtacgtggaaaaactgtacggaccataccgcaacagcgtgcagaaagcacacatttacgggatcactttctcaatttcccaagcctttatgtacttctcatacgcggggtgctttagattcggcgcctacctgattgtgaacggacatatgagattcagggatgtcattcttgtctttagcgccatagtgttcggagctgtggcccttggccacgcaagctcgtttgcacctgattatgcgaaagcaaaactgagcgctgcacatcttttcatgttgttcgagcgacaacccctcatagattcttacagcgaagaaggtcttaagcctgataagttcgagggcaacattacgttcaacgaggtcgtgtttaactacccgacgcgggcgaacgtgccagtgctgcagggcctgtccctcgaagtcaagaagggacagactcttgcacttgtcgggagctcgggctgtggcaagtccaccgtggtccaattgctcgagagattttacgatccgctcgccggtaccgtgtttgttgattttggatttcagctgctggacggacaggaagccaagaagctgaatgtgcaatggcttagagcacagctcggtatagtgtcgcaagaaccaatcctgttcgactgctccatcgcggagaatattgcctacggagacaactcaagggtcgtctctcaagatgagattgtctccgcggcaaaggcggccaatattcatccctttatcgaaaccctgccacacaaatacgaaaccagagtgggggataagggcacccaactgtccggaggtcaaaaacagcggattgcaatcgcacgcgcccttatcaggcaacctcagatcctgctgctcgatgaagcgacgagcgcactcgataccgagagcgaaaaggtggtgcaggaggcactggacaaagcacgggaaggtcgcacctgcatcgtgattgctcacagactgtccaccattcagaacgcagatctgattgtggtgtttcagaatgggagggtgaaagaacatggtacgcatcaacaacttcttgcccaaaagggaatatactttagcatggtcagcgtgcaagcgggtacccagaatttg

SEQ ID NO: 200206 - DNA, 3858 bp, Artificial Sequence
  derived and/or modified sequence
atggatctggaagcagccaaaaacggcactgcatggcgacctactagcgcagaaggtgatttcgagctgggtatctcgtcgaaacagaagcgcaagaaaactaagacggtcaagatgataggagtgcttactctcttccgctacagcgactggcaagacaaattgtttatgtcccttgggactattatggcaattgcacatggttccggcctcccactgatgatgattgtgtttggagaaatgaccgacaaattcgtggatactgcaggaaatttctcgttccccgtcaactttagcctttcccttctgaacccaggaaagatcctggaagaagaaatgaccaggtacgcatattactactctggtcttggagcaggagtcctcgtggctgcgtatattcaagtctccttttggactctggcggccggtcggcagattcgcaagatccgtcagaagttttttcacgctatccttaggcaggaaataggatggtttgacatcaacgacaccactgaactcaacacgcgcctgaccgacgatatttcaaagatatctgaaggaattggggataaggtgggtatgtttttccaggcagtggcaacttttttcgcgggtttcattgtcggatttatccgaggatggaaacttacccttgtgataatggcaatctcgccaattcttggcctctcggccgcggtgtgggcaaagatcctcagcgcattttcagacaaagaactggcggcatacgcgaaggcgggagcggtcgcagaagaagcgcttggtgccatccgaaccgtgatagcctttggcgggcaaaacaaggaattggaacggtaccaaaagcaccttgagaatgcaaaagaaataggcataaagaaagcgatctcagctaacatatcgatgggaatcgccttcctgctgatttatgccagctacgcattggccttttggtatggatcgacgctggtgatttctaaagagtacaccatcggtaacgcaatgacggtgtttttctcaatcctgatcggtgcattctccgtcggtcaagccgcaccatgtatcgatgcctttgccaatgccaggggagcagcgtacgtgatcttcgacataatcgataacaaccctaaaatcgatagctttagcgaacggggacacaaaccagactcgattaagggaaatcttgagtttaatgatgtgcattttagctacccaagcagagcgaatgtgaagattttgaagggtctgaatctgaaggtgcagtccgggcagactgtggcgcttgtcgggtcctccggatgtgggaagagcaccacggtgcaacttattcaaagactgtacgatccagatgaaggtaccatcaatatcgatgggcaggatatccgtaactttaatgtgaactacctgagggaaatcattggagtcgtgagtcaggaaccagttttgttttcgacgactattgcagaaaacatctgttacggaaggggaaacgtcactatggatgagatcaaaaaagctgtgaaggaggcaaacgcatacgagttcattatgaagctgccccagaaatttgacactctggtgggagaaagaggagcccaactgtcgggaggacaaaagcaacgcatcgccatcgcaagggcactggtgcggaaccctaagatcttgctgcttgacgaagcaacctctgcgttggatactgagtccgaagcagaagtgcaggcagccctcgataaagcacgcgaaggacgcaccactatcgttatagcccaccgtctttccactgtccgcaacgctgacgtgattgcaggattcgaagatggagtgattgtggaacagggcagccattccgaactgatgaagaaggaaggggtctactttaagctcgtgaatatgcagacctccggaagccaaattcagtcggaagaatttgagttgaatgatgaaaaggcagcaactaggatggcgccgaacggctggaagtcaaggctgtttagacattccacccaaaagaacttgaaaaactcccagatgtgtcagaaaagccttgatgtggaaactgacggacttgaggcaaatgtgcctcctgtgtccttccttaaggtcctgaaacttaacaaaacggagtggccttactttgtggtgggtacggtgtgcgccattgctaacggcggtttgcaacctgcattctctgtgattttcagtgagatcatagcgatttttggacctggagatgatgccgtcaagcaacagaagtgtaacatcttctcactcatttttctttttctgggaatcattagctttttcaccttcttcttgcaagggtttacctttggtaaggccggagaaattcttacccggagactcagaagcatggcatttaaggctatgttgcgccaagatatgtcctggtttgatgaccacaagaattccactggagcactgtcgacccggcttgcaaccgatgcggcccaggtccagggcgcaactggaacgcggctcgcactgattgcacagaacatcgcaaacctcgggaccggcattatcatttcgtttatctacggttggcaacttaccctgcttcttctggccgtggttccaataatcgctgtctcaggcattgtggagatgaagttgctcgcaggaaacgcaaagagagacaagaaggaactggaggccgcaggaaaaatcgcaacggaggcgatagaaaacataagaactgtggtatcactgactcaggagcgcaagtttgaatcgatgtacgtggaaaagctgtacggaccttaccgtaattcagtgcagaaggcccacatttacggaattactttttccatttcccaagcatttatgtacttctcatacgcaggatgtttccgttttggtgcctacctgattgtgaacgggcatatgaggttccgagatgtcatactggtcttttcggcaattgtgttcggtgcagtcgcacttgggcatgcatcgtcgtttgcaccagattacgcaaaggcgaagctgagcgcagctcacctctttatgctgtttgagagacaaccgttgattgattcgtattcggaggaggggctgaaaccagataagttcgaaggcaacatcacctttaatgaagttgtgttcaactaccctactagggcaaacgttcctgtccttcagggacttagccttgaagtgaagaagggccaaacgcttgcccttgtgggctcgtcagggtgtggaaagtcgactgtcgtccagctgcttgaacggttttacgatccactggcaggaaccgtgtttgtcgatttcggatttcaactgcttgatggacaagaagcaaagaagctgaacgtgcaatggttgagggcacaactcggtattgtgtcacaagagcctatcctttttgactgctcgattgccgaaaacattgcatacggcgataactcgagagtggtgtcgcaggatgagattgtgtctgctgccaaggccgccaacatacatcccttcatcgaaactctgccccacaaatacgaaacccgggtgggggacaagggaactcagctttcaggaggccaaaaacaacggatcgccatcgctcgcgcacttatccgtcaacctcaaatccttcttttggacgaggcaacctccgcactcgataccgaatctgaaaaggtggtccaggaggcactggataaggcaagggagggaagaacttgtatagtcatcgcacatagactgagcactattcagaacgcggatctgattgtggtgttccagaacggccgggttaaggagcatggcactcatcagcaactgcttgcgcaaaagggaatctacttttccatggtgtctgtccaagcaggcacccagaacctc

SEQ ID NO: 200207 - DNA, 3858 bp, Artificial Sequence
  derived and/or modified sequence
atggatctagaggccgcgaaaaacgggacagcttggcgcccaacgagcgccgagggggatttcgagctcggaattagtagcaagcaaaaaaggaagaagacgaaaaccgtcaaaatgattggggttctgacgttgttccgctattctgactggcaggacaagctgttcatgtctctgggtactatcatggccatcgcacacggtagtggactgccactcatgatgattgtgtttggggaaatgaccgataaattcgtggatactgctggcaatttctctttccccgtcaacttcagcctgtccctgttaaacccgggaaaaatattagaggaagaaatgacccggtacgcttactactactctggactgggagcaggcgtcctcgttgccgcatacatccaggtttcgttctggacactggccgcagggcgccaaatacgaaagatcagacaaaagttcttccacgcaatcctgcggcaagagatcggctggtttgatattaacgacactacggagctaaacacaaggctgacggatgacatttctaaaattagcgagggcatcggtgataaggttggaatgttttttcaagccgttgctacattcttcgctgggtttatcgtcggtttcatcagagggtggaaactgaccctggttatcatggcaatcagtcccatcctgggactcagcgctgcagtctgggccaagatactttccgctttttctgacaaagaattagccgcctacgcaaaggcaggcgccgtcgccgaagaggctttgggagctattcggaccgttattgcctttgggggacagaacaaagaacttgagaggtatcaaaaacacctcgagaacgcaaaggaaattgggatcaagaaggccatcagtgcaaatatcagtatgggaattgccttcctcctgatttatgccagctacgcacttgccttctggtacgggagcacactggtcatttcaaaggaatataccattggcaatgccatgacagtattttttagtatcttgattggtgcgtttagtgtcggccaggccgcgccatgcattgacgcatttgccaatgctcgaggcgccgcctacgtgatctttgatattatcgacaacaacccaaaaatagactcattctcggagcggggtcacaaaccagactccatcaagggcaatctagaatttaacgacgtgcacttctcctatccctcaagagccaacgtgaagatcctcaagggcctcaatctcaaagtgcagagtggccagactgttgctcttgttgggagtagcggatgtggtaagtcaaccaccgtccagctgatccagcgactgtacgacccagacgagggcaccatcaacattgatgggcaagatattagaaactttaatgtgaattatctgcgggagatcataggcgtggtgagtcaggaaccagtcctgtttagcaccaccattgccgagaatatctgttatggccgaggtaatgttacaatggatgaaattaaaaaagctgtgaaagaggccaacgcctatgagtttatcatgaagctgccgcagaagtttgacacacttgtgggcgaacggggcgcacaacttagtggtggtcagaagcagcggatcgctattgctagggccttggtgcgaaatcctaagatactactcttggacgaagccactagcgctcttgacacagagagcgaagcagaagtgcaggccgcgctggataaggcccgagagggccgaacaacaattgtgattgcccatcgactgagtaccgtccgcaatgcagatgtaattgctggttttgaagacggcgttattgtagagcagggcagtcattccgaacttatgaagaaagaaggagtatactttaagctggtgaatatgcaaaccagtggttcccagatccagtccgaggagtttgagctgaacgatgagaaggccgcgacgaggatggcccctaacggctggaaatcacggctgtttcgccattctacgcagaaaaatttgaaaaactcccagatgtgtcagaaatctctggacgtggagaccgacgggttagaggccaacgtaccacctgtgtcctttctcaaagttctgaagcttaacaagacggaatggccttacttcgtcgtgggcaccgtttgcgccatcgccaatggcggtctccagccagcattcagcgtgattttcagtgaaataatcgcgatctttgggccaggggacgacgccgtgaagcaacaaaagtgtaacatctttagcttaatttttctcttcctcggcatcataagcttcttcacgttcttcctccagggatttacttttgggaaagctggcgagatactcacccgccgcctacgcagtatggcattcaaagcgatgttgaggcaggacatgtcttggtttgatgaccataagaactcgacaggcgccctgagtacgagactcgctactgatgccgctcaggtccaaggggctaccggtactcgactcgcactgattgcgcagaatatcgctaacctcggaaccggcattatcatcagcttcatttatgggtggcaactcacactcctactgctggctgtggtgccaatcatcgccgtgagtggaattgtggaaatgaagctgctcgcaggtaatgcaaaacgtgacaagaaggagctagaggccgctgggaagatcgccaccgaggccatcgagaatattaggaccgtggttagtctgacacaggagcgcaagttcgagtcaatgtacgttgagaagctgtacggcccctataggaacagcgtgcagaaagctcatatatacgggataacttttagtatctctcaagcttttatgtacttctcgtacgctggctgcttccgcttcggggcttatctcattgtcaacggccatatgcggttccgcgacgtaatcttagtgttttccgccattgtgtttggagctgttgctctgggtcacgcatctagttttgcaccagactacgcaaaggccaagctcagcgcggcccatctcttcatgctgtttgaaaggcaacctttgatcgatagctatagcgaagagggcttgaagccagataaatttgagggaaacataacattcaatgaagttgtatttaattacccaacaagggcgaatgtgcccgtgctgcaagggctgtctctcgaagttaaaaaggggcagacgctggcactggttggcagctctggctgcgggaaatcaacagtggtgcagctcctggagaggttctacgatccattagctggaactgtgttcgtggatttcgggtttcaactccttgacgggcaggaagctaaaaagctgaacgtgcagtggctgagagcccagcttggtatagtgagtcaagaaccaatcctttttgactgctccatagcggaaaatatagcttatggagataacagcagagtagtatcccaggacgaaatcgtgagtgcagccaaggccgccaacatccacccctttattgaaacattgccccacaagtatgaaactagagtgggcgataaaggaacgcagctctccggcggccagaaacaacgtatcgcaatcgctcgcgcccttattcggcagccccagattctactactggacgaggccaccagtgccctcgacacagagagcgaaaaagtggttcaggaggctctggataaggcccgcgaaggaaggacctgcatagtgattgcccatcgcctttccacgatccaaaatgctgatctgattgtggtgtttcagaacggtagggtgaaagagcacggtacgcatcagcagctgcttgctcaaaagggaatctactttagtatggtcagcgtgcaggccggcacacagaacctt

SEQ ID NO: 200208 - DNA, 3858 bp, Artificial Sequence
  derived and/or modified sequence
atggaccttgaggccgcaaagaacgggaccgcctggcggccgacttccgctgaaggagacttcgaactcggaatttcgtcgaagcagaagaggaaaaagaccaaaactgtgaagatgatcggagtgttgaccctgttcagatattcagactggcaagataagctctttatgtcgctcggcaccataatggccatagctcacggctcaggcctcccactgatgatgattgttttcggggagatgaccgacaaattcgtcgatacggcaggcaactttagcttccctgtgaatttctcgctgtcgctgctcaacccgggtaaaatcctggaggaggagatgacccggtacgcctactactattccggcctcggagccggagtgctcgtggcggcgtacattcaggtgagcttctggaccttggcggctggacgccaaatcagaaagatcaggcaaaagtttttccacgctatcctccggcaagaaatcggctggttcgacatcaatgacactactgagctgaacactcgactgactgacgacatctctaagatttctgaaggtatcggcgacaaggtgggaatgttctttcaggccgtggccacttttttcgccggattcatcgtcggcttcatcagaggatggaaactcactctggtgattatggccatttcgcctatcctggggctgtcggcggcagtgtgggcgaaaatcctctcggctttctcggacaaagagctggccgcatacgcaaaggcgggggccgtggcagaagaggccctgggcgccatccgcaccgtgatcgccttcggaggacaaaacaaagaattggagcgctaccagaagcacctcgaaaatgcgaaggaaatcggaattaagaaggccatctcggccaacatttcgatggggatcgccttccttctgatctacgcgtcctacgccctggcattctggtacggatcgacccttgtgatctcgaaggagtacactatcggaaacgcgatgaccgtgttcttctcaatcctgatcggagctttctcagtcggccaggccgcaccgtgcatcgacgctttcgccaacgctagaggagccgcctacgtgatctttgacatcatcgacaataacccaaagattgattccttctcagagcggggccacaagcccgactcgatcaagggaaatttggaattcaacgacgtgcacttctcctatccatccagggccaatgtgaagattctcaaaggactcaatctgaaagtgcaatcggggcagactgtggccctggtgggtagctcagggtgcggaaagtcgaccaccgtccaactcatccagagactctacgatcctgacgaagggaccatcaacatcgacggacaggacatccggaacttcaacgtgaattacttgcgggagatcatcggagtggtgtcacaggagcctgtgctcttcagcaccacgatcgccgaaaacatctgctacggacgggggaacgtgaccatggatgagatcaagaaggccgtgaaggaggcgaacgcctacgaattcatcatgaagctgccgcagaagttcgacaccctcgtcggcgaacgcggcgcacaactctccggaggtcagaaacagcggatcgcaattgcacgcgcactcgtgaggaacccgaagatcttgctgctggatgaagccacttcggcgctggacaccgaaagcgaagctgaagtccaagcggcgcttgacaaagcccgtgagggacgcaccactatcgtgatcgcacatcgcctgagcaccgtcaggaatgccgacgtgattgcggggttcgaggatggagtgatcgtcgaacagggatcgcattccgaactcatgaagaaggaaggagtgtacttcaagttggtgaacatgcagacttccggctcccaaatacagtctgaggaattcgaattgaacgacgagaaggcggcgaccagaatggccccgaacggctggaagtcacggctcttccggcactcgactcagaaaaatctgaagaatagccagatgtgtcaaaagtcgctggacgtggagacggacggccttgaggcaaatgtgccccctgtctccttcctcaaggtgctcaagctgaacaagaccgagtggccgtacttcgtcgtgggaacggtctgcgcaattgccaacggaggactgcagccagccttctcggtgatcttctcggagatcatcgcaatcttcggccctggagatgacgcggtcaaacagcaaaagtgcaacatcttctccctgatcttcctgttcctgggaatcatctccttctttacctttttcctgcaaggtttcactttcggaaaggcaggcgaaattctgactcgccggctcagatcgatggcgtttaaagccatgctcagacaggatatgtcctggtttgacgaccacaaaaacagcaccggcgccctgtccactcgcttggcgaccgacgctgcccaggtgcagggtgccacgggcacgcggctggctctgatcgcacaaaacatcgcgaatttgggtactggcatcataatctcgttcatctacggatggcaactgactctgttgctgctcgccgttgtgcccatcatcgcagtgtcgggaatcgtggaaatgaagctgcttgccggtaacgccaagcgcgacaaaaaggagcttgaggcagccggcaagatcgcgaccgaagccatcgaaaacattcggactgttgtctccctgactcaagaacggaagtttgaatccatgtacgtggaaaagctgtacggaccctacagaaatagcgtgcaaaaagcgcacatctacgggatcactttctccatctcacaagcattcatgtacttctcctacgcgggatgctttagattcggggcctacctgatcgtgaatgggcatatgagatttagagatgtgatcctggtgttttccgccatcgtgtttggagctgttgcccttggacacgcatcctcgttcgcccccgattacgcgaaggctaagctcagcgcagcccatcttttcatgctgtttgagcgccagcccctgatcgattcatacagcgaggaggggctgaagccggacaaattcgagggaaacatcactttcaatgaggttgtctttaactacccgacccgggccaacgtcccagtgctgcagggactgtccctggaagtgaagaagggacagacgttggctctcgtcgggtcaagcggatgcggcaagtccacggttgtccagctcctcgagaggttctacgacccgttggccggcacggtgtttgttgacttcggcttccaactgctggacgggcaggaggcaaagaaactgaacgtgcaatggctccgggcacagctgggaatcgtgtcccaggagcctatcctgttcgactgttcaatcgccgagaacattgcgtacggagacaattcgcgcgtagtctcgcaagacgaaatcgtgtccgccgccaaggctgcaaacatccacccatttatcgaaacgctcccgcacaaatacgaaacccgcgtgggagataagggtacgcagctgtcgggaggacagaagcagcgcatcgccattgcgcgcgcacttatcagacagcctcaaattctgctcctcgacgaggcgacctcggccctcgatacggagtcggagaaagtggttcaggaggctctcgacaaggccagggagggacggacttgcatcgtcatcgcgcaccggctctccacgatccagaacgcagatctgatcgtggtgttccagaacggccgggtcaaggagcacggtactcaccagcagcttttggcccagaagggaatctacttcagcatggtgagcgtgcaggcgggaacccagaacctc

SEQ ID NO: 200209 - DNA, 3858 bp, Artificial Sequence
  derived and/or modified sequence
atggatttggaagccgcaaagaatgggaccgcttggaggcctacttcagcagaaggggattttgagctgggtatcagctcgaaacaaaaaagaaagaaaactaaaaccgtgaaaatgattggagtcctgaccctgttcagatactccgactggcaagataaactgttcatgtcccttggaactataatggccattgcgcatggctccggtttgccactgatgatgattgtctttggtgaaatgaccgataagtttgtggacacggcgggtaacttttcgttccccgtgaatttcagcctgagcctccttaatccgggtaagattcttgaagaggaaatgacgcggtacgcatattactactcagggctcggcgcaggtgtgctggtggcagcatacattcaggtgtccttttggaccctcgcggcaggccgccaaatcagaaagatcagacaaaagttttttcatgcaatactgcggcaggaaatcggatggtttgatatcaatgacaccactgaattgaacactcgtcttaccgacgatattagcaagatttcggagggtattggtgataaggtgggtatgttttttcaagccgtcgcaactttcttcgcaggattcatagtaggattcattagaggatggaagctgactctcgtgattatggctataagcccaatcctcgggctttctgcagcagtgtgggcaaagatattgtccgcatttagcgataaagagctcgcggcctacgccaaggcaggcgcagtggcggaagaagcactgggggcgattcgaaccgtcatcgcgttcggggggcagaacaaagaacttgaaagataccagaagcatctggagaacgccaaggagatcggaatcaaaaaagccatctccgcaaacatctcgatgggaattgcatttttgctgatttacgcaagctacgcgctggcgttttggtacgggtcgacgctggtaatctcgaaagaatacactataggtaatgccatgacggtgttctttagcattcttattggtgcttttagcgtcggacaagcagccccttgtatcgacgcttttgccaacgcaagaggagcagcatacgtgattttcgacattattgacaacaaccccaagatcgactcctttagcgagcgaggacataagcctgactccataaagggaaacctcgaattcaatgacgtccactttagctacccatcacgagccaacgtgaagatacttaagggtctgaacctgaaggtgcaatccggacagaccgtggccttggtcggatcctcgggttgtggtaagtcgacgactgtgcaactcattcaaagactctacgatcctgatgaaggtactatcaacattgacggccaagatattagaaactttaacgtgaattacctgagggagatcattggcgtcgtgtcgcaggaacctgtgttgtttagcaccaccattgccgaaaacatctgctatggacgcggtaatgttacgatggatgagataaagaaagcagttaaggaagcaaatgcatacgaattcatcatgaaacttccacagaagttcgacactctggtgggtgagcgcggtgcccagctctcgggaggacaaaagcaacgtatagccattgcacgggcgctggtgcgtaatcctaagatcctgctgcttgatgaagccacctctgcattggacactgagtcagaagccgaagtgcaagcagctcttgataaagcacgggagggtaggaccacgattgtgattgcccatcgactttctaccgtacggaatgcagatgtgatagccggtttcgaagatggggtgatcgttgagcaaggaagccacagcgaactgatgaagaaggaaggtgtctactttaagctggtgaatatgcaaacctcaggatcacagatccagtcggaagaatttgaactcaatgatgaaaaagccgctacccggatggcacctaacgggtggaaatcaaggctttttcgccattcgactcagaaaaaccttaagaactcacagatgtgtcagaaaagcctggacgttgaaaccgatggcctcgaagcaaatgtgcctcctgtgtcattccttaaggtcctgaagctgaataagactgaatggccctactttgtcgtgggaaccgtgtgtgcgattgccaacggaggacttcagcctgctttcagcgtcatattcagcgagattattgcaatcttcggacccggagatgacgcagtgaaacagcagaagtgtaacatcttctcgctgatatttctttttctcgggattatctcatttttcacttttttcctgcaaggcttcacctttggaaaggccggtgagattttgactaggcgcctgcggtcaatggcatttaaggcaatgctgcgtcaagatatgtcgtggtttgacgatcacaaaaactccaccggagctctgtccacgcggttggctaccgatgcggcacaagtccaaggagcgaccggtactcggctcgcactcatagcgcaaaacatcgcaaaccttggtaccggaattatcatcagtttcatttacggatggcaactcaccctgcttcttttggccgtcgtaccgattatagcagtgtccggaattgtcgaaatgaaattgcttgcagggaacgcaaagagagacaaaaaggaactcgaagcagccggaaagattgccactgaagcgattgagaacattagaaccgtggtgtcgctcactcaagaaaggaagtttgagtccatgtacgtggagaagctgtatgggccttacagaaacagcgtgcaaaaggcacacatctacgggattaccttctcgatctcacaggccttcatgtatttctcctatgcaggatgtttcagatttggagcttacctcatagtgaatggacacatgaggtttagagacgttattcttgttttttccgcaattgtatttggtgcagtggcactggggcatgcaagcagctttgcaccagattacgcgaaggcaaagctgtccgctgcgcatctgttcatgctttttgaacgccagcccctgatcgattcgtactcggaggagggcctgaaaccagataagtttgaaggaaacattacctttaatgaagtcgttttcaattaccctacgagggctaacgtgcctgtgcttcagggcctctcgcttgaagtgaagaagggccaaactcttgcgcttgtcggatcatcgggctgtggtaagtcaaccgtggtgcaactgctcgagcgtttttacgatcccctggcaggtactgtctttgtggactttggctttcaactcctcgatggccaggaggcaaagaaattgaacgtgcagtggttgcgggcacaactgggaatcgtgtcccaggagccaattctgttcgactgctcgatagctgagaatatcgcttacggggataactcccgtgtggtgtcacaagatgagattgtctccgcggcgaaggctgcaaacattcatccattcattgagactcttccacataagtatgaaaccagggtcggcgacaagggaactcaactcagcggcggacaaaaacaacggattgccattgccagagcacttatccgacagccacagattctgcttttggatgaagcaacttcggcactggatactgagtcagagaaggtggtgcaagaggcattggataaggccagggaaggtcgtacgtgtatagtgatcgcgcatcgtctcagcaccatacagaatgcagacctgatcgtcgtctttcaaaacggacgcgttaaggaacacggtacccaccagcaactgctggcgcagaagggaatttacttttctatggtgtccgtgcaggcaggaactcaaaatctt

SEQ ID NO: 200210 - DNA, 3858 bp, Artificial Sequence
  derived and/or modified sequence
atggacctagaggccgctaagaacggtactgcatggaggccaacatcggcggagggagactttgaattgggcattagctcgaagcagaagcggaaaaagaccaagactgttaaaatgatcggagtgttgaccctttttaggtactctgactggcaggataaacttttcatgtctctcggcactataatggcgattgctcatggatccggactcccactgatgatgatcgtatttggtgagatgactgataaattcgtggataccgctggcaatttctcctttcctgtcaattttagtctaagtcttttgaatcctggtaagattctggaagaggagatgacaaggtatgcatattattattccggtttaggtgctggggtgcttgtcgctgcttacattcaagtttccttttggaccctcgctgcgggacgccaaatccgaaaaattagacagaagttttttcatgcaatattgagacaagaaattgggtggttcgacattaacgatactactgaacttaatactaggctgacagatgatatctcaaagattagcgagggaattggggataaagttggaatgttctttcaagccgtcgcgaccttttttgccggattcattgttgggttcatacgagggtggaagttgaccttggtcatcatggctataagccctatcttgggactcagcgctgctgtatgggccaagattctcagcgcattctccgataaggagttagcagcttatgcaaaggccggtgctgttgctgaagaggcgcttggtgcaataaggactgtgatcgcattcgggggacagaataaggaactcgagaggtatcaaaagcaccttgagaatgctaaggaaatagggataaagaaagctatctctgctaacatctccatgggcattgcttttttgctcatatacgcaagttacgccttagccttttggtatggctcaaccctagttatatcgaaagaatataccatcgggaacgcaatgactgttttcttctcaatacttattggagcattcagcgtgggccaagcggccccctgtattgacgctttcgcaaacgcacgtggtgcagcttacgtcatcttcgacattatagataacaatccaaaaattgattcattttcagaaagaggacacaaaccagatagcattaaaggaaacctagagttcaatgatgtgcatttttcctatccatcccgtgctaatgtcaaaattctcaagggcctcaaccttaaagtgcagagtggacaaaccgtggctctggtcggatccagtggttgcggtaaaagtactaccgtgcagctaatccaaagactatacgaccccgatgagggtacgattaatatcgatgggcaggatattaggaattttaatgtgaactatttgcgtgaaattattggagtggttagtcaagaacctgtactctttagcactactattgccgagaatatttgttatgggcgtggtaatgtaaccatggatgagatcaagaaggcggtaaaagaggcaaatgcttacgagtttatcatgaaattgcctcagaagtttgatacactcgtcggcgagagaggggcgcaactttcaggaggtcaaaaacaaaggatcgctattgctagggctttggtccgtaacccaaaaatccttctcttggatgaggccacttcggctctcgataccgaatcagaggcagaagtacaagccgcccttgataaggctcgagaggggcgtacaacgattgttattgcccatcggttgagtacagtgcggaatgctgatgttattgctggtttcgaagatggggttattgttgaacaaggttctcacagtgagctcatgaaaaaggagggagtatattttaaactcgtgaatatgcaaacctctggtagccagatacaaagcgaagaatttgaattgaatgacgagaaggctgcaacacgaatggcaccaaatggctggaaaagtagactttttcggcatagtacacagaaaaaccttaagaattcccaaatgtgtcaaaagtcacttgatgtagaaaccgatggtcttgaggctaatgtgcctccagtatcttttctgaaagttctgaaacttaacaagacagagtggccatactttgttgtggggaccgtgtgcgccattgccaatgggggactacaaccggccttttccgttattttcagcgaaatcatagcaatctttgggcctggtgatgatgccgttaagcagcaaaaatgcaacattttcagccttatcttcctatttcttggtatcatttcattttttaccttcttcctacaagggtttacttttggaaaggctggcgaaatccttacgcgacgtttacgtagcatggcttttaaagctatgcttcgacaggatatgtcatggtttgatgatcataagaactctaccggcgctttgtctacaaggttagcaactgacgctgcacaagttcaaggagctactgggacccggctggcccttatcgcccaaaatattgctaacttggggactgggatcatcatcagtttcatttatggatggcaacttaccttgctccttcttgcagtggttcctataattgcagtttcgggtattgtagaaatgaaattacttgcgggtaatgccaagcgtgacaaaaaagagttggaggctgctggcaagatagctactgaagctatagaaaatattaggacagttgtgtcactgacacaagaaaggaaattcgagtctatgtacgtggagaaattgtacggcccatatcgtaattcggtgcaaaaagcacatatctacggtataaccttcagcatttcccaggcatttatgtactttagttatgctgggtgtttcaggtttggagcatatctgattgtcaacggacatatgagattcagggatgtgatccttgtattcagcgccatagtttttggtgcagtagctcttggacacgcctcatcctttgcgccagattatgctaaggcaaagctatctgccgctcatttattcatgttatttgagaggcaaccacttattgattcatattcagaagagggcctcaagccagataaatttgaaggtaatattacttttaatgaagtggtgtttaattaccccacaagagcaaatgttcccgtgcttcagggtttgtctttagaagttaagaagggtcaaactctagcactagttggatctagtgggtgcgggaaatccactgttgtgcaattgttggaaagattttacgatcctctagctggtactgtttttgttgacttcggatttcagctgctagacggtcaagaggcaaagaaactcaatgtgcaatggcttagggcccagctgggaatagtgtcacaggaacctattctttttgactgttcgattgccgagaatattgcctatggagataacagccgcgtggtaagtcaagatgaaatcgtgtctgcagccaaagccgctaatattcatccatttattgagactcttccacataagtacgaaactagagtaggcgataagggtactcagctctccggcgggcaaaagcagaggattgctatcgcaagagccctgattagacaaccacaaattctcttattggacgaggctaccagcgctctggatacagaaagtgaaaaagtcgttcaggaagctttggataaggcgcgcgagggaagaacgtgcatcgtgatcgctcatcggctttccaccattcaaaatgcagatctgatcgtagtttttcaaaatgggcgagttaaagaacatggtacccatcaacaacttctagcccagaaggggatttatttttctatggttagtgttcaagcaggaacacagaattta

SEQ ID NO: 200211 - DNA, 3858 bp, Artificial Sequence
  derived and/or modified sequence
atggatttggaagctgcaaaaaacggcaccgcctggagaccgacaagcgcagagggtgacttcgagctggggatttcctcaaaacagaaaagaaaaaaaacaaaaaccgttaaaatgattggggtgctgacgctgttccggtactctgactggcaggacaaattgtttatgagcttagggaccatcatggcgatagctcatggctcaggcctcccactgatgatgattgtttttggtgaaatgacggataagttcgtggacacagccggcaacttctcttttcctgtgaattttagccttagcctgcttaatcctggaaagatcttagaggaagagatgacccgttatgcatactactactcaggcctgggtgccggtgtcttggttgcagcctacattcaggtatcattttggaccctcgccgcaggtagacagattagaaaaataagacagaaattttttcacgcaatactgaggcaggagataggatggttcgatattaatgataccacggaactcaatacacgtctcaccgatgacatttccaaaatcagcgaagggatcggggacaaagtaggcatgttcttccaggcagtggcaaccttctttgcggggttcatcgtcggttttatacgtggatggaagctcaccctggtgatcatggccatctcaccgatactagggctgtctgccgccgtgtgggctaagattctgtctgccttctccgataaggagctcgccgcgtacgctaaggccggcgccgtcgctgaggaagcactgggcgcaattcgaacagtgatagcctttggcggtcaaaacaaggagcttgaacggtaccagaagcacttggagaacgctaaagaaatcggaatcaaaaaggccatcagcgctaacatctctatggggattgcttttttattgatctacgcctcatatgcattagccttctggtacggcagtactcttgtgatatctaaggagtacacgatcggaaacgccatgaccgtatttttcagtattcttatcggtgcattcagcgtaggacaagccgccccttgcatcgacgcctttgcgaatgctcgcggggccgcttacgtgatattcgatatcatcgacaacaaccctaaaatcgacagcttctccgaaaggggccataagccagattcaatcaaaggcaacttggaattcaatgacgttcatttctcctatcccagccgggcaaacgtgaaaattctgaagggactgaacttgaaggtgcaatctgggcagaccgtggcactggtggggtccagtggttgcggtaagagtaccactgtccagctgatccagcgtctctacgatcccgatgaaggaacaatcaatatcgatggtcaggatatacgaaactttaacgttaattacctgagggagattatcggggtggtatcccaagagccagtcctgttcagtacaaccatcgcagaaaatatatgttacggccgcggaaatgttactatggatgagataaagaaagctgttaaagaagctaacgcatatgagttcattatgaaactgccccagaaatttgacaccttggtcggggaaagaggagcgcagctttccggaggacagaagcagcggatagctatagctcgggccttagtaagaaatcccaaaatactcctgttggacgaagctactagcgccctggacacagagtctgaagcggaggttcaagccgctctggacaaggcccgtgaaggacggaccaccattgtgattgcccatcggctgtccacagtgcgtaacgctgatgtgattgcaggcttcgaagatggcgtcatcgttgagcagggctctcacagcgagctgatgaaaaaggaaggggtgtacttcaagctggtcaatatgcagacaagcggatcccagattcagtcagaggaatttgaactgaatgatgaaaaggcagcaactaggatggctccgaatggctggaaaagtaggttgtttaggcatagcacccagaagaatttgaaaaactcgcaaatgtgtcagaagtccctggacgtggaaacagacggcttggaggcgaacgtgcccccggttagctttctgaaggtactgaagttaaacaaaacggaatggccttatttcgttgtcggcaccgtgtgcgcaatcgcaaatggcggtctgcagccggctttctccgttatcttcagcgagattatcgctatcttcgggccgggtgatgacgctgtcaagcaacaaaagtgtaacattttctccctgatcttcctgttcctgggtataatttcattctttacatttttcttacagggattcacgttcgggaaagctggtgagattctcactaggcggctgcgcagcatggcctttaaagccatgctccggcaggacatgtcttggtttgacgatcacaagaactcaaccggcgctctgagtactcgcttggcaaccgacgccgcccaggttcaaggggctaccggtactcgcctggcgctgatcgctcagaacattgcaaatctcggaactgggatcattatatcatttatctatggctggcagcttactttgctcctcctggctgtggtgcccatcatcgcagtgtctggcatagtggagatgaagctgctggccgggaatgccaagagagataagaaggaactggaagctgccggtaagattgcgaccgaggccattgaaaatatcagaactgttgtttcactcacacaggaacgtaaattcgaaagtatgtatgtggaaaagctatatggtccgtatcgtaattccgttcagaaagcgcacatatacggaatcactttcagcatctctcaagcatttatgtactttagctatgcgggatgcttcagattcggggcctatcttatcgtgaatgggcacatgagatttcgggacgtgatcttagtgttttcggctattgtgttcggggctgtggctttgggtcacgcctcatcattcgcgcccgactatgccaaggccaaactctcagccgcacacctgttcatgctgttcgagcggcagccattgattgactcctactctgaagaaggactgaagcctgacaaattcgagggcaatattaccttcaatgaggtcgtgtttaattaccctaccagagctaatgtccccgtcttgcaagggttgtctttggaggtcaagaaaggccagactctggcactggttggaagctcgggatgtgggaaatcgacagtggttcagctgctggagcgattttacgaccctctcgccgggactgtgttcgtggacttcgggttccagctgctggacggccaggaggctaaaaaactgaacgttcagtggctacgcgctcagcttgggatcgtatctcaggagccaatcctttttgattgttcaatagcggaaaacattgcctacggcgacaatagccgggtagtgtcccaggatgagatagtatccgccgccaaagccgccaacatccatccatttattgaaactctaccccacaagtacgagacaagggtaggagacaaaggtacacagctgagcggtgggcagaagcagagaatcgctatagcccgcgcactgattcgccagccacagatcctgctactggacgaagcaaccagtgcactcgacacagagtctgaaaaagtggttcaggaggcactggacaaggcacgtgaggggcgtacttgcattgtgatcgcgcaccgtctgagcacgatccagaatgcagacctgatagtcgtcttccaaaatggcagggttaaggagcatgggactcatcagcagctacttgcacagaaaggcatctatttttctatggtgtccgtgcaggcaggcacgcaaaatctc

SEQ ID NO: 200212 - DNA, 3858 bp, Artificial Sequence
  derived and/or modified sequence
atggacctggaagctgctaagaacggaactgcctggcgccctacatccgccgagggagacttcgaattgggcatttctagtaagcagaagagaaaaaagaccaaaaccgtgaaaatgatcggtgtcctgacactgtttcgctactctgattggcaagacaagctgtttatgtcactgggtactattatggccatcgcccacggcagtggattgcccctcatgatgattgtgttcggtgagatgaccgataagttcgtagatactgctggcaacttcagctttcctgtaaacttttcactgtcattgctgaatcccggaaagatcctggaagaggagatgacacgttacgcttactactatagtggccttggtgctggagtgctggtggctgcttatattcaggtctctttttggactctggcagccggacgtcagattcgtaagattcgtcagaagttttttcatgccattctgagacaggagatcggctggtttgatataaatgacactactgagctgaacaccaggcttaccgacgacatctccaaaattagcgagggaattggagataaggtgggaatgtttttccaggctgtggctacattcttcgccggctttatcgtgggatttatccgcggctggaagctgactctggtaatcatggctatcagccctatcctgggtctcagcgcagccgtgtgggctaagatcctttccgcttttagtgacaaggagctggccgcctacgcaaaagccggcgccgttgcagaagaggcactgggtgccattcgtaccgtgatcgcctttggtggccaaaataaggaactcgagaggtaccaaaaacacctggagaacgccaaggaaataggtattaaaaaggccatcagtgcaaatatctccatgggtatcgctttcttgctgatttacgcttcatatgcccttgctttctggtatggctccacactggtgattagcaaagagtacactatcggtaacgctatgacagtgttcttctccatcctcattggagccttttccgtcggtcaggcagctccctgcatcgatgcctttgctaacgcccgcggtgctgcttatgtaatttttgatataattgacaacaatccaaagatcgactccttctctgagcgtggtcacaaacctgattccattaaaggaaacctggagttcaacgatgtacacttctcctatccatccagggcaaacgtgaaaattctgaaaggtctgaacctgaaagtccagtccggtcagaccgtggccctcgtcggttcaagtggttgcggtaagagtacaactgtgcaactgattcagcgcctctacgaccctgacgagggcactatcaacatagatggccaggatatccgtaatttcaatgtgaactacctgagagagattataggagtcgtctcccaggagcctgtcctgttttctacaacaattgctgagaacatatgctacggccgcggcaacgtcactatggatgaaattaaaaaggccgtcaaggaggcaaacgcctacgaattcatcatgaagttgcctcagaagttcgatacccttgtgggcgaacgcggcgctcagcttagtggtggtcaaaagcaacgcatcgctattgcccgtgccctggtgagaaatcctaagatactgctgctggacgaagctacttctgcccttgacacagaatcagaggctgaggtgcaagccgctctggacaaggcaagggagggtcgcacaactatcgtgatcgcccaccgcctcagtactgtgaggaatgcagacgttatagccggtttcgaagacggagtaattgtggagcagggtagccattccgagctgatgaaaaaagaaggcgtatactttaaattggttaacatgcaaacctctggtagccaaatccaatcagaggagttcgagctcaacgatgaaaaagctgccacccgcatggcacctaacggctggaaatccaggcttttccgtcactccacacagaagaatcttaagaatagtcagatgtgtcagaagagcctggacgtcgaaaccgatggcctggaagcaaatgttccaccagtttccttcctgaaggtcctcaaactcaacaagaccgagtggccctacttcgtggtaggtacagtgtgtgccatcgccaatggaggattgcaacccgccttcagtgttatcttctccgagatcattgctattttcggccctggtgacgacgcagtgaaacaacaaaagtgcaatatcttcagcttgattttccttttcctcggtattatcagcttcttcacattctttctgcaaggtttcacttttggaaaggcaggagaaattctgaccaggcgcctgaggagcatggcattcaaagcaatgctgcgccaggatatgagttggttcgatgatcacaagaattccaccggtgctctcagtacacgcttggccaccgacgccgctcaagtgcagggagctacaggcacaagactcgcactgatcgcccaaaacattgccaatctgggtaccggtattataatctccttcatctatggctggcagcttaccttgctgctgctcgctgtggtacccatcattgccgtgtctggcattgtcgagatgaaacttctggctggaaacgctaagcgtgacaaaaaggagctcgaggccgcaggcaagattgctacagaagctatcgagaacatccgcaccgttgtgtccttgacccaggaacgtaagttcgagtccatgtacgtggagaaattgtacggcccttacagaaactcagtgcaaaaggctcatatttacggcattacattcagtatctctcaagctttcatgtatttctcctatgccggctgcttcagattcggagcttatctgattgttaacggtcacatgcgctttcgtgacgtaatcctggtattttccgccattgttttcggagctgtcgcactgggacacgcctcctctttcgcaccagactacgccaaggctaagcttagtgccgcccacctgttcatgctcttcgagagacagccactgatcgattcttacagtgaagaaggattgaaaccagataagtttgagggcaacatcacattcaacgaggttgtgtttaattacccaaccagagcaaatgtccctgtattgcagggcctcagcctggaggtgaaaaagggccagaccctcgccctggtcggttcctccggatgcggcaagtccactgtcgtccaattgcttgagcgcttttacgatcctctcgcaggtaccgtcttcgtcgactttggatttcagttgttggacggccaggaggccaagaagctgaacgtacaatggctgagagcccaactcggcatcgtttcccaggaacccatattgtttgactgctcaatcgctgagaacatcgcttacggcgataatagccgtgtggtgagtcaggatgaaatcgtctcagctgctaaggctgctaatatccatccatttatcgaaaccctgccccataagtatgagactcgtgtgggtgacaaaggtactcagctgtccggaggacaaaaacaacgtatcgccattgccagggcacttatccgtcagccccagatcctgttgcttgacgaagcaacttctgcacttgacactgaatcagaaaaggtggtgcaggaggctttggacaaggcacgcgaaggccgtacctgtatcgtgatcgcccaccgtctttccacaatccaaaacgctgacttgatcgtagtatttcaaaatggcagagtcaaagaacatggcactcatcagcagcttctggcacagaagggtatatacttctccatggtgtctgtccaagctggaacacaaaacctg

SEQ ID NO: 200213 - DNA, 3858 bp, Artificial Sequence
  derived and/or modified sequence
atggacctggaggccgccaagaatggcaccgcatggcgacctacgtccgctgagggagattttgagctcggaatttcatcaaagcaaaaacggaaaaagaccaaaaccgtgaagatgatcggagtcctgaccctcttcaggtactcggactggcaagataagctgtttatgagcctcggcactatcatggcgatcgcacatggaagcgggctgccgctgatgatgatcgtgtttggggaaatgactgacaaatttgtggataccgcggggaacttctcattccctgtcaatttctcgctgtcgctgctgaatccaggcaagatcctggaggaagagatgacgcgctacgcgtactactattccggtctgggagcgggtgtgctggtggcggcctacatccaggtgtccttctggaccctcgcggcgggccgacagatcagaaagatccgtcagaagttcttccacgccattctgagacaggaaatcggatggtttgacatcaatgacaccaccgaactcaacacccggctgaccgacgacatctccaaaatctcagaaggcatcggtgacaaggtgggaatgttcttccaggccgtggccaccttcttcgcaggattcatcgtgggattcatccgcgggtggaagctgaccctggtgataatggctatctccccgattctgggattgtcggcagcagtgtgggcaaagattctgtccgccttttccgacaaggagctggcggcttacgctaaagcaggagctgttgccgaggaagcactgggggccatccgcaccgtcatcgcgttcgggggacagaacaaggaactcgaaagatatcaaaaacacctggagaacgcaaaggaaattggaattaagaaagctatcagcgcaaacatctcaatgggcatcgctttccttctgatctatgcttcgtacgctctggcgttctggtacggatcgacgctcgtgatcagcaaagaatacactatcggtaatgcaatgaccgtgttcttttccatccttataggcgctttctcggtcggccaggccgctccctgcatcgacgcgtttgctaacgccagaggcgcggcgtacgtgatctttgacatcatcgataacaacccgaaaatcgactcgttttcggagcgcggacacaaaccagactcgatcaagggaaatctcgagtttaatgatgtccacttctcctacccttcaagagctaatgtgaagatcctcaagggactgaacctgaaagtgcagtcaggacagaccgtggcgctcgtgggctcgtcagggtgtggaaagtcgactacggtgcagcttatccagcgcttgtacgaccccgatgagggaacgatcaacatcgacggacaggacattaggaactttaacgtcaattacctgcgggagatcatcggggtggtgtcccaagagccggtgctgttttcaactaccatcgcggaaaacatttgctacggtcgcggaaatgtgactatggatgaaatcaaaaaggccgtcaaggaagcaaatgcttacgaattcattatgaaactgccgcagaaattcgacactctcgttggcgaacgcggagcccagctgtccggcggccaaaaacagcggattgcgatcgctagggcgttggtgaggaaccctaaaatcctgctgctcgacgaggccacttcagctctggacactgagagcgaagcagaggtgcaggcggctcttgacaaagctcgcgaaggacggactaccatcgtaatcgctcaccgcctgagcaccgtgaggaacgcggacgtgatcgctggcttcgaagatggagtgatcgtggagcaaggatcgcactcggagctcatgaagaaagagggagtctactttaaacttgtgaatatgcaaacttccggatcacagattcagagcgaagagttcgagctgaacgatgaaaaagctgccaccaggatggcgccgaatggttggaaatcccgcctgttccggcattccacccagaagaacctcaagaactctcagatgtgccagaagtcgctggacgtggagactgacggattggaggccaatgtgccgcccgtgagcttccttaaggtgttgaaattgaataagacggaatggccttacttcgtggtgggaactgtgtgcgccatagccaacggaggattgcagccggcctttagcgtcatcttcagcgaaatcatcgccatcttcggaccaggggacgatgccgtcaagcaacaaaagtgtaacattttctcactgatcttcctgttcctggggatcatttcgttcttcaccttcttcttgcagggattcactttcggaaaggccggagagatcctgactcggcgcctgcgctcgatggcctttaaggccatgttgaggcaggacatgtcgtggttcgatgaccataagaactccactggagctctgtccacccggctcgcaaccgacgccgcccaagtgcaaggcgcaaccgggacccgcctcgctctgattgcccaaaacatcgcgaacctgggaaccggaatcatcatctcctttatctacggctggcaactcactttgctgcttctggccgtggtcccaatcattgcggtgtctggaatcgtcgaaatgaaactgctggccgggaacgccaagcgggataagaaagaactggaggcagcgggcaagatcgccaccgaggcaatcgaaaacatccggactgtggtgtcactgacccaagaacggaagttcgaatcgatgtacgtggagaagctctacggtccctacagaaactcagtgcaaaaggcgcatatctacggcatcaccttttccatctcacaggctttcatgtacttctcttacgctggatgcttcagattcggtgcgtacctgatcgtgaatggacacatgcgctttcgggacgtgatcctcgtgttctccgccatcgtctttggagctgtggctctgggacatgcatcgagcttcgccccagactacgccaaggcgaagttgtcggccgcacatctcttcatgctcttcgagagacagccgttgatcgacagctatagcgaggaaggtctgaagcctgataagttcgaaggcaacatcacgttcaacgaagtggttttcaattacccgaccagagctaacgtgccagtgctccagggcctgagccttgaggtgaagaagggacagactctggcgcttgtgggatccagcggatgtggaaaatctacggtggtgcagctcctggaacgcttctacgatccgcttgccggcaccgtctttgtggacttcggctttcagttgctcgatggacaagaggcgaagaaactgaacgtgcagtggctgcgcgcccaactgggaattgtgagccaggagcctatcctgtttgactgctccatcgctgaaaacatagcgtatggggacaactcgcgggtggtatctcaggacgagattgttagcgcagcgaaggcagccaacatccaccccttcatcgagactctgccgcataagtatgaaacccgcgtgggagataaaggcactcagctgtccggagggcagaaacagaggatcgcgattgctcgcgccctgattagacagccacagatcctgctcctcgacgaggcgacttcggcgctggatacggagagcgaaaaggtggttcaggaggccctcgataaggcccgggaaggccgcacgtgcatcgtgatcgctcaccggctgtcgaccatccagaatgctgacctgatcgtggtctttcagaacggaagggtcaaggagcacggtacgcatcagcagcttctggcccaaaagggaatttacttttcgatggtgtccgtgcaggcaggcacccagaatctt

SEQ ID NO: 200214 - DNA, 3858 bp, Artificial Sequence
  derived and/or modified sequence
atggaccttgaggccgcgaagaacggaactgcctggcggccaacctcggcggaaggtgacttcgaactggggatttcgtcgaagcaaaagcgcaagaaaaccaagactgtgaaaatgattggagtccttaccctgtttcgctattcggactggcaagacaagctgttcatgtcactgggaaccatcatggcaatcgcgcacggcagcggtctgccgctgatgatgattgtgttcggagagatgaccgacaaatttgttgataccgcgggaaatttctctttccccgtcaacttctcgctctcgttgctgaaccccggaaagattctggaagaagaaatgactaggtacgcgtactactacagcggactgggagcgggtgtcttggtcgccgcatacatccaagtgtcattctggactttggcagcaggccggcagatcagaaagattagacaaaagttctttcatgctatcctgagacaagagatcggttggttcgacatcaacgacactaccgaactgaatactcgcctcaccgacgacatcagcaagatttccgaaggaatcggagacaaggtgggaatgttttttcaagcagtcgcaaccttcttcgcgggattcatcgtgggtttcatccggggctggaagctgaccctcgtgatcatggctatttccccgattctgggcctcagcgccgccgtgtgggccaagattttgtccgcatttagcgacaaagaattggcggcatacgcgaaggccggggccgtggctgaagaagcgctgggagccatcagaaccgtgatcgcattcggagggcaaaacaaggagctcgaaaggtaccagaaacatctggagaacgccaaagaaatcggaatcaagaaagctatcagcgcgaacatctcaatgggaatcgcgttcttgctcatctatgcctcctacgccctcgccttctggtacggatctaccctggttattagcaaggaatacacgatcggcaacgccatgactgtctttttcagcatccttattggagcattttccgtcggacaggcagcgccgtgcatcgacgctttcgcaaatgccaggggggcggcctacgtgatattcgacattatcgacaacaaccctaagatcgattccttttcggagcggggccataagccagactcaattaagggaaatctcgagttcaatgacgtgcacttctcgtacccttcccgagctaatgtgaagatcctcaaagggcttaatctcaaagtgcagtcaggacaaactgtcgctctcgtcggctcctccggctgcggcaaatccaccactgtgcagcttatccagcgcctgtacgatccggacgagggcactatcaacatagacggacaagatatcagaaatttcaatgtgaattatctgagagaaatcatcggggtggtgtcgcaggaaccggtgctgttctccacgacgatcgctgagaacatctgctacggccgagggaacgtgactatggatgagattaagaaggccgtgaaggaggccaacgcctacgagtttatcatgaagctcccgcagaagttcgataccctggtcggtgaacgcggggcgcagctttccggcggacaaaaacagcggattgcaatcgcgcgcgcgctggtccggaatcccaagattctcctgctggatgaggccacctccgcacttgacactgagagcgaagctgaagtgcaggctgcactggataaggcccgcgaggggcgcaccacgatcgtgattgcccataggctctcaacggtgagaaatgcggatgttatcgctggattcgaggacggggtgatcgtggagcagggatcacacagcgaattgatgaagaaggaaggcgtgtatttcaagctcgtcaacatgcagacttcaggctcccagatccagtccgaggagttcgagctgaatgacgagaaggccgcgactcgtatggccccaaatgggtggaagagcagactgttccgccattccactcaaaagaatcttaagaactcccagatgtgccagaagagcctcgacgtggaaaccgatggactggaagccaacgtgccgccggtgtcttttttgaaggtgctgaagctcaacaagactgaatggccgtacttcgtcgtcggcacggtgtgtgcgattgcaaacggagggctccagcctgcattctcagtgatcttctcggaaatcatagcgattttcggacccggagacgatgcagtcaagcaacagaaatgcaatatcttctcgctcatcttcctgtttctgggaatcatctcctttttcaccttcttcttgcaaggatttactttcgggaaggctggagagatcctgaccagacgcctcagaagcatggcgttcaaggcaatgctgcggcaggatatgtcttggttcgatgaccataagaattcgaccggagccctgtcgacgcgactggcaaccgatgccgcgcaggtgcaaggagctaccggaacccggctcgcgctgatcgcccagaacattgcgaatctgggaaccggcatcatcatctccttcatctacggatggcagctgaccctgctgctgttggccgtggtccccattattgcagtctcaggaatcgtggagatgaaactcctggctggcaacgcaaaacgggacaagaaggagcttgaagcagcgggaaagatcgcgactgaggctatcgagaatatccgcactgtggtgtcactgacccaggaaagaaagttcgaatccatgtacgtcgagaaactctatggaccgtaccgcaactcggtccagaaggcgcatatctacggcatcaccttttcaatcagccaggccttcatgtacttctcatacgcgggatgttttagattcggcgcctacctcatcgtgaacggacacatgagatttagagatgtcatcctggtgttctccgccatcgtgttcggagcggtcgcccttggacacgcctcatcctttgcgccggactacgcgaaggctaaactgtcagcagcccatctctttatgctgttcgaaagacagccgctcatcgattcgtactcagaggaaggtctgaagccagacaagttcgaaggaaacattacttttaacgaggtcgtgttcaattacccgaccagagcgaacgtcccagtgcttcagggcctctctctggaagtgaagaagggtcaaacgcttgctctggtcggatcatcgggctgcggaaagtccaccgtggtgcaactgctggagcgcttctacgatccattggcaggaactgtgttcgtggacttcggctttcagcttttggacgggcaggaggcgaagaagctcaatgtgcagtggctgcgggcccagttgggcatcgtctcgcaagaacccatcctgttcgactgctcgattgccgaaaacatcgcgtacggcgacaattcgagggtcgtgtcacaggacgaaatcgtgtccgccgccaaggcagccaacatccacccgtttatcgaaacgctgcctcacaagtacgaaactcgcgttggagacaaaggtactcagctgagcggaggccaaaagcagcggatcgccatagcccgcgctctcatccgccaaccacagatcttgttgctggacgaggccacttccgcattggacaccgagtccgagaaggtggtgcaagaagccttggataaggcgagagaagggcggacttgcatcgttatcgcgcacaggctttcgactatccagaacgcagatctgattgtggtgtttcagaatggacgggtcaaggaacacggaactcatcagcagctcctggcacaaaagggaatttacttctcgatggtgagcgtgcaggccgggactcaaaacctg

SEQ ID NO: 200215 - DNA, 3858 bp, Artificial Sequence
  derived and/or modified sequence
atggatctggaggcagccaaaaacggcaccgcctggagacccaccagtgcagaaggggattttgagctgggaatcagtagcaaacagaagaggaagaagaccaaaactgtcaagatgattggggtgctgaccctgtttcggtattctgactggcaggacaaactttttatgtctctcggtacaatcatggccatcgcccatggcagcggcctgcctttgatgatgattgtgtttggcgaaatgactgacaaatttgttgacaccgctggaaacttctcttttcctgtgaatttctcactgtcattgctgaatcccggcaagatcctcgaagaggaaatgactcggtacgcctattactatagcgggctgggcgcaggcgtgcttgtggccgcatatatccaggtgtcattctggacactggccgccggccgacagattcggaagattaggcaaaagtttttccacgcaatcctcagacaagaaatcgggtggtttgatatcaatgataccaccgagctgaacactcggctgacagatgatatttctaagatttctgagggcatcggagacaaggtcgggatgtttttccaggccgtcgctaccttttttgctggattcatcgtcggctttatccgcggctggaagctgacgttggtgatcatggcgattagccctatcctcggcctgtccgccgccgtttgggcaaagattctgagtgcattttccgataaagaactcgccgcttatgccaaggctggggctgtcgccgaagaagcacttggagcaataagaacagtgattgcattcggtggtcaaaataaggagctggaacggtaccagaagcacctcgaaaacgccaaggagatcggcatcaaaaaggccatatctgcaaatattagcatggggatcgccttcctgctgatttacgcttcctacgcactggccttttggtatggaagcacactggtgatctccaaggaatatacgattggtaacgccatgaccgtcttctttagcatactgattggcgcgttctctgtaggacaggccgcgccatgcattgatgcattcgccaacgcccggggggcagcatacgttatattcgacatcatcgacaacaacccgaagatcgacagctttagtgagaggggtcacaaaccagattctataaaaggtaatcttgagtttaacgatgttcatttcagttaccccagccgagcgaacgtgaaaattcttaaagggcttaatctgaaggtccaatcaggacagacggtggcccttgtcgggtcctcaggatgcggcaaatctactaccgtccagcttatacagaggctctacgatcctgatgaaggtacgattaatatagatggccaggacattaggaattttaatgtgaattacctgagggaaatcatcggagtggtgtctcaagagcccgtgcttttctccaccactatcgcggagaacatttgttatgggagaggcaacgttaccatggatgagataaaaaaggccgtcaaggaagctaatgcgtatgagttcataatgaagctcccacagaagtttgatacactggtcggagagcgaggcgcacagctttcaggtggacagaaacagaggattgccatcgcacgagcgctggtcaggaaccccaaaattctgcttctggacgaagccacgagtgctctggacactgagtccgaagcagaggtgcaggccgccctggataaggctcgagagggaagaacgactatcgtgatagctcaccgcctgtccaccgtcaggaacgcagacgtgattgctgggtttgaggacggagtcatcgtggaacaggggagtcattcagagctgatgaaaaaggagggagtgtacttcaaactcgtcaatatgcagacaagcggcagccagatccagtctgaagagtttgagttgaatgatgagaaagcggctacacggatggcccccaacgggtggaagagccggcttttccgccattctactcagaaaaacctgaagaattcacaaatgtgccagaagtctttggacgtggagaccgacggcttggaagctaacgttcctccagtctcctttctgaaggtgctgaagctgaataaaactgaatggccttactttgtggtaggcaccgtctgcgcgatcgccaacggcgggcttcagcccgctttctctgttatatttagcgaaatcatcgctatctttgggcctggcgatgatgccgttaaacagcagaaatgtaatatattttccctgatcttcctgttcctgggaattatttccttctttacattctttttgcagggattcaccttcggtaaggcaggcgagatccttaccaggcggttgcgaagcatggcattcaaggctatgctgcggcaagatatgagctggttcgatgaccataagaactcaacaggggcactgagcactcgcttggctacagacgcagcccaggtgcaaggcgctactggaactaggcttgcgctgattgcacagaatatcgccaatctcggaaccggcattattatcagcttcatctacgggtggcagctcacgctgttgcttctggcagttgttccaataattgccgtctctggaatcgtggagatgaaactcctggcaggtaatgctaaaagggataaaaaagagctggaagccgcaggaaagattgcaacagaggccatagaaaacattcggaccgttgtgtctctgacccaggagcggaagttcgagagtatgtacgtggaaaaattgtacggaccgtacagaaatagcgtgcagaaggcccatatttatgggataacgttttccatctctcaggccttcatgtacttcagttacgccggttgcttcagattcggcgcctacctcattgtaaacggtcacatgaggtttcgggacgtgattttggtgttcagtgcaatcgtgtttggcgcagtggcactgggacacgcttcctcttttgcacctgactacgcgaaggccaaactgagcgccgctcacctgttcatgctcttcgagcggcagccacttatagactcctacagcgaggagggactgaagcccgataagttcgaaggaaatattacgttcaacgaagtcgtgttcaattacccaaccagagcaaatgtgcccgtgctgcaggggctctctctggaagttaagaaaggacagacattggccctggtgggttcttccggatgtggtaaaagtaccgttgtacagttgctcgaaaggttttacgatcccctggccggcacggtgtttgttgattttggctttcagctgctcgatggacaagaggccaaaaagctgaatgtgcagtggttgcgggctcagctgggaatagtgtcacaggagcctatcttgttcgactgctctatagccgaaaatattgcctatggggacaacagccgcgttgtgagtcaagatgagattgttagcgcggccaaagccgctaacatccatccttttatcgaaaccctgccccacaagtacgagaccagggtaggagacaagggtacccagctctccggcgggcagaagcagcggatcgctatcgcaagagcactgattaggcagccccagattttgctgctggacgaggccacctctgcgttggatactgagtctgaaaaagttgttcaggaagccttggacaaagcacgggaggggcggacctgtattgtgattgctcacagactctccactattcaaaacgcagacctgattgtagttttccaaaacgggagggtcaaagagcacggtacccaccaacagctgctcgcgcaaaaaggcatttacttttctatggttagcgtgcaagccggtactcagaacttg

SEQ ID NO: 200216 - DNA, 3858 bp, Artificial Sequence
  derived and/or modified sequence
atggatctggaggcagcaaagaacgggaccgcatggaggccaacctcagcagaaggtgattttgaacttgggatttcatccaagcagaagagaaaaaagaccaaaaccgtcaagatgatcggagtgctcaccctgttccgatactcggattggcaagacaagctgttcatgtcgctcggcacgatcatggctatagcacacgggagcggactgccacttatgatgatagtgtttggcgagatgactgataagtttgtcgacactgcaggcaactttagctttccagtcaatttctctcttagcctgcttaatcccggaaaaatccttgaggaagagatgactaggtacgcatactactactcaggcctcggcgcaggagtactggtagctgcttacatccaagtgtctttttggactctggcggccggacgccaaatccggaagatccggcaaaagttttttcatgctattctccgtcaggaaatagggtggtttgatatcaacgatacgaccgagcttaacaccagattgacggatgatatcagcaaaatctcggaaggaattggggataaggtcggaatgtttttccaagctgtcgcaaccttttttgcaggattcatagtgggatttatcaggggatggaagttgaccctcgtcatcatggccatttcaccaatactgggactttccgccgcggtttgggcaaagatactttctgccttctccgacaaggagctggcagcctacgcaaaggcgggtgccgtggcagaagaagcccttggtgctattcgcacggtgattgcctttgggggtcaaaacaaagaacttgaacgctaccaaaagcatcttgaaaacgcaaaggaaattggaatcaagaaggctatttccgcaaatatctcaatgggaatagccttccttcttatctacgcatcctacgctctggcgttttggtatggttcgaccctggtgatctcgaaagagtacactattggcaacgcaatgaccgtctttttctccattctgattggagcctttagcgtcggccaagccgcgccctgcattgacgcatttgcaaacgcaagaggagccgcctacgtgattttcgatatcattgacaataacccaaaaatcgattcgttttcagaaagaggtcataaacctgattccatcaaggggaacttggagtttaatgacgtgcatttctcatatccatcgcgggcaaacgtgaaaatccttaaaggccttaatctgaaggtccaatccgggcagactgtggccctcgtgggaagctccggctgcggcaagagcactaccgtgcagctgattcagcgtctctatgatccggacgaagggacgataaacatcgatggccaggatattagaaactttaacgtcaattacctgcgtgagattattggagtggtgtcccaggaaccggtgctgttttcgaccaccattgcggaaaacatttgttacggacgggggaacgtgactatggatgagattaagaaggcggttaaagaggccaatgcttacgagttcattatgaagctgccacagaaattcgacaccctggtgggcgaaagaggggcccaactgagtggaggccagaagcaacggatcgccattgcaagggcactggtgcggaacccaaagatactgttgctcgacgaagcaacctctgcactggatactgaatcggaagcagaggttcaggccgccctcgacaaggcacgtgaaggacgcactactattgtgattgcacaccgactgtccaccgtgagaaacgcagatgtgattgcaggctttgaagatggtgttattgtcgagcagggatcacattcggaactcatgaagaaagagggtgtctactttaagctcgtcaatatgcaaacctcgggatcacagatacaatcggaagaatttgagctgaacgacgaaaaagccgccacccgtatggcgcctaatgggtggaagtccagactgtttcgccactccactcaaaagaaccttaagaattcgcagatgtgccaaaagtcgctggacgtggagacggatggtctggaagcaaacgtccccccagtgtcgtttctgaaagtgcttaagctgaacaaaactgaatggccctactttgtcgtcgggactgtgtgtgccatcgcaaacggaggattgcaacccgcattctcggtgatctttagcgagattatcgccatattcgggccaggagatgatgcagtgaagcaacagaaatgtaatatcttctcactcattttcctctttttgggaattatctcgttctttaccttcttcctgcaaggattcaccttcggtaaagccggcgaaatccttactcgacgcctgaggtcgatggcctttaaggccatgcttcgtcaggatatgagctggtttgatgaccataagaattctactggagcgctttccaccaggctggcaacggatgcggcccaagtccaaggagcaacgggaaccagactggcacttattgcacagaatatagctaacctgggcaccggaatcataatcagtttcatttacggctggcaacttaccctgctcctgttggcggtggtgcctatcattgcagtgtcaggtatcgttgaaatgaagttgcttgcggggaatgcaaaaagagacaagaaagagctcgaagcggccggcaagattgcaactgaagcaatcgagaacatccggaccgtggtgtctctgactcaggaacggaagtttgagtcgatgtatgtggagaagctgtacggaccataccggaactcggtccaaaaggcacatatctacggtatcactttttcaattagccaagcatttatgtacttttcttacgcagggtgtttcaggttcggtgcataccttattgtgaacgggcacatgaggtttcgggatgtgatccttgtgttcagcgcaattgtgttcggagcagtggcgctgggccatgcatcatcatttgcacctgattacgcaaaagccaagctgtcggctgcacaccttttcatgctgttcgaacgccaacctcttattgactcctattcggaggaggggctgaaacccgacaaattcgagggcaatatcacttttaacgaagtggtgtttaactacccaaccagagcgaatgtgccagtgcttcagggtctttccttggaggtgaagaagggtcagactctggccctggtcggatcgagcggttgtggtaagagcaccgtggttcagctgctcgaacggttttacgatcctctcgccggaacggtctttgtggattttggatttcaactcctcgatggacaagaagctaagaagctcaatgtacaatggctccgggcacaattgggaattgtttcacaggagcctattctgttcgactgttcaattgctgagaacattgcttacggagacaactccagggtcgtctcccaggatgagatcgtcagcgcggcaaaggcggccaatattcatccgttcatcgaaactctcccacacaagtacgaaactagggtcggagataagggcactcaactctccggaggacagaagcagcggattgccatcgccagggcgctgattcgacaacctcaaatacttctgcttgacgaggcaacctcagcacttgataccgaatcggaaaaagtggtgcaagaagcactcgataaggcccgggagggtagaacttgcattgtgatagcgcatcgtctttcgactattcagaacgcagatctgatcgtggtatttcagaacggccgggtgaaagagcacggcactcatcagcaactgcttgcgcagaaaggtatttacttctcgatggtcagtgtgcaggcaggtacccaaaatctc

SEQ ID NO: 200217 - DNA, 3858 bp, Artificial Sequence
  derived and/or modified sequence
atggacctcgaagccgccaagaatgggacggcatggcgtcctacttccgcagaaggcgattttgagctagggatctcctctaaacagaaacgcaaaaaaaccaagacggttaaaatgattggcgtattgaccttattccgatatagtgattggcaggataaactttttatgtctctggggaccattatggccatcgcccatggttctggtctacccctgatgatgattgttttcggagagatgacagacaaattcgtggacacggcgggaaatttcagctttcctgtcaacttctctttgtccttgctaaacccaggcaaaatcttagaggaagaaatgaccagatatgcctactactattctggattgggggccggggtccttgttgcggcctatatccaggtatcattttggacacttgccgccggccgacagatccgcaagatccggcagaaattttttcatgccatcctgaggcaggaaataggctggtttgacatcaatgataccacagaattaaatacacgcttgaccgatgacatctctaagatatcagagggaattggagacaaggtggggatgttttttcaagcagttgcaacattcttcgccggctttatcgttggtttcatccgtggttggaaactcactctggtcatcatggctatttcacccattctcggcctgtccgccgccgtgtgggccaaaatcctttctgcattcagcgataaagaactggctgcttacgccaaagccggcgcagtggctgaggaggctctcggggccattcgaaccgtgatagcatttggcgggcagaataaggaattggagaggtaccagaagcacctggagaatgcaaaggaaataggtatcaagaaagccatttccgctaacatttcgatgggcattgccttcctgcttatttatgcatcatacgccctcgctttttggtatggcagcactcttgtgatatcaaaggagtacacaatcggcaacgccatgacagtctttttttctatactgataggtgctttttccgtaggtcaggcagcaccgtgcatcgacgcattcgcaaacgcaaggggagcagcctatgtaatttttgatataattgataacaacccgaaaatcgattcctttagcgaaagaggtcacaaacccgattctataaagggtaacctagagtttaacgacgtgcatttttcataccccagcagagcgaacgtcaagatactcaagggcttaaaccttaaagtccagtcaggacagaccgtagccctggtaggcagttccggctgcggaaagagcacaactgtccagttgattcaaagactgtatgacccagatgagggtacaattaacattgatgggcaggacatccgcaactttaatgtgaattatctgcgcgaaatcataggagttgtgagccaagagccagtattgtttagcactacgatcgccgaaaacatctgttatgggagaggaaatgtgacaatggatgagatcaagaaggcggtcaaagaggccaacgcttacgaattcataatgaagttgcctcagaagttcgacacccttgttggggagcggggtgctcagttgagtggaggccaaaagcaaagaatagccatagccagagccctggtgcggaatcccaaaatcctactcctggacgaagcgactagtgctctggacacagaaagtgaggcagaagtccaggccgcgctagataaggcaagagaaggccgcacaaccatcgtgatagcccacaggttgtccaccgtgcgcaacgcggacgtgatcgctgggttcgaggacggcgttattgtcgaacagggtagccactctgagcttatgaagaaggaaggagtctatttcaagctcgtgaacatgcaaacatctggaagccagatacagtcggaagagtttgagctgaatgacgaaaaagcggctaccaggatggccccgaatggttggaagtcccggctcttcagacacagcactcaaaagaatcttaagaattcacagatgtgccagaagagtctagacgtggagacggacgggctggaagctaatgttcccccggtctcttttctcaaggtactgaagctcaacaaaacagaatggccatattttgtcgtcggtacagtttgcgctatagccaacgggggcttgcagccagccttctccgtcatctttagtgagataatcgctattttcggaccaggggatgacgccgtgaaacagcagaaatgtaatattttctcactgatctttctcttccttggaataatttccttctttacctttttcctacagggtttcaccttcgggaaggcaggggagattctgaccagaagactacggtccatggccttcaaggccatgctgaggcaggacatgagctggttcgacgaccacaaaaattcgacgggcgcgctcagtacacgattagccacagatgcagcacaagtacagggagcaacaggcacacgactcgctttgatcgcacaaaacatcgccaacctcggcacggggatcatcataagcttcatatacggatggcagctgacacttctgctcctggctgtggtgccaatcatcgcagtttccggcattgttgagatgaagctgctggccggaaacgccaaacgggataagaaggaattggaagcagcaggaaagattgccacagaggctattgagaatatcagaactgtcgtctcgttgacacaagagcggaagtttgagagtatgtacgtggaaaagttgtatggtccttatcgaaatagcgttcagaaagctcacatatacggcatcacattttctatctctcaggcgttcatgtatttcagttatgctggctgcttcagattcggcgcttacctcattgtaaacgggcacatgcggttcagggacgtgattctggtgttttctgctattgtgttcggtgccgtcgccctgggtcacgcctcatcattcgcccccgactacgcaaaggcaaagctgtcggccgcacatctgttcatgttatttgagagacagccactgatcgactcttactctgaggagggcctcaaaccagataagtttgagggtaacattacttttaatgaggtggtatttaactaccccacacgtgcaaacgtgcccgtcttacagggtctctcactggaagtcaaaaagggacagactcttgcccttgtgggtagctcaggctgtggcaagagtaccgtagttcagctgctagagcggttttacgacccgctggcgggaactgtcttcgtcgatttcgggttccaactcttagatggccaagaagcaaagaagctcaatgtgcagtggctgcgagcccagctggggatagtatctcaggaacctatcttgttcgattgtagcattgctgaaaacatcgcttacggcgacaattcaagggtggtatctcaggacgagatcgtgtccgccgccaaggctgcaaacatacacccttttatcgagaccctgccgcacaaatacgagactcgtgtgggcgataagggaacgcagctttctggtgggcagaagcagcgcattgcaatagcccgggccttgatccgacaacctcagatcctcctgttggatgaggcaacgtcagctctagatacggagagcgaaaaagtggttcaggaggccctagataaagcccgcgagggacgcacatgcatcgttatcgcccatcgattaagcactatccagaacgctgatctcatcgtcgtgttccaaaatggacgcgtcaaggagcacgggacacaccagcagttgcttgcacagaaaggcatctacttcagcatggtgtcagtgcaggcagggacacagaacctc

SEQ ID NO: 200218 - DNA, 3858 bp, Artificial Sequence
  derived and/or modified sequence
atggatctcgaggcggccaagaatggaacggcttggaggccgacttccgccgaaggggactttgagctaggcatctctagcaagcaaaaacgcaaaaagactaagaccgttaaaatgataggggtgctcacactgttccgatactccgattggcaggacaaactgttcatgtccctggggaccattatggccatcgcccacggttcagggctgccgctcatgatgattgtattcggggagatgaccgataaatttgtggacacggcaggaaacttttcgttccctgtcaactttagcctttctctgctgaatccagggaaaattctcgaggaggagatgacgcggtacgcttattactatagcgggctgggcgctggcgtccttgttgcggcctacattcaggtgtccttctggactctagcagccggtaggcagattcgcaagatccgccagaagttcttccatgcaatcttgcgacaggagataggatggttcgacataaacgacaccaccgagctgaatacacgtctaacagacgacatctccaagatttctgaaggcatcggcgataaagtggggatgttctttcaggccgtggcaacctttttcgctgggtttatcgtgggcttcatcagggggtggaagctcaccctggtaattatggcaatctcaccaatccttgggttgtccgctgccgtgtgggccaaaatcctctcagcattctctgacaaggagctggccgcctacgcaaaagccggcgcggttgccgaggaagcccttggagcgattcgcaccgtgattgccttcggtggccaaaataaggagttggaaaggtaccagaagcatctggaaaacgcaaaggaaatcggaatcaagaaggccatctctgccaacatcagtatgggcattgcttttctactgatatacgcctcatacgcactggctttctggtacgggagtacactggtgatctctaaggaatacactataggcaatgcaatgacggtctttttttccatccttattggagccttctctgtgggtcaggccgccccatgcattgatgctttcgcgaatgccagaggagcggcatacgtcatctttgatattatcgacaataatcctaagattgacagcttctccgaacgaggccacaaaccagattccatcaaggggaatttggagtttaatgatgtgcacttctcttatcctagcagagccaacgtaaagattctcaagggactcaacctgaaggtgcagagcgggcagacggtcgctttagtcggctcgtcaggatgcggaaaatcaacaacagtccagctgattcagcggctgtacgaccctgatgaaggaactattaatatcgacggacaggatatccggaactttaatgtcaattacctcagagagattatcggggtagtttcccaggaacccgtgctgtttagcacgactattgctgaaaacatttgttatggaagaggaaacgtcaccatggatgagatcaagaaagccgtgaaagaagccaacgcatacgagttcatcatgaagttgccccagaaatttgatacactggtgggggagaggggcgctcagctctccggaggccagaaacagcgaatagctatcgcccgtgcattagtgaggaaccctaaaatcctgttattggacgaggccactagcgccctggataccgaatcagaggccgaagtgcaggccgcgctggataaagcccgtgagggacgcacgacaatcgtcattgcgcataggctgtccaccgtgcggaatgctgacgtgatcgccgggtttgaggatggcgtgatagtagaacaagggtcacactccgaactaatgaagaaggagggcgtgtacttcaaactggtaaacatgcagacttccggctctcagatccagtccgaggagtttgagctaaatgacgagaaggcagctaccaggatggctcccaacggctggaagtccaggctttttcggcacagcacccagaagaacctcaagaattcgcagatgtgtcagaagtctctggatgtcgagaccgatggactggaagcaaacgtgcctcctgtcagcttcctgaaagtgctcaagcttaacaagactgaatggccatattttgtggttggcactgtgtgtgccattgctaatggtggcctgcaaccggccttcagcgtcatattctcagagatcatagcaatattcggtcccggagacgatgcagtgaaacagcagaagtgcaatatcttcagcttaatctttctttttctgggaataatctctttctttactttcttcctgcagggattcacctttgggaaggctggcgaaatcctcacccgacgcttgcgttccatggcctttaaggctatgcttagacaggacatgtcatggtttgatgaccacaagaatagtaccggcgcattgagcactagattggcgacggacgcagctcaggttcagggggccaccggcacccggttggcactgatcgctcagaatattgccaacctgggtaccggcatcattattagcttcatctatggctggcagctgactctccttcttttagctgtagtcccaattatcgcagtcagcggcattgtggaaatgaaactactcgctggaaacgcaaagagggataaaaaggaattagaagccgctgggaaaatcgcgaccgaggccattgagaacattcgcacagtggtgagtctgacccaggaacgaaagtttgaatccatgtacgtcgaaaagctctatggcccttacaggaactccgtgcagaaagctcacatttacggaataacattctccatttctcaggcattcatgtacttcagttacgccggatgtttccggttcggagcttatctaatcgtaaatggccatatgcgcttcagggatgtaattctggtgtttagtgccattgtctttggagccgtggccttgggccacgcctcttcattcgcccctgattacgccaaagctaagttgagtgcggcccacctatttatgctgttcgaaagacagccactgattgatagctactccgaagagggccttaagccggataagttcgaagggaacattacgttcaacgaagttgtatttaactacccaactcgtgccaacgtgccagtgctgcagggcttaagtctggaggtcaagaaagggcagacgcttgcactggtcgggagtagtggctgcggaaagtctaccgtggttcaactgctggaacggttctatgatccattagcgggaacggtgttcgtggatttcgggtttcagctgctggacgggcaagaggccaaaaaactgaatgtgcagtggctgagagctcagctggggatcgtctctcaggagcccattctttttgattgcagtatagcagaaaatattgcatatggggacaatagtcgtgtcgtttcccaggacgaaattgtgagcgctgccaaagcagccaacattcatcctttcatcgaaaccttgccgcacaagtatgagacacgggtgggcgacaagggcacgcagttgagtggcgggcagaagcagagaatcgccatcgcccgggcgttaattaggcaaccccagattctgttgctggacgaggctacctccgctttggatacggaatccgaaaaggttgtccaggaagccctggataaagctcgggaaggcagaacttgcattgtcattgctcataggctgagtacgatccagaatgcagatctcattgtggtcttccagaatggcagagtcaaagagcacggcacacaccaacagctgctggcccagaaggggatttacttctctatggttagcgtgcaggccgggacgcagaacctg

SEQ ID NO: 200219 - DNA, 3858 bp, Artificial Sequence
  derived and/or modified sequence
atggacctcgaggccgccaaaaacgggactgcatggcgcccaaccagcgccgaaggagattttgaactcggcattagcagcaagcaaaaacgcaaaaagacaaagaccgtaaaaatgataggcgtgctcaccctgttcaggtactctgactggcaggataagctgttcatgtctctcgggactattatggccatcgcacatggtagcggactgcccttgatgatgattgtcttcggcgaaatgactgataagttcgtcgacacggcgggaaacttcagtttcccagtgaatttttctttgagtctgctgaatcctggcaaaatcctcgaggaagagatgacgcgatacgcctactactacagtggactgggagcaggagtgctcgtcgccgcgtatattcaggtttctttttggactctggccgctgggcgccagatcagaaagattaggcagaagttttttcacgcgattctgaggcaggagatcgggtggttcgatatcaacgataccacagaactgaatactcggctgaccgatgacatcagtaagatttccgagggcatcggggataaggttggcatgttctttcaggcggtggccacctttttcgccgggttcattgtcggcttcattcgagggtggaaattgacattggttattatggccattagtcccatcctgggtctctccgccgctgtctgggctaaaattcttagtgccttttcagataaagagctcgccgcctacgctaaggccggagctgtggcagaagaggccctcggcgccattagaaccgtgatcgcattcggtgggcagaataaggaactcgaacgctaccaaaaacacttggagaacgctaaagaaattggaatcaagaaagcgattagcgctaatattagcatgggcattgccttcctgcttatctacgccagttacgcgctggccttttggtatggtagtacacttgtgatcagcaaggaatacactattggaaacgcaatgaccgtgttcttttcaattttgatcggtgcgttctccgtgggtcaagccgccccgtgcattgacgccttcgccaacgcaagaggggctgcttacgtaatattcgacattatcgataataatcccaaaatagactcattctcagagcgcggccacaaacccgattcaattaagggcaacctggagttcaatgacgtgcatttctcctacccctctcgggccaacgtgaagatccttaaaggactcaatctgaaggtgcagagcgggcagaccgtcgcgctggtgggaagcagcgggtgcggtaagagcacgaccgtccagctgattcagagactgtacgatccggacgaggggaccattaacattgacggccaggacataagaaatttcaacgtgaactatctgagagagatcattggcgtggtcagccaggagcccgtgcttttttccacgactattgcagagaacatctgctatggacggggcaatgtcaccatggatgaaataaagaaggcagtcaaagaggccaacgcatacgagtttataatgaagttgccgcagaagttcgacacgcttgtcggggagcggggcgcccagctgagtggtggccagaaacagcggatcgccatcgcaagagccctcgttagaaacccgaagattctcctgttggacgaagcaacttccgctctggacacggagagtgaggcagaggtgcaggctgcgctggataaagcgcgggaaggacgcactactatagtaattgcacataggcttagtacggttaggaatgctgatgttatcgcgggatttgaggatggcgtgatagtggaacagggtagtcattccgagttgatgaagaaggagggagtgtacttcaagcttgtgaacatgcagacgtcaggatcccagatccagagcgaggaattcgaactgaacgatgaaaaggccgctacccggatggctcctaatggatggaaaagccgcctgttccgccacagcacccagaagaatctcaaaaattcccagatgtgtcagaagtctcttgatgtggagactgacggcctggaagcaaacgtcccaccggtatctttcctgaaggtactcaagctgaacaagaccgaatggccctatttcgtcgtgggaacagtgtgcgcaatcgctaacggaggtctgcagcctgctttctccgttatcttttctgaaatcattgctattttcggacctggagacgatgcagttaaacagcaaaaatgtaacatctttagtctgatatttctctttctgggaataatctcttttttcactttttttctgcagggcttcacattcggaaaggccggcgagattttgacgcgaaggctccgaagcatggctttcaaggccatgttgagacaagacatgagctggttcgatgatcacaagaatagcaccggtgcccttagcacccgcctggccacagatgctgcgcaggtgcaaggcgcgacagggacccggttggccctcattgcccagaatatagccaacttgggaacaggtatcatcatctcctttatctacgggtggcaactgacccttctcctgctggccgtcgtccctattatagctgtgtccgggattgttgagatgaagcttttggctggcaatgctaagagagataaaaaggaactggaggctgccggaaaaatcgctacagaagccattgagaacatccggactgtcgtgagtcttacgcaggaacgcaagttcgagtcaatgtatgtggagaagctttacggcccttataggaattccgtccagaaggcccacatttacggcattacctttagcatttctcaggcattcatgtatttcagttatgccggctgctttcggtttggggcatacctcatcgtgaacggtcacatgaggttcagagatgtgatcctggtcttcagcgcaatcgttttcggcgctgtggcactggggcatgcttcaagtttcgctcctgactacgcaaaggccaaactgagcgccgctcacctcttcatgcttttcgagcggcagcctctgatcgatagttatagcgaggagggactgaaacccgacaagttcgaggggaacatcactttcaatgaagtggtctttaattatccaaccagagctaatgtgcctgtgctccagggactcagtctcgaagtgaagaaggggcagactctggccttggtaggcagctccggttgcggcaaaagtaccgtggttcagctcctggaacggttctacgaccctcttgccggtaccgtctttgtcgacttcgggttccaacttctggacggtcaggaggccaaaaagttgaatgttcagtggcttcgagcacagctgggcatcgtcagtcaggaacccattttgttcgattgtagcatcgccgaaaacattgcctatggcgataactctagggtggttagccaggacgagatagtctcagcagcgaaggccgccaacattcatcccttcatagaaacactccctcataagtacgaaactagggtgggcgataaaggaacccagctttctgggggccagaagcagaggattgcgatcgcaagggccctgattcgccagccccaaattttgctcctcgatgaggctacgtcagcgctggatacagagtctgagaaggttgtgcaagaggccctcgataaagcccgcgagggtagaacatgcattgtaattgcccaccgcctcagcacaattcagaatgcagacttgatagtcgtgttccagaatggccgagtcaaagaacacggaacccaccagcaactcctggcacagaaaggcatctatttctctatggtttccgttcaggccggtacccagaatttg

SEQ ID NO: 200220 - DNA, 3858 bp, Artificial Sequence
  derived and/or modified sequence
atggaccttgaggcagccaaaaacggaaccgcatggcgtcccacgtcggcagaaggcgatttcgaacttggtatttccagtaaacaaaaacgcaaaaagaccaagaccgtgaagatgattggtgtattgactctgttccgatactcggactggcaagacaagctgttcatgtcactcggcactataatggccatcgcgcacggcagcggcctgccacttatgatgattgtgtttggcgagatgactgataagtttgtggacactgcaggaaatttcagctttcctgtgaacttttccctttccctccttaatcccgggaaaatactggaagaggagatgaccagatacgcatactactactccggactcggagctggagtgcttgtggcagcatacattcaagtctctttctggactctcgccgcaggacgtcaaattagaaagattcgacagaaattcttccatgctattttgaggcaagagattggatggttcgatatcaacgacaccaccgaactgaatactcgcctgaccgatgatatctctaaaatctcagaaggcatcggagataaggtcggcatgttttttcaggcggtggcaacctttttcgcaggttttatcgtgggattcatacgaggatggaaactcacccttgtgattatggccatatcccctatacttggactttcggcagcggtgtgggccaagatcctgtctgctttctcggataaggaacttgccgcatatgcaaaggccggtgcggtcgcagaagaggcgcttggggcaattagaacggtcatagcctttggaggtcagaacaaggagctggaacggtaccaaaagcatttggaaaatgccaaggaaattggaatcaaaaaggctatttccgcaaatatctcgatgggaatcgcctttcttctcatatacgcaagctacgcacttgcattttggtacggatcaactctggtcatttcgaaggagtacaccataggcaatgctatgacggtgtttttctcaattctcataggggcgttctccgtcgggcaagccgcaccttgtattgatgcatttgccaacgctcgtggagcagcgtacgtgatctttgatatcattgacaacaatcctaaaatcgactcgttttccgagcggggtcataaacctgatagcatcaagggaaaccttgagtttaatgacgtccatttctcctacccttcccgcgcgaacgttaagattttgaagggactgaacctcaaggtgcaatcaggacaaactgtcgctctggtgggatcgtcgggttgtggaaagagcaccacggtgcaactgattcaaaggctgtacgatccagatgaagggactataaacattgatggacaggacattcgcaactttaatgtgaactaccttcgagagatcattggggtcgtgagccaagaaccagtattgtttagtactaccattgccgagaacatctgctatgggcgcggtaatgttaccatggatgagatcaagaaggcagtgaaagaagcaaatgcctacgagttcatcatgaaactgccgcagaagtttgacactcttgttggtgaaagaggtgcacaacttagtggagggcagaagcaaaggatcgcaatcgcaagagctctggtgagaaaccctaagattctcttgcttgatgaggctacctccgccctggacactgagtccgaagcggaagtccaagcagcactcgataaggcacgagaaggtagaactaccattgtcattgcccataggctgagcactgtgcggaacgcagacgtgattgctggttttgaagatggagtaatcgtggaacaggggtcacatagcgagcttatgaaaaaggaaggagtgtactttaaacttgtcaatatgcagaccagtgggtcacaaattcaatccgaggaatttgagctgaacgacgaaaaggcggcaacgagaatggcccctaacggatggaagagcagactctttcgccactccacccagaagaatctcaagaattcgcaaatgtgtcaaaagagcctggacgtggaaaccgacggattggaagccaacgtaccacctgtgagctttctcaaagtgctgaagctgaacaagaccgagtggccgtactttgtcgtgggaaccgtgtgcgcaatagcaaacgggggacttcagccagcattcagcgtgattttctcagagattatagccatcttcggccccggagacgacgcggtgaagcagcaaaagtgcaacattttcagccttatctttctctttctgggtatcatatcgtttttcactttctttctgcaaggatttacctttggtaaggccggagaaattcttactaggcggttgagatccatggcgtttaaagcaatgttgagacaggatatgtcgtggttcgatgaccataagaactcaacgggtgcactgtcaacgcggctggctaccgacgcggcacaagtgcaaggcgctaccgggacccgactcgcactgattgcacagaatattgctaaccttggcactggaattatcattagcttcatttacggatggcaactgaccctccttctgctcgcagtggtccctattatcgcagttagcggtatcgtcgagatgaaacttctggcaggtaacgctaagagagacaaaaaagagcttgaagcggctggtaaaatcgcaaccgaggccatagaaaacattcgcactgtcgtctcactcacccaggaaaggaagtttgaatcgatgtacgtggaaaaactctacggtccataccggaattcagtgcaaaaggcacatatctatggaatcaccttttcgatctcgcaggcatttatgtacttttcgtacgcaggatgttttcgctttggtgcatacctgattgtgaacgggcacatgcgctttcgggatgtgattcttgtttttagtgcaatcgtgtttggggccgtggcactggggcacgcatcttcgttcgctcctgattacgcaaaggccaagctgtccgccgcacatcttttcatgctcttcgaaaggcaaccgctgatagattcatactccgaagaagggctgaagccagataagttcgaaggaaatatcaccttcaacgaggtcgtctttaactacccaactcgcgccaacgtgccagtgctccaaggcctgtcccttgaagtgaagaaaggccaaactcttgcgttggtgggcagctcaggctgcgggaaatctactgttgtgcaactgctggaaaggttttacgatccccttgcaggtaccgtctttgtggattttggttttcagctgctcgatggacaggaggcgaagaagctcaacgtgcagtggctgcgggcacagcttggtatagtgtcccaggaacccattctgttcgattgttcgatcgctgagaacattgcgtacggagataattccagagtcgtgtcccaggatgaaattgtgtcggcagcgaaggccgccaatattcacccttttatcgaaactctcccacataagtacgaaacgcgggtgggcgataagggcacccagctctccggtgggcaaaagcagagaatcgcaattgcacgcgcactgatccgtcagccccaaatactgctcctggacgaagcaacctcggcccttgatactgaatccgaaaaagtcgtacaggaggcccttgataaggcccgtgaaggtcggacttgtattgtgatcgcccatagactctccacgattcagaacgcagatcttatcgtggtgtttcagaatgggcgtgtcaaggaacacggaacccaccaacagctgcttgcgcaaaaaggaatctatttctctatggtgtcggtgcaagcgggcactcagaacctc

SEQ ID NO: 200221 - DNA, 3858 bp, Artificial Sequence
  derived and/or modified sequence
atggatctggaagcggccaaaaatgggacagcttggcggcctacatccgccgaaggagacttcgaactcgggattagttcaaaacagaaaaggaaaaaaacaaaaactgttaaaatgataggagtattaactctatttcgatattctgattggcaggataagttattcatgtctttaggaacaataatggcaatcgcccatgggtccggacttcccctaatgatgatcgtatttggagagatgactgataagttcgtggatacagccggaaacttttctttccccgtgaacttttcactcagtctgctcaatccagggaaaatcttggaagaggagatgacaagatacgcttattactattcagggctaggggctggagtgcttgtggccgcctacatccaggtcagtttctggacactggccgctggaaggcagatcagaaaaataaggcagaaattcttccacgccatactgcggcaggagatagggtggtttgatataaacgatactactgagctaaatactcggcttacagatgatatatccaaaatctcggaagggatcggggataaggtagggatgttctttcaggctgtagcaactttcttcgctggattcatagtggggtttatcagggggtggaaactcactctagtcataatggcaatctctcccatcctaggactatctgccgcagtgtgggctaagatcttgagtgcattctccgataaagaacttgctgcctacgcaaaagccggggcagttgcagaagaagccttaggagccatcaggactgtgattgctttcgggggacagaataaagagctggagagatatcagaaacatctagaaaatgcgaaagaaatcgggatcaaaaaagccataagtgccaatatctccatgggaatagcgttcctcttaatatatgcatcttatgcactagcattctggtacgggtccactcttgtaatctcaaaagaatatacaattgggaacgcaatgactgtgtttttttccattctgatcggagcattctcggttgggcaggccgcaccctgtatcgatgcctttgccaatgcaagaggggctgcttacgttatttttgacattattgataacaaccctaaaattgatagtttcagtgagcgcggacacaaacctgatagtataaaaggaaacttggaattcaatgatgtacatttctcttatccttctcgagcaaatgtaaaaatcctaaaaggactcaatttgaaagtccagagtgggcagacagtcgctttggtaggaagttccggatgcggaaagagtacaacagtacagctcatccagcggctctatgatcccgatgaaggaactataaacatagacgggcaggatattcgaaacttcaatgtgaattatctcagggaaattataggagtcgtgtcacaggaacccgtcctcttttctacaacaatcgctgaaaacatttgttatggacgagggaatgtgacaatggacgagatcaaaaaggccgtgaaagaagctaacgcctatgaattcattatgaaactgccacagaaattcgatacactcgtcggggaaaggggggcccagctgtcaggagggcagaaacagcggatcgctatcgcacgggctctagtcaggaaccccaaaattcttcttttagatgaagccacttccgccctggatactgaatcagaggccgaagtacaggccgctcttgataaagcccgcgaaggaaggacaacaattgtgatagcccacaggctttccactgtgcgcaatgcagatgttatagctggatttgaagatggggtgatcgtggagcagggatctcattccgaactcatgaaaaaggaaggagtgtacttcaaattggtcaacatgcagacatcaggatctcaaatccagtccgaagagttcgaactaaatgacgaaaaggcagcaacacggatggctcccaacgggtggaaatctaggctgtttcgccattcgactcagaagaacttgaaaaatagtcagatgtgtcagaaatcactcgatgttgaaacagatgggcttgaagccaatgtgcccccagtctctttcctcaaggttttaaaactaaacaaaactgaatggccttattttgtggtcgggactgtgtgtgcaattgctaatggggggctgcagcccgcattcagtgttatattctctgaaattattgccatcttcggaccaggagatgatgcagtgaaacagcagaaatgtaacattttttcgctgatctttctgtttctgggaataatctcttttttcacgttttttctgcagggattcacttttggaaaagctggagaaattctcactcggagacttcgaagtatggcatttaaagccatgctcagacaggacatgtcgtggtttgatgatcataaaaattccacaggggcactatctactagactggccacagatgccgctcaggttcagggagcaactgggactcggttagccctcattgcccagaacatagcaaacttaggaacagggattatcatctcttttatatacggatggcagcttactctgctactactggcagtcgtccccattatcgccgtgtccgggatagtggagatgaagttactggctggaaatgcaaagcgagataaaaaagaactagaggctgctggaaaaatagcaacagaagctatcgaaaacatcaggacagtggtctcactaactcaggaaaggaaatttgaatccatgtatgttgagaaactttacggaccctatagaaacagtgtgcagaaagcacacatttatggaatcacattttcaataagtcaggcctttatgtattttagttatgcggggtgcttcagattcggagcttatctgatagttaacgggcacatgaggtttagagatgttatactcgtattttctgcaatcgtgttcggagccgtggccttagggcacgcttcttcgtttgcccctgactacgctaaagcgaagctctcagcagctcatttgttcatgttatttgaaaggcagcctctcattgattcttattctgaagaggggctcaaacccgataaattcgaaggaaacatcacattcaacgaggttgtgtttaattatcctacacgagctaacgtgcctgtgctacaggggctctctctcgaagtgaagaagggacagacactggccctcgtcgggtcgtccgggtgtgggaaatctacagtagtgcagctcctagagagattttatgacccactagctggaacagtttttgtggattttgggtttcagttactcgatggacaggaagctaaaaaactcaatgttcaatggctacgcgcccaactgggaatagtgagtcaggaaccgatattgtttgattgcagtatcgccgaaaacattgcatatggggataattctagggtggtgtcccaggatgagatcgtgtctgctgccaaagctgccaacatacatcccttcattgaaactcttccacataaatatgagacaagagtaggagataaaggaactcagctgtcaggagggcagaaacagcgcatagctatcgcacgggcactaatacggcagccccagatactactgctggacgaggccacgtcggctctcgatacagaatctgaaaaggtagttcaggaagccctcgataaagcccgcgaagggagaacttgcatcgtgatagcgcaccgcctttcaactattcagaatgctgatttgatagttgtttttcagaatggaagggtgaaagagcatggaacacatcagcagttattggctcagaaagggatatacttttctatggtgtcagtgcaggcaggaacacagaacctc

SEQ ID NO: 200222 - DNA, 3858 bp, Artificial Sequence
  derived and/or modified sequence
atggatctcgaggccgctaaaaatggaactgcgtggcgacctacaagcgcggagggagacttcgaactgggcatctcaagcaaacagaagagaaaaaagaccaaaaccgtgaagatgattggagttctgactctttttcgctatagcgactggcaagacaaactctttatgtccctgggcaccatcatggctatcgcccatggttccggcctgccactgatgatgatcgtgttcggggagatgaccgacaagttcgtggataccgcgggcaacttcagtttccctgtcaatttttcccttagcctgcttaatccggggaagattcttgaagaggagatgacacggtacgcatactattactcagggttgggagcaggcgtactcgtggctgcatacatacaggtaagcttttggacgctggcagccgggcgccagatacgcaaaattcgccaaaaattttttcatgccatcctcagacaggagataggctggttcgacattaatgacacgacagaactgaacacacgactgactgacgacattagcaagatcagtgagggcatcggcgataaggttggtatgttttttcaggcagtggcaacctttttcgcaggtttcattgttggttttatccgcgggtggaagctcacccttgttatcatggccatctctcctattttaggcctcagtgctgccgtttgggccaagatcctgagtgccttctccgataaagaactggctgcctacgccaaagctggcgcagtggccgaagaggccctcggcgcaatccggacagtgatagcctttggaggccagaacaaggaactcgaaagataccagaaacatctggagaacgccaaggaaattgggattaagaaggctatttccgccaacattagcatgggcatcgcattcttgctgatctacgctagctatgccctggccttctggtacggttctacccttgtgatctctaaggagtataccatcggaaacgctatgaccgtctttttttcgatcttgattggcgcctttagcgttggtcaggccgccccttgtatcgacgctttcgcaaacgcacggggcgcagcgtatgtgatcttcgacatcatcgataacaatccaaagatcgattcattcagcgaaagaggccacaagccagactcaatcaagggaaacttggaatttaacgacgttcatttttcttatccatctcgggccaacgtgaagattctgaaggggttaaatctgaaggtacagagcgggcagacagttgctctggtgggcagctctggatgcggtaagtcaaccacggttcagttaatccaaagactctatgatccggatgaaggtaccataaacattgatggccaggacatccgcaactttaacgtgaattacctgcgagagattatcggggtcgtgtcccaggaacccgtcctcttttccaccaccatcgcggaaaacatctgttacgggcgtggaaatgtgaccatggacgagattaagaaagcggtgaaggaggccaacgcctatgagtttataatgaagctgccccaaaagttcgacactctggtgggtgagcgaggggcacagctctctggaggtcagaaacagaggatcgcaatcgcccgagccctggttcgaaaccccaagatcttgctgctcgatgaggccacttctgccctcgatacagagagtgaagccgaggtgcaggcggcgctggataaggcacgggagggtagaaccactatcgtcatagcgcacagactgtcaactgtgcgcaacgccgatgtgatagccggcttcgaagacggcgtcatagtggaacagggatctcatagcgagttaatgaagaaagaaggtgtgtacttcaaactggtgaacatgcaaacatctggaagccaaatccagagcgaggaattcgagcttaatgacgagaaggccgccaccaggatggcccctaacggatggaagtcccgactctttcgccactctactcaaaaaaaccttaaaaactctcagatgtgccaaaagagcctggatgtcgagaccgacgggctcgaagccaatgtgccccctgtctctttcctgaaggtgctcaagctgaacaaaacagagtggccctactttgtggtgggcacagtgtgcgccatcgccaacggaggtctccagcccgctttctccgttatcttctcagagatcatcgccatatttggtccaggcgatgatgccgtcaagcagcagaagtgcaacatcttcagcctgatattcctgtttctgggcattatttccttttttacctttttccttcagggctttaccttcggaaaggccggggagattcttactaggagacttcgttctatggcttttaaggccatgttacgtcaggatatgtcctggtttgacgaccataaaaacagtacaggagccctaagcacccgtctggcaaccgacgcggcccaggtgcagggtgccacaggtaccaggctggcacttatagcccagaacatcgccaatctgggcaccggtatcatcattagtttcatatatggctggcagctgaccctgctactcctggccgtagtacccatcattgccgtgtccgggattgtcgagatgaaattgctggccggcaatgcgaaacgggataagaaggaattggaggccgctgggaaaattgccacagaagctatcgaaaacatccggaccgtcgtttccctgacccaggagaggaaatttgaaagtatgtatgtggagaagctgtatggcccatatcgcaattctgtgcagaaggcccacatctatggcatcacgttcagtattagtcaggcatttatgtatttttcctatgctggttgcttccgtttcggtgcttacctaatcgtgaatggtcatatgagattcagagatgtgatcctggttttcagcgctattgtctttggcgctgtggcgctgggccatgcgagctcattcgcgcctgattatgccaaagcaaagctcagcgcggctcatcttttcatgctgtttgagaggcagccacttatagattcttattctgaggaggggcttaaacccgataaattcgagggaaacattactttcaacgaggtggtctttaattacccaacccgtgctaacgtgccggtccttcagggcctgtctcttgaggtaaagaaggggcagaccctggcattggtagggtctagcggatgcggcaagagcacggtggtacaactgctcgagcggttctacgacccactcgcgggcactgtgttcgtcgatttcgggtttcagctgctggatggccaagaagcgaaaaagctcaacgtccagtggctccgcgcgcagctggggatcgtgtctcaggaaccaatattgttcgactgcagcatagcagagaatatcgcatacggcgacaacagtagggtcgtaagtcaggacgagattgtgtccgctgccaaagctgcaaatattcacccattcatcgagaccctgccccataagtatgagactcgagtgggcgataagggaacccagcttagcggcggccaaaagcagaggatagccattgccagggctctcattaggcagccccagatcctgctgttggacgaggccacaagcgcactggatacggagtccgaaaaagtcgtgcaggaagctttagataaggcccgagagggaagaacttgtattgtgattgcacatcgccttagcaccatccagaatgcagacttaattgtcgtgtttcagaatgggagggtgaaggagcatggtacccaccagcagctattggcccagaagggcatctacttcagcatggtgtctgtccaagccggcacgcaaaacctg

SEQ ID NO: 200223 - DNA, 3858 bp, Artificial Sequence
  derived and/or modified sequence
atggatctcgaagcggccaagaacggaactgcttggcggccaaccagcgcggagggggacttcgagctggggatctcatccaagcagaaacgcaagaaaacgaaaaccgtcaagatgatcggtgtgctcactttgttccgctactccgattggcaggacaaactcttcatgtctctgggtaccatcatggctattgcacatggttctggcctccccctgatgatgatcgtgttcggtgagatgactgacaagttcgtcgataccgcggggaacttcagcttccccgtgaacttctccctgtccctgctgaaccccggaaagatactggaggaggaaatgacgaggtacgcttactactacagcggcttgggagcaggagtgctcgtggccgcatacatacaagtctcattctggactctggcggccggacgacaaatcagaaagatccgccagaaattcttccacgcaatcctcagacaggaaatcggatggttcgatatcaatgacaccactgagttgaacacccgcttgactgacgacattagcaagatctccgagggaattggagacaaggtgggaatgttttttcaagcggttgctaccttcttcgccggcttcatcgtgggtttcatcagaggatggaagctgactctggtgatcatggctatctcgccaattctggggttgtcagccgccgtctgggcaaagatcctgtcggcgttctccgataaagaactggccgcttacgcaaaggccggcgcagttgccgaagaagccttgggagctatacggaccgttattgcctttggagggcagaataaggaactggagagataccagaaacacttggaaaatgctaaggagatcggtatcaagaaggccatttcggcgaacatcagcatgggcatagccttcctgctgatctacgcgagctacgcccttgcgttttggtacggctccaccctcgtgatctcaaaggaatacactatcggaaacgcgatgaccgtgttcttttcgatcctcattggggctttctcggtgggacaggcagctccctgtattgacgcattcgccaatgcccggggcgcggcatatgtgatcttcgatatcatcgataacaatccgaagatagattccttctccgaacgcggacataaaccggactcgatcaaagggaatctggagttcaatgatgtgcacttcagctacccatcgcgcgcaaacgtcaagatcctcaagggcctgaatctgaaagtgcagtcaggccagaccgtggctcttgtgggttcctcgggctgcggcaagtccactacggtgcagctcatccagcgcctgtacgaccctgacgaaggaactatcaacatcgacggccaagacattcgcaactttaacgtgaactatttgagagagatcatcggggtcgtcagccaggagccggtgctgttctcaaccaccatcgctgaaaacatctgctacgggagaggaaacgtgactatggacgaaatcaagaaggctgtgaaagaggccaacgcctacgagtttatcatgaagctgcctcaaaagttcgatacgctcgtcggcgagcggggtgcccaactgtcaggcgggcagaagcaacggatcgcaattgcccgcgcgctggtcaggaaccctaaaatcctgctcctcgatgaggccacctcggcgcttgacaccgaatcagaagccgaagtgcaggccgcacttgacaaagcaagggaaggccgcacgactatcgtgatcgcgcaccggctgtctaccgtgcgcaatgcagacgtgatcgcggggtttgaagatggagtcattgtcgagcagggatcgcactcagagctgatgaaaaaggagggagtgtacttcaaactggtgaacatgcaaaccagcggatcacagatccaatccgaggaattcgagctgaacgatgaaaaggccgccacgcggatggcgccaaacggatggaagagccgactgttccggcactcgacccagaaaaatcttaagaattcacaaatgtgtcaaaaatcgctcgacgttgagactgatggactggaagcaaacgtgcctccggtgtcgtttctcaaggtgctcaagttgaataagactgagtggccgtacttcgtggtgggaacggtgtgtgccatcgctaacggcggcttgcaacctgccttttcagtcatcttcagcgaaatcatcgcgatctttggaccgggcgacgacgcagttaagcaacagaaatgtaatatcttttcactgatcttcctctttctggggattatcagcttcttcaccttcttccttcaaggattcacctttggaaaagccggagaaatcctgactcgacggctcagatctatggctttcaaagcgatgctgaggcaggatatgtcttggtttgacgaccataagaattcgactggagctctgtcgaccagactcgccactgacgcggcccaggtccagggagccacgggtacccggttggccctgatcgcccaaaacatcgccaatctgggcaccgggatcattatctcatttatctatggatggcagctcaccctgcttctgctcgccgtcgtcccaattatcgccgtgtctggcatcgttgagatgaagctgcttgccgggaatgcaaagcgagataagaaggaacttgaagccgctggcaagatcgcgaccgaagcgatcgaaaacatccgcactgtcgtgtcgctcactcaggaaaggaagtttgaatccatgtacgtggagaagctgtacggaccatacagaaatagcgtgcagaaggcacacatctacggcatcactttctccatctcgcaagccttcatgtacttcagctacgcaggatgcttccgcttcggagcttacctgatcgtgaatggccacatgagattcagagacgtgatccttgtgttctcagccatcgtgttcggagcagtggcactcggacatgctagctccttcgccccggattacgcgaaggccaagctgtcagccgcgcatttgtttatgctgttcgaacgccagccgctgattgattcttactccgaggaaggtttgaaaccagataagttcgaaggaaacatcactttcaacgaagtggttttcaactacccgactcgcgctaacgtgccagtgctccaaggactctcgctggaggtgaaaaaggggcagaccctggcacttgtgggttcgtccggatgcggtaaaagcactgtggtccagctgctggaacggttctatgacccgctcgctgggactgtctttgtcgacttcggctttcagttgttggatggccaggaagctaagaagctcaacgtccaatggctccgagcccagctgggtatcgtctcccaagagccgattctttttgattgctccatagccgaaaacattgcttacggagataactcccgggtggtgagccaagacgagattgtctcggcggcaaaagccgcgaacatacatccgtttatcgaaactttgcctcacaagtacgaaaccagggtcggcgacaagggaacgcagctgtcgggaggacaaaagcaacgtattgcgattgctcgggcccttattcggcagccgcagatcctgctgcttgacgaagcgacctcggcattggacactgagtccgagaaagtcgtgcaggaggctttggacaaggcgcgcgaggggcgcacgtgcatcgtgatcgcacaccggctctccactatccagaatgccgacctcatcgtggtctttcagaacggaagggtgaaggagcacgggacccatcagcagcttctggcgcagaaaggcatctacttctctatggtttccgtgcaggcgggaacccaaaatctg

SEQ ID NO: 200224 - DNA, 3858 bp, Artificial Sequence
  derived and/or modified sequence
atggatctggaggcagccaagaatggtactgcatggaggcccacttcagccgaaggagactttgagctggggatctcctccaagcagaagagaaagaaaacgaaaactgtcaaaatgattggagtgctcaccctttttagatactcagattggcaagacaagttgtttatgtcgctgggcactataatggcaattgcacatggcagcggacttcctctgatgatgatagtatttggggaaatgaccgataagtttgtggataccgcaggaaacttctcgtttccggtcaatttctccctgtcgcttctcaatccaggtaagattcttgaagaagaaatgacgagatacgcctactactactcgggacttggcgcgggagtgctggtcgcagcatacattcaagtgtccttctggaccctggccgcaggccggcagattcgaaaaatccgtcaaaagtttttccatgcaatccttcgtcaagaaattggttggttcgacattaacgacaccaccgagctgaatacccggcttaccgacgacatttcgaaaatctccgaggggattggcgataaagtcggaatgttttttcaagcagtggcaacgttttttgcgggtttcatcgtgggtttcattagaggatggaaacttaccctggtcataatggcgatttccccaatcctcggtctgtcggcagcagtgtgggcaaagatattgagcgccttctcagataaagagctggccgcgtacgcaaaggctggcgcagtggcggaggaagcccttggtgccattagaactgtgatcgcattcggtggtcagaataaggaactcgagcggtaccaaaaacatcttgaaaacgctaaagaaatcggtatcaagaaagcaatctctgcgaacatttcgatgggtatcgcttttctgctgatctacgcgagctacgcacttgcattttggtacgggtccactctggtcatatctaaggagtatactatcggtaacgccatgaccgtctttttcagcatcctgatcggagcattttccgtggggcaggcagcgccttgtattgatgcttttgcaaatgcaaggggagcagcatacgtcatatttgatatcatcgacaataacccaaagattgattcattttcagaacgcggacataagcccgattccattaaaggcaacctcgagtttaacgacgtgcatttctcctacccaagccgcgcaaacgtcaagatactcaaaggacttaacttgaaagtccaatccggacaaactgtcgccttggtcggatcctccggatgtggaaagtcaaccaccgtgcaactgatccaacgcctttacgatcctgacgaaggaacgatcaatatcgacggacaagatatacgaaatttcaatgtgaactacctcagagagataatcggcgtggtgagccaagaacctgtgcttttttcaaccactattgccgaaaacatctgctacggacgcggcaatgtgaccatggacgagattaagaaggctgtgaaggaagccaatgcctacgaattcattatgaaacttcctcagaagtttgatacccttgtgggtgagagaggcgcacaactctcagggggacagaaacagcggatagcaattgcacgcgcactggtccggaatcctaagattctccttctggatgaagctacttcggcacttgatactgagtcggaagccgaagtccaagcagcgcttgacaaagcaagagaaggacggactaccattgtgattgcacataggcttagcaccgtgcgtaacgccgatgtgatcgcaggttttgaggacggggtgatcgtggaacagggaagccactccgaacttatgaagaaggaaggggtgtactttaagctggtgaacatgcagaccagcgggtcgcagatacaatccgaagaatttgaactgaatgatgaaaaagcggcaacccgaatggcgccgaacgggtggaagtcacgcctgtttagacacagcactcaaaagaacctgaagaactcacagatgtgccagaagtcgcttgatgtggaaactgatggtcttgaagccaacgtgccccccgtctcgtttctgaaagtgctgaagctgaataagaccgaatggccttacttcgtggtgggaactgtgtgtgcgatcgcaaacggaggtctgcagccagcattttcagtgatcttttcggaaatcatcgcaatctttggccctggggatgatgcggttaagcaacaaaagtgtaacattttcagtttgatctttctgtttctgggtattatcagcttctttaccttttttcttcagggttttacctttggaaaggcaggcgaaatactcactagaaggcttagatccatggcgtttaaagccatgcttagacaggacatgtcatggttcgatgaccacaagaattcgaccggtgcactgtccactcggcttgcaaccgatgcagcacaggtgcagggagcaaccggtaccaggctcgcattgattgcgcagaacatagctaacctcgggacgggaatcatcatttcttttatctacggttggcaacttaccctccttctcctggccgtcgtccccattatcgcagtgtccggaatcgtggaaatgaaactccttgcaggtaatgcaaagcgagataagaaggagcttgaggcggcaggaaagatcgcaactgaagcaatcgagaatatcaggacggtggtgtcactgacccaggaacgcaagtttgaatcgatgtacgtggaaaagctgtatggaccataccggaattcggtccaaaaagcgcacatttacggaattaccttttcgataagccaagcgtttatgtactttagctacgccggttgttttaggtttggagcataccttattgtcaacggccatatgaggtttcgagacgtcattcttgtgttctcggcaatcgtctttggtgctgtcgcactgggacacgcgtcgagcttcgcgcccgattacgcaaaggcaaaactttcggcagcgcacctgtttatgctgttcgaacgacagccattgattgacagctactcggaagaaggccttaagcctgacaagttcgaaggtaatatcacttttaacgaggtggtgtttaactatcctacccgggccaacgtgccagtgcttcagggcttgagccttgaagtgaagaaaggacaaacccttgcactggtgggatccagcggttgcggcaagagcacggtggtccagttgttggaacggttttacgatcctcttgcaggaaccgtgttcgtcgacttcggtttccaacttctggatggacaggaagcaaagaaacttaacgtgcaatggctgcgggcacagcttggcattgtgtcgcaggaaccgatcctgtttgattgctcaatagcggaaaacatcgcatacggtgataattcgcgagtggttagccaggatgaaatcgtgtcggcggccaaagcagccaatattcacccgtttattgaaactttgccccacaagtacgagactcgggtgggcgataagggtactcagctttcaggaggccaaaagcagcgtatagcaatcgccagagcactgatcagacagccacaaattctgctgctcgatgaagccacctcggctctcgataccgagtccgaaaaggtggttcaagaggccctggataaggcaagagagggtcggacttgtattgtgatcgcacaccgactctcaactatacaaaacgcagaccttatcgtggtgttccaaaacggacgtgtgaaagagcatggtacccatcaacaactccttgcacagaagggaatttacttttccatggtgtcggtccaggccggcacccagaacctc

SEQ ID NO: 200225 - DNA, 3858 bp, Artificial Sequence
  derived and/or modified sequence
atggacctcgaggctgccaagaatgggaccgcgtggaggcctaccagcgcggaaggagactttgagctgggtatctcctcaaaacaaaagcgtaagaaaactaagaccgtgaaaatgatcggtgtcctgacgctgttccgctactcagactggcaagacaagttgtttatgtcgctgggaacgatcatggccatcgcccatggatcgggactcccactgatgatgatcgtgttcggcgagatgactgacaaattcgtggacacggccggcaacttctccttcccggtgaactttagtctttcgttgttgaacccgggaaagatactcgaggaagaaatgacccgctacgcatactactactcaggactgggagctggggtgttggtggctgcatacatccaggtgtcattctggaccctggcggccgggagacaaattcgcaaaatccggcagaagttcttccatgccattctgagacaggagatcggatggttcgacattaatgacactaccgagctgaacaccagactcactgacgacatctctaagatttcggaaggcatcggggataaagtgggtatgttttttcaagctgtggcgaccttcttcgccgggtttatcgtcggattcataagaggctggaaactgactctcgtcatcatggcgatctctccaatcttgggcctgtcggctgctgtgtgggccaagatcttgtccgccttctcggacaaggaactggctgcgtacgccaaagcgggagcagtggcagaagaagctctcggcgccatcaggactgtcatcgcgttcggaggacaaaacaaggagctcgaaagataccagaaacacctcgaaaatgccaaggagatcggaatcaagaaggcgatctcagccaatatctcaatgggtatcgcgtttctgctgatctacgccagctacgcgctggcattctggtacggtagcaccctggtgatctcaaaggagtacactattgggaatgcgatgactgtgtttttcagcatactcatcggagccttcagcgtgggccaagctgctccttgcattgatgcatttgctaatgcgcggggcgccgcatacgtgatttttgacatcatcgacaataacccgaagatcgattccttcagcgaacgcggtcacaagccagatagcatcaaggggaatcttgaattcaatgatgtccatttctcatacccgagcagggcaaacgtaaagatcctcaagggactgaacctgaaggtgcagtccggccaaaccgtggcactggtggggagctccggatgcggcaagtcgactaccgtccagttgattcaacgcctctacgatcccgatgaaggcaccatcaacatcgacggacaggacatccggaactttaacgtgaattacctccgcgaaatcatcggggtggtatcgcaggagcctgtgcttttctcgaccactatcgctgagaacatctgttacggccgcggcaacgtgacgatggatgagatcaaaaaagcggtcaaggaagccaatgcctacgagtttatcatgaagctgccccagaagttcgacaccctggtcggcgaacgcggagcgcagctttcgggcggacagaagcaaagaattgcgattgcgcgcgcgctggtccgcaatccaaagatcttgttgctggacgaagccacgagcgctcttgacaccgaatcggaagcggaagtccaggcggcgctcgacaaagcgcgggagggccggactaccatcgtcattgcacatcggctgagcactgtgcggaacgccgacgtgatagctggatttgaagatggagttatcgtggagcagggaagccactctgagctcatgaaaaaggaaggtgtgtactttaaacttgtaaacatgcaaacttcagggtcccagatccagtccgaggagttcgagctgaatgacgagaaagccgccacccggatggcaccgaatggatggaaatccaggctgtttcgccattcgactcagaaaaacctgaagaactcccaaatgtgccaaaaatcgctcgacgtggaaaccgacggtttggaagcaaatgtccccccagtctcctttcttaaggtgctcaaactgaataagaccgagtggccttacttcgtcgtcgggaccgtgtgtgctatcgccaatggaggactccagccggctttctccgtcattttctcggagatcattgcgattttcgggccgggagatgatgcggtgaagcaacaaaagtgcaacattttcagcctcatcttcctgttcctcgggatcatcagcttcttcacgttcttcctgcagggattcaccttcgggaaggccggtgagatcctgacccggcgcctgcgctccatggcgttcaaagcaatgctcagacaagacatgtcgtggtttgatgatcacaagaactctaccggtgccctttcgactcgcttggcgactgacgccgcacaggtgcagggggccactggaactcgcctggcactcatcgcacagaacattgccaacctgggaactggaatcatcatctcctttatctacggctggcagctcacgctgctgcttctggccgtcgtccccatcatcgctgtgtccggaatcgttgaaatgaagctgttggccggcaacgccaagcgcgataagaaggaactggaggcggctggaaagatcgctactgaagctatcgaaaacattcggacggtggtgtcgctgacccaggagaggaaatttgaatccatgtacgtcgaaaaactgtatggtccgtacaggaactcggtgcaaaaggcccacatctacggtattactttctcgatctcgcaggccttcatgtacttctcatacgcagggtgcttccgcttcggcgcatatctgatcgtcaacggccacatgcgctttagagacgtgatcctcgtattctcggccattgtttttggagccgtggctttgggccacgccagctccttcgcccccgattacgccaaagcaaagctgtcggccgcccacctcttcatgctgttcgaacggcaaccgctgatcgactcctatagcgaggaaggacttaaaccggacaagttcgaggggaatatcacctttaatgaagtcgtgtttaactatccaactcgggccaatgttccagtgctccagggactttcattggaggtaaagaagggacagactttggccttggtgggatcaagcggatgtggtaagtcgaccgtcgtgcaactgcttgaacgcttttacgatcctctcgcgggaacggtgttcgtagatttcggattccagctgctcgacgggcaggaggccaagaaactgaacgtgcagtggctgagagcacagctgggtatcgtctcccaggagccgattctcttcgactgctccatcgctgaaaacatcgcctacggtgataactccagggttgtctcccaggacgaaattgtctcggcagccaaggccgcaaacatccacccgttcatcgaaactctgcctcacaagtacgaaaccagagtgggagataaaggaacccagcttagcggagggcagaagcagcgtatcgctattgcccgagcactgattcggcagccgcagatcctgctcctcgacgaggccacctcggccctggatacggagtcagaaaaggtcgtccaagaagccctggacaaggcgcgcgaaggacgcacttgcatcgtcatcgcacatagattgtccactatccagaacgcggatctcattgtggtgttccaaaacggacgggtgaaggagcatggaacccaccagcaattgcttgcccaaaaaggcatatacttctcaatggtgagcgtgcaagctggcacccagaacctg

SEQ ID NO: 200226 - DNA, 3858 bp, Artificial Sequence
  derived and/or modified sequence
atggatctggaggctgcaaagaacggtacagcctggcgcccgacatcggcagaaggcgatttcgagttaggtatctcctccaagcagaagcggaaaaaaacaaagacggtgaaaatgattggagttctaacgctcttcaggtattctgactggcaagacaaactgtttatgagcttggggacgatcatggctatagcacacgggagcggcctgccgctgatgatgattgtgtttggcgagatgactgacaagtttgtcgataccgccggaaattttagttttccagtgaacttctcgctttcacttttaaaccctgggaagattttggaggaagaaatgacgaggtacgcctattactacagtggccttggggcaggagttctggttgcggcgtacatccaggtgtcattctggactttggcagcaggaagacagattagaaagatacgacagaaattcttccatgcaatcctaaggcaggaaatagggtggtttgacattaatgataccacggagctgaacacaaggctgactgacgatatttcaaaaatttctgagggcatcggggataaagttgggatgtttttccaagcagtcgccacgttcttcgccggcttcattgtggggtttattcggggatggaaactcactctcgtgatcatggcaatttctccaatcttgggactgtccgcagcagtctgggccaagatcctgtcagcgtttagtgacaaggaactggccgcatatgcgaaagctggcgctgttgcggaggaggctctgggagcaattcgaacagtgattgcctttggcgggcagaataaggagcttgagagatatcagaagcacttggagaatgctaaagagataggaatcaagaaagctatctcagccaacatctctatgggcattgcctttctgcttatctacgccagttatgcacttgccttctggtatgggagcactctggttatctcaaaggaatataccatcggtaatgctatgaccgtgtttttcagtattctgatcggggctttctctgtcggtcaagcggccccctgtatcgatgcctttgcgaatgcgcgcggggcagcctatgtcattttcgatatcattgataataatcccaagattgatagttttagcgaacggggccacaagccagactctataaagggtaatctcgagtttaacgacgttcacttctcctatccttcacgcgcaaatgtcaaaattttgaaaggcttgaatttaaaagtgcagagcggacagactgttgctctcgtgggaagcagcggatgtgggaagtccactaccgtacagttaatccagcggttgtacgacccggacgaggggaccattaacatcgatggacaggacattcggaacttcaatgtaaactacctaagagagattatcggagtggtgtctcaagagcctgtcctgttctctaccaccatagcagagaacatctgctacggtagggggaatgtaaccatggacgagataaagaaggccgtcaaggaagctaatgcgtacgagttcatcatgaaactaccacagaaatttgacactctcgttggtgagcgaggtgcgcaactaagcggcggacaaaaacagcggattgcaatcgctagggccttggttcggaaccccaaaattctgctgttggacgaagcaacctcagcccttgacaccgaatctgaagctgaggtgcaggctgcgttagataaggcacgcgaggggcgcaccactattgttatcgctcatcgcctaagcactgtacgcaacgctgacgtaattgcgggcttcgaggacggagtgatagtggagcaaggttctcattcagagctgatgaaaaaggagggggtttacttcaaactagtcaatatgcagacaagtggatcacagattcagtccgaggagttcgagttgaatgacgagaaagccgcaacaagaatggcgcctaacggctggaagtctcgccttttcaggcactctactcagaagaatctcaagaactcgcagatgtgtcagaagtcactcgacgtggagacggatggccttgaagccaacgttccgccagtgtcattcctgaaggttctgaaactgaataagaccgagtggccatactttgtagtagggaccgtgtgtgcaattgccaatggcgggctccagcccgcatttagtgtcatattctctgaaataatcgccatctttggcccaggcgatgatgcagtgaagcagcagaagtgtaatatctttagtctaatcttcctcttcttagggattattagtttttttacctttttcctgcagggtttcacctttggaaaagccggggagattctcacccggcgcctgagatctatggcttttaaggcgatgctgaggcaggatatgtcgtggtttgacgatcataagaactccaccggcgccctgtcgacgagactggcaactgacgctgcacaggttcagggcgccacgggtacccgactcgctctgatagctcaaaacatagccaatttgggcacaggcattattattagcttcatctacgggtggcagctgacgctactgcttttggccgtggtgcccattattgcagtgtcagggatcgtggaaatgaagttgttggccgggaacgcaaaaagggacaagaaggagctcgaggccgcaggaaaaatcgccacggaggcaatagaaaacatacgtacggtggtgagcctgacccaggagcgcaaattcgagagcatgtacgtggagaaactctatggtccgtaccgaaacagcgtgcagaaggcccacatctacggtataacattttcaatctcacaggcttttatgtacttctcttatgctgggtgttttagattcggagcatacttgatcgttaatggccacatgcgcttcagggacgtcatcctggtcttctctgcgatcgtcttcggagctgttgcgttgggacacgcgagctccttcgcccctgactatgccaaggcaaaactgagcgctgcacaccttttcatgctgttcgaaagacaaccactcatcgactcttactccgaagagggcctgaaacccgacaagttcgaaggtaacatcactttcaacgaggtggtgtttaattatcccacacgtgcgaacgtgcccgttctgcaagggctgtcgctggaggtgaagaaagggcaaaccttagccttggttggcagttccggttgtgggaaaagcaccgtggttcagctccttgaaagattttacgatcccctcgccggcacagtattcgtggactttggattccaattactagacgggcaggaggccaaaaaactcaacgtgcagtggctccgggcacaattggggatcgtgagtcaggagcctattctgttcgactgtagtatcgccgagaacatcgcgtacggcgataatagtagagttgtctcacaggacgagatcgtgtccgccgcgaaagcagcaaacattcacccctttatagaaacattgccacacaagtacgagactagagtgggtgacaagggcactcaattgtcagggggccagaaacagcggattgccattgcgcgtgcactgattcgacagccacagattctgttactggacgaggccacctcagccctagacactgaatctgagaaagttgtgcaggaagccctggacaaggcccgggaaggtagaacctgcatagttatcgcccatcggctctctactatccaaaacgctgatctcattgtagtgtttcagaacggacgtgtgaaggaacatggtactcatcagcaactgcttgcacagaaaggaatttactttagtatggtgagcgtccaggcaggcacacagaacttg

SEQ ID NO: 200227 - DNA, 3858 bp, Artificial Sequence
  derived and/or modified sequence
atggatctcgaagctgcgaaaaacggtaccgcatggcgccccacctctgctgagggcgatttcgaactggggatatcatctaagcagaaacgaaagaagaccaagactgtgaaaatgattggtgtgctgactctttttagatacagtgattggcaggataagttatttatgagcctagggacaatcatggccatcgcccatgggtcgggactgcctctgatgatgatagtgttcggcgagatgacagacaagtttgtcgatactgctggtaacttttcatttcccgtgaacttcagccttagtctcttgaatcccggaaaaatactggaggaggaaatgactcgttacgcatactattactcagggctgggggccggtgtattagtggccgcgtatattcaagtctctttctggacgctcgccgccgggagacagattcgaaagatacggcagaagttcttccacgctattttgcgccaagagattggatggttcgatatcaatgacacaactgagctcaacaccagactgacagacgacattagtaagattagcgaggggataggcgacaaggtagggatgttcttccaagcagtcgccactttttttgccggattcatcgtcgggttcatcagaggttggaagttgacactggtgataatggccatttcacctatcctaggtctgtccgcggcggtgtgggctaaaattttgtccgcgttctccgacaaagagttggccgcatacgcaaaggccggagctgtggccgaggaagcgcttggcgccattcgtactgtgatagcttttggaggacagaacaaggagttggagagataccagaagcatctggagaatgccaaggagatcggaataaaaaaagcaatctctgctaatatttcaatgggcattgcatttctcttaatctacgccagttacgccctcgctttttggtatggcagtactctggtcattagcaaagaatacaccatcggtaacgccatgactgttttttttagtattctgatcggggctttcagtgtcggccaggctgccccctgcattgatgcctttgcaaatgctcgtggagccgcatatgtgatctttgacatcatcgataacaaccccaagatcgactcattctccgagaggggtcacaagcctgactctatcaagggaaacctggagtttaacgatgttcatttctcctacccttctagggccaacgtgaagattcttaaaggcctcaacttgaaagtgcaaagtggccaaaccgtggctctggtcggaagtagtggatgcggcaaatcaaccaccgtacaactgatccaacgactgtatgaccctgacgagggtaccatcaatatcgatggccaggatatccgaaattttaatgtgaattatttacgcgagattatcggagtcgttagccaggaaccagttttgttctccactaccatcgctgaaaatatctgttatggaagagggaacgtgacgatggacgagattaagaaggctgtcaaggaagccaacgcatatgagtttattatgaagctacctcagaagttcgataccctggtgggggagagaggcgcacagttgagcgggggacagaaacagagaatagcaatagcacgcgcgctggtccgaaacccgaagatactgttgcttgacgaggcgacctctgccttggacaccgaatcagaggcagaggtgcaagcagccctggacaaggcccgggaagggcgaacaacaatcgtgattgcccacagattaagtaccgtgaggaacgctgacgttatcgccggctttgaagatggcgtcattgtggagcaggggagtcattccgagctgatgaagaaagagggggtgtatttcaagctcgtcaacatgcagacttccgggtcacagatacagtccgaggaattcgaattgaacgacgaaaaggctgcaacgcggatggcccctaacgggtggaagtctaggctcttcaggcactcaacacagaaaaacctgaagaactcccagatgtgccaaaagtcccttgatgtggaaaccgacgggttggaagcaaacgtgccacccgtgtctttcctcaaagtacttaagctgaacaaaacagagtggccttactttgtcgtcggcaccgtgtgcgccatcgcaaacggcggattgcagcctgcgttttctgttatttttagcgagatcatcgcaattttcggacccggagatgatgcggttaaacagcaaaagtgcaatatcttttccctcatatttctgtttctggggatcatctctttctttaccttcttcctccaggggtttactttcgggaaggctggcgagatcctgactcgccgcctgaggagtatggcttttaaggcaatgctcaggcaggacatgtcgtggttcgatgatcataaaaatagtaccggggctctgtcgacccgcctggcgaccgacgcggcacaagtgcaaggcgcaacggggacacgtctggccctgattgcccaaaatatcgccaacctcggcaccggcatcatcattagctttatttatgggtggcagctaactctgctgttgctggccgttgtgcccataatcgcagtctcaggcatagtagagatgaaactactggccgggaatgccaaacgtgacaaaaaggagctcgaggctgcagggaaaattgcgactgaagctatagagaacatccgaaccgtagtgtccctgacgcaggaaaggaaatttgagtctatgtatgttgaaaagctctatgggccataccgaaactccgtgcagaaggcccacatctatggaattaccttctctatcagtcaggccttcatgtatttctcttatgctggctgcttcagatttggcgcctatcttattgtgaatgggcatatgagatttcgagatgttatattggtgttttccgccattgtgtttggagccgtggctttgggccacgcaagcagtttcgccccggactacgcaaaggccaagctgtctgccgcccatctgtttatgctgtttgagcgacagccactaatcgattcctactcagaagagggcctcaagcccgacaagttcgagggtaacattacttttaatgaggtggtgtttaattacccgactcgggccaatgttccggtcttgcagggactcagcctcgaggtgaagaagggacagaccttggctctagtgggaagctctggatgcggcaagtccacggtcgttcagcttctagagcggttttacgatcctctcgctggtacagttttcgttgactttggttttcaactactcgacggtcaggaagccaagaagttgaacgttcaatggctcagggcccaacttgggatcgtctcacaggaaccgattcttttcgattgcagcatcgccgagaatatcgcctatggagataattcccgtgttgtgagtcaggacgagatcgttagtgctgccaaggccgcaaatattcatccgtttatagagactctcccgcataaatacgaaaccagggtcggcgataagggcacacagttaagtgggggtcagaagcaaagaatcgcaatcgccagagcacttatcaggcaaccacaaattctcctgctggacgaggccacaagtgccctcgataccgagagcgaaaaggtcgtgcaggaggccctggacaaggccagagagggtcgcacatgcatagtgatcgcccatcggctgtctacaattcagaatgcggatcttatcgtggtgttccagaatggaagggtgaaagaacatgggacccaccaacagttgcttgctcagaagggcatctacttctctatggtatctgtgcaggctggaacacagaattta

SEQ ID NO: 200228 - DNA, 3858 bp, Artificial Sequence
  derived and/or modified sequence
atggatcttgaggctgcgaaaaacggtacggcgtggcgcccaactagcgctgagggggacttcgagctgggaatcagctccaagcagaagcgcaagaagaccaagacggtcaaaatgatcggagtgctgaccctcttccgttactcggactggcaggataaactgttcatgtccttgggtaccataatggccatcgcacacgggtcgggactcccgctgatgatgatcgtgttcggagaaatgacggataaattcgtggacactgctggaaatttcagctttccagtcaacttttcactttcgctcctgaatcctggaaagatcctcgaggaggaaatgacgcggtacgcatactactactccgggctgggagcaggtgtgctggtcgccgcatacatccaggtgtccttctggacccttgcggctggaaggcagatacggaaaatccgccagaagtttttccatgcaatcctgagacaggagataggatggtttgacatcaacgacaccaccgaattgaatacccgcctgaccgatgacatctcgaagatctcggaaggcatcggtgataaggtgggcatgttctttcaggccgtggctactttctttgcggggtttatagtgggatttatccgcggttggaagctcactctggtgataatggccatatcaccaatccttggcttgagcgcagctgtttgggcaaaaatcctgtccgccttttcggataaggaactggctgcttatgccaaggctggagccgtagctgaagaagctctgggagccattcgcactgtgatcgcattcggaggccagaacaaggagttggagagataccagaagcacctggagaatgcaaaggaaatcggaatcaagaaagccatctccgccaatatctccatgggcattgcgttcctccttatctacgcttcgtacgcattggctttttggtatgggtcgactctggttatctctaaggagtatactatcgggaacgctatgactgtgttcttctcaattctgattggcgccttcagcgtggggcaagccgccccgtgcatcgacgccttcgcaaacgcgagaggtgctgcgtatgtcatcttcgacattatcgacaataatccgaagatcgacagcttctcggaacgggggcataaaccagattcgatcaagggcaacctcgaattcaacgatgtgcacttttcttaccccagccgcgctaacgtgaagattcttaagggactgaacctgaaggtgcaatctgggcaaaccgtggcgctggtgggatcttctggatgcggaaagtcgaccactgtgcagctcatccagcgcctgtacgatccagacgaggggactatcaacatcgacggacaagacatcagaaatttcaacgtgaactaccttagagagatcattggagtggtgagccaggagccggtgctctttagcacgaccatcgcggagaacatctgctacggcagaggaaacgtgactatggatgaaatcaagaaggcagtcaaggaagccaatgcttacgaattcatcatgaagttgcctcagaagtttgacaccctggttggagaacgcggcgcgcagctctcaggagggcagaaacagagaatcgcaatcgctagagccctcgtcaggaatcccaagatcctcctccttgacgaggccacctcagcactcgataccgaatcggaagcagaggtgcaagcggctctggacaaggcgagagaagggcgcaccaccatcgtgatcgcccaccggttgtcgaccgtgcggaatgcagacgtcatcgctggattcgaggatggtgtcatcgtcgaacagggatcgcactcagaactgatgaagaaagaaggtgtgtactttaagctcgtcaacatgcagaccagcggctcgcaaattcagtcagaagaatttgagctgaacgacgagaaggcagccaccagaatggccccgaatggatggaagtcgagactcttcaggcattcaacgcagaaaaaccttaagaactcacaaatgtgccagaaatcgctggatgtcgagactgacggacttgaagccaatgtcccaccagtctcatttctcaaggtgctcaaactgaacaagactgagtggccgtatttcgttgtgggaactgtctgtgccatcgccaatggtggactgcagccggccttctcagtgatcttcagcgaaatcattgctatcttcggccccggagatgatgcagtgaaacagcaaaagtgcaacattttttcactgatctttttgtttttgggaatcatttcatttttcaccttcttcctgcagggattcactttcgggaaagccggagagatcctgaccagaagactccgctccatggccttcaaagcgatgctccgccaggacatgtcgtggtttgatgaccacaagaattcaactggagcgctttccactcggctggccactgacgctgcacaggtccagggcgcaaccggtacccggctggcactgatcgcccaaaacatcgccaaccttggcaccggaattatcatctcgttcatctatggttggcagttgactctcctgttgctggccgtcgtgccgatcattgcagtgtccgggatcgtcgaaatgaaactccttgcgggaaatgcgaaacgcgataagaaggagctcgaagccgccggaaagatcgccaccgaggccatcgagaacatccggactgtggtgtcactgacccaagagcggaagtttgaaagcatgtatgtggagaaactgtacggcccgtaccggaattccgtgcaaaaggcgcacatctacggaatcactttctccatctcacaggcgttcatgtacttcagctacgctggctgtttccggttcggcgcctaccttatcgtgaatggacacatgaggttccgcgatgtcatcctggtgttcagcgcgattgtctttggagcagtagcgcttgggcatgcctcatcgttcgcccccgattacgcaaaggctaaactctccgcggcccacctgttcatgttgtttgagcgccagccgctcatcgatagttacagcgaggagggcctgaaacccgataagttcgaaggcaacatcaccttcaacgaggtcgtcttcaattacccaacccgggctaacgtgcctgtgctgcagggactctcattggaagtgaaaaagggacagactctggcacttgtcggcagcagcggatgcggaaaatccaccgtggtgcaacttctggaaagattctacgatcccctggcgggaaccgttttcgttgactttggattccagctgctggatgggcaggaggccaagaagttgaatgtgcaatggctgcgggcccaactcggaatcgtgtcgcaagaaccgattctgtttgactgctccattgccgagaacatcgcatacggcgataattccagggtcgtctcccaggacgagattgtgtccgccgcaaaggcagctaacatccatccgttcatcgaaaccttgccgcataaatacgaaaccagagtgggcgataaggggacccaactctccggcggtcagaaacaacgcattgccattgccagagccctcatccggcagcctcaaattcttttgctggatgaagctaccagcgcgctcgacactgagtccgagaaggtggtgcaggaagccctcgacaaagcccgcgagggacgaacgtgcatcgttatcgcccaccgcctctccaccatccaaaatgctgatctgatcgtggtgttccagaacggacgggtgaaggagcatgggactcaccagcagctcctggcccaaaagggaatttacttcagcatggtgtcagtccaggctggaacccaaaacctg

SEQ ID NO: 200229 - DNA, 3858 bp, Artificial Sequence
  derived and/or modified sequence
atggacctcgaagcggccaagaatggtaccgcctggcgtccgacgagcgcggaaggtgattttgaacttggcatcagcagcaagcaaaagcgtaaaaagacgaaaaccgtcaagatgatcggtgtgctgaccctgttccggtatagtgactggcaggataaactgtttatgagcctggggaccatcatggcgattgcccacggctctggactgcctttaatgatgatcgtcttcggtgagatgaccgataaattcgtcgatacagccggcaatttcagcttcccagttaattttagcctgagcctgctgaacccgggcaagattcttgaagaagaaatgaccaggtatgcatattattactcagggctgggtgcaggagttctggtggctgcttacatacaggtgtcattttggaccctggccgccggcaggcaaatacgcaaaattcgtcagaagttttttcacgccattctgcgtcaggagattggctggttcgacatcaacgatacgaccgagctgaataccagattgacagatgacatttcaaagattagtgaaggtatcggtgataaagttggtatgttttttcaagccgttgccaccttttttgccggctttattgtgggcttcatcagaggctggaagctgacgttggtcatcatggcaattagcccaatcctgggactgtccgccgccgtttgggcaaagatcctgagcgcatttagcgacaaggagctggcggcctatgctaaagctggtgctgtcgcggaagaggccctgggtgcaatacggactgtgatcgccttcggcggccagaataaggagctggagcgctaccagaagcatttggaaaatgcgaaggagataggtataaaaaaggcaatcagcgcaaacattagcatgggtattgcgttcttgcttatctacgcgtcatacgcacttgcgttttggtacggtagtaccctcgttatctcgaaggagtataccatcggtaacgcgatgacagtgttttttagcattcttatcggtgctttcagcgtcggtcaagccgcgccttgcatcgatgcattcgcgaatgcacgaggagcggcatacgtcatcttcgacatcatcgataataatccgaaaattgacagttttagcgagcgtggtcataagccagactccatcaagggtaatctggaattcaatgacgtccactttagctatccctcacgcgcgaacgttaagattctgaagggactgaatctgaaagtgcagagcggccagactgtcgcgcttgtgggaagcagcggctgcggtaaatccaccaccgtccagctgatccagagattgtatgatccagacgaaggaaccattaacatcgacggccaggatatccgcaactttaatgtgaactatttgagagaaattatcggtgtggtgtctcaggaaccagtcctgttctctaccacgattgctgaaaacatatgttacgggcgcggtaacgttactatggatgagatcaagaaggctgttaaagaagccaacgcctatgaattcatcatgaaactgccccagaaattcgacaccttggttggtgagcgcggcgctcaactgagcggcggccaaaaacagcggatcgcgatcgcccgggccctggtccgcaacccgaagatcctgctgctggacgaagcgaccagcgctctcgacaccgagagcgaggccgaggttcaggctgctctggataaagcacgggagggtcgcacgacaatcgtgattgcgcatcgactttctaccgtgcgcaacgcggatgttatcgcgggttttgaagacggcgtgattgtggaacagggttctcacagcgaactcatgaagaaggagggtgtatatttcaagctcgtgaacatgcagaccagtggttcacaaatccaatctgaggagttcgagctcaacgacgagaaggcggcaacgcgtatggcgcccaacggctggaagtcccgcctgtttcgtcacagcacccaaaaaaaccttaaaaactcacaaatgtgccagaaatcattggacgtggaaactgatgggctggaagcgaatgtgcctccagtgagtttcctgaaggtcctgaagctgaacaagacggaatggccttattttgtcgttggtaccgtgtgcgctattgcgaatggcggcctgcagccggctttttctgtgattttcagcgagatcatcgctattttcgggcctggcgacgacgcagtcaagcagcagaagtgcaatatattctcgttgatcttcctgtttcttgggataatttccttttttaccttcttcttgcaaggcttcacctttggcaaagcgggcgagattttgactcgccgtctcagatctatggctttcaaggcaatgctgaggcaggacatgtcctggttcgacgaccacaagaacagtacaggcgccttgagtactcgactggcgaccgatgcagcacaggtgcagggagctaccggcacccgcctggctttaattgcccaaaacattgcaaatttaggaacgggtattattatttcctttatttatggctggcagctgacgctgctgctgctcgcggtggttccgattatcgccgtcagcggaattgttgaaatgaaactgctcgccggtaacgcaaagcgggataagaaggaactggaggcagcaggtaagatcgcaaccgaagctatcgaaaacatcaggaccgtggtctcgctgacccaggagcggaaatttgagtccatgtatgtcgaaaaactgtacggcccgtaccgtaacagcgtgcagaaagcccacatctatgggatcacgttcagcatctctcaagccttcatgtacttctcatacgcgggttgctttcgctttggagcatatctcattgtcaatgggcacatgaggttccgcgacgttatcctggtgtttagcgctattgtcttcggtgccgtggcactgggccatgcttcctcatttgcgccagattatgctaaagccaagctttccgccgcccatctgttcatgctgttcgagcgacagcctctgattgacagctattctgaagaggggctgaaaccggacaaatttgagggtaatattacttttaatgaggttgttttcaactatccaactcgcgcgaacgtgccggtcctccaaggcctcagcctggaggttaagaaaggccagactttggcgctggttggttccagcggatgtggtaagagtaccgttgtccagctgctggaacggttctacgatcccttggccggcaccgtattcgttgacttcggcttccaactcctggacggccaggaagccaaaaaactgaacgtccaatggctgcgcgcgcagctgggtattgtgagccaggagcccatcctttttgactgttcgattgcggagaacatagcctacggtgacaacagccgagttgtgagccaggacgaaattgtttcggctgccaaagcagctaatattcacccgtttatcgagactctgccgcataaatatgagacccgggtgggcgacaaaggcacccagttgagcggaggacagaagcaacggatcgctattgcgcgtgcactgatccgtcaaccacaaattctgctgctggatgaggctacgagcgcgctggacacggagagcgaaaaagtagtacaagaggccctggataaagcccgggaaggccgcacctgcatcgtgatagcgcatcgactgtcgaccattcagaatgcggacctcatcgttgtcttccagaacggtcgcgtgaaagagcacggtacccaccagcagctcttagcacaaaaaggcatctactttagcatggtctcagtccaggcgggaacccagaatctg

SEQ ID NO: 200230 - DNA, 3858 bp, Artificial Sequence
  derived and/or modified sequence
atggacttagaggcagctaaaaatggcactgcttggcgcccaacctctgccgaaggcgattttgaactgggaatttctagcaagcagaaacgcaagaagaccaaaaccgtgaaaatgataggcgttctcactctctttagatattccgactggcaagataagctcttcatgtctctcgggacaataatggctatcgctcacggtagcggtctacctctcatgatgattgtctttggcgaaatgaccgataaattcgttgacacagccgggaattttagcttcccggtgaattttagccttagcctgctaaaccccggcaaaattctggaagaagagatgactcgatatgcctattactattctgggctaggcgccggagttctggtggcagcgtatatacaggtctccttctggactctggcggccggccgccaaatccgaaagatcaggcagaagtttttccacgccatactgagacaggagattggctggttcgatattaacgacactacggagctcaacacaagactgaccgacgatataagcaaaatctccgagggcataggggataaagtggggatgttctttcaggcagtagctactttcttcgccggttttattgtcggctttatccgaggctggaagctgacattagtgatcatggccatcagtccaattcttggtctgagcgccgcagtgtgggctaaaattctgagtgctttctcagataaagagctggcggcttacgccaaagcaggggccgtggcagaggaggcacttggcgctattaggacagtgattgccttcggcggacagaacaaggagctggagcgctaccaaaagcacctggagaatgcgaaagagattgggatcaagaaagccatcagtgcaaacatttcaatgggaattgcattcttactgatttatgcatcctatgccctggccttctggtatggttcaactctggtcatttctaaggaatacacgatcgggaacgccatgactgtcttcttctcgattctgattggcgcattttcagtggggcaggctgcgccatgcatcgatgcgtttgctaatgctagaggtgcggcttacgtaatctttgatatcatagacaacaacccaaaaattgacagtttttctgaacgtggccataagccggactctatcaaaggcaacctggaatttaatgacgtgcactttagctatccttcgcgagcaaacgtgaagatccttaaaggactgaacctgaaggtacaatctggccagaccgtggccctagttggatcctcagggtgtgggaagtctactactgtccaattaatccaacggttgtacgatccagatgaaggaacgataaatatcgacgggcaagatatcaggaatttcaacgtgaactatcttcgggaaataatcggcgtggtctcccaggaacccgttctattttcaacaacgatcgcagagaatatctgctatgggaggggtaacgtgacaatggacgaaataaaaaaggccgtaaaagaggcaaacgcatatgagttcattatgaagttgccacagaagttcgacaccttggtgggggaaaggggtgctcagctaagtggggggcagaagcaaagaattgctatcgctcgagcgttagtacgcaatcctaagatcttgctgctggacgaggccacttccgctctagacacagaatctgaggctgaggttcaagctgccctcgacaaggctcgggaggggcgcactacgatcgtgattgcacatagattgtccaccgtccgcaacgccgacgttatcgccggatttgaggatggcgtaatcgtagagcagggctcacactccgagttgatgaagaaagaaggagtgtactttaaattagtcaatatgcagacctcaggatctcaaatccaatctgaggaattcgaactgaatgacgagaaggcggccacacggatggccccaaatggatggaaatcacggctgtttagacacagcacgcagaagaatctcaaaaacagccagatgtgtcagaagtccctcgatgtcgaaacagacggcctggaggcgaatgtgccacccgtgtcttttttgaaagtcttgaagctaaataaaactgagtggccctacttcgtggtcggcaccgtgtgtgcaattgcaaatggaggcctacagccagctttcagcgtaatcttctctgaaattattgctatcttcggcccaggcgatgacgccgttaagcagcaaaaatgtaatatcttcagtctcatatttttgtttctgggaatcatttcattcttcactttctttttgcagggtttcaccttcggcaaagccggggagatcctgaccagaagactgaggtctatggctttcaaagccatgttgaggcaggatatgagctggttcgatgaccacaagaactccaccggagcgctttctactaggctggcgacagacgccgcccaggtccaaggcgcgaccggcacacgactagctctcatcgcacagaacattgcgaacctgggcacaggcatcattattagctttatttacggatggcagctcacacttctgctcctcgcagttgtgcccattattgcagtcagtggaattgtggaaatgaagctccttgcaggcaatgcgaagagggacaaaaaggagctggaggccgcaggcaaaatcgcgactgaagctattgagaacattcgcactgtcgtgagtttaacccaggaaagaaaattcgaatctatgtacgttgaaaagctatatggtccttaccgtaactccgtgcagaaggcgcacatttatggaataactttttcaatcagtcaggccttcatgtacttctcatatgctggatgttttcgatttggggcttacctcattgtcaacggacatatgcggttcagggatgttattctcgtattttctgccatagtgttcggcgctgtcgctctgggacatgcttcaagtttcgcccccgattatgccaaggccaagctgtccgccgcacatctcttcatgctattcgagcgacagcccttaatcgatagttattccgaagaaggcctcaagcctgataagttcgagggcaatataacatttaacgaagtcgtgtttaactatcctacgcgcgctaacgtgcccgtcttgcagggcctgtccctggaggtgaagaagggacaaaccctagctctggtcggttcgtcggggtgcggcaagtcaactgtcgtccagctcctggaacggttctacgaccccttggctggaactgtattcgtcgattttggtttccagctgctcgatggccaagaggccaaaaagctgaacgtccagtggctcagggcccagttaggtattgtgagtcaggaacctatactatttgactgctccatcgcagaaaatattgcttatggtgacaacagtagagtggtgagccaggatgagatagtgtctgccgccaaggccgctaacatacacccgttcatcgagactcttccacataaatatgaaacccgagtcggggacaaaggcactcagctcagcggagggcagaagcagcggatagctatcgctcgggcgctgataaggcagccacagatcctcctcttagacgaggctactagcgctttagacacagagtctgagaaagtggtgcaagaggccctggataaagcacgtgaaggacgcacgtgtatcgtgattgcccatagactgtctaccattcagaacgccgaccttattgtggtatttcaaaacggtcgggtgaaggagcacggaacacaccagcagcttctagctcagaagggtatctacttttctatggtcagtgtgcaagcaggtacacaaaatctc

SEQ ID NO: 200231 - DNA, 3858 bp, Artificial Sequence
  derived and/or modified sequence
atggacttggaggctgccaagaacggcactgcatggcgccccacatccgctgagggagattttgaactgggcatcagttctaaacaaaagcgcaaaaaaacaaaaaccgtgaagatgatcggggtcctgactctctttagatacagcgactggcaagacaaactgtttatgtcattgggcactatcatggcaattgctcatggctccgggctgccattgatgatgatcgttttcggtgaaatgactgataagtttgtagacaccgctggcaacttcagttttcctgttaacttttcacttagcctgctgaaccccgggaaaatcttggaagaagaaatgaccaggtatgcatactactacagtggcctcggagctggggtcctggttgccgcctacatccaagtgtctttttggaccctggctgcaggcagacagattcgcaagataaggcagaaattcttccacgctatcctgcgtcaggaaattggctggttcgacataaatgatacaacagaactcaatactagactgaccgatgatattagtaaaatatcagaagggatcggagacaaagtgggaatgtttttccaggccgtcgccaccttttttgcaggcttcatcgttggattcatcagggggtggaagctgaccctagttatcatggcgatttcaccgatcctgggtctgtctgctgccgtttgggctaaaattttatctgctttcagcgataaggagctggctgcttacgccaaggctggagccgtcgcagaagaggccctcggagccatcagaaccgtcattgcgtttggtggccagaacaaagaacttgaaaggtaccaaaagcacttggaaaacgcaaaagagatcggaataaaaaaggcgatcagtgctaatatcagcatgggaatcgcattcttactgatctacgcaagctacgcgttagccttttggtatggtagcacacttgtgatttccaaagagtacactatcggcaacgctatgactgttttcttcagcatacttataggagcttttagcgtcggtcaggcagctccgtgcatagatgcgtttgctaacgctcggggcgccgcatacgttattttcgatatcattgacaacaaccctaagattgactcgttttctgaaaggggacacaagcctgactcaatcaagggtaacctggagttcaacgacgtacactttagctaccccagtagggctaacgttaaaattctaaagggcctaaaccttaaagtacagagcggacaaaccgtcgccctggtagggtcctcaggatgtgggaaatcgacaaccgtgcaactcatccagagactttacgacccagatgaaggcaccataaacattgatggccaagacatccggaacttcaatgtgaactacctgagagaaataatcggagtcgtgtctcaggaaccagtgcttttttcgaccacgattgccgaaaatatttgttatggcagagggaacgtgacaatggacgaaatcaaaaaagcagtgaaagaagctaacgcatacgagtttatcatgaaacttccccagaagtttgatacactcgtgggagaaagaggagctcaacttagcggtggacagaaacaaagaatcgcgatcgctcgtgcacttgtccggaaccctaagatattgttgctggacgaggctaccagcgcattggacaccgagagcgaagcagaggttcaggcagcacttgacaaagccagagaagggcgaactaccatcgtgatcgcccaccgcctctcaactgtccggaacgcggacgtcatcgcagggttcgaggatggcgtgattgtagagcagggatcacatagtgagttaatgaagaaagaaggcgtttattttaaactggtgaacatgcaaacatctggatctcagattcagagcgaagaatttgagttgaatgatgaaaaagcagccacgagaatggcgccgaacggatggaaaagtagactgttcagacactctacccagaaaaacctcaagaacagtcagatgtgtcaaaagagtttagacgtagaaaccgacggacttgaggctaacgtgcctcctgtaagctttctgaaggttctcaagttgaacaagaccgagtggccctactttgtcgttggcaccgtgtgcgccattgccaacggcggactgcaaccagcttttagcgtgattttcagcgaaatcattgctatctttgggcccggtgacgatgcagtcaaacaacaaaaatgtaatatcttcagtctgattttccttttcctgggcataatttccttcttcaccttctttctccaaggctttaccttcggcaaggcaggggaaatcctgactaggaggctcaggtccatggctttcaaagccatgctgaggcaggatatgagttggtttgacgatcacaagaactccaccggcgctctgtccacacgcctagccacagacgcggctcaggtccaaggggcaactgggacaaggttagccctgatagcccagaacatcgccaacttgggaaccggaatcatcatctctttcatatatggctggcaactcacacttttgttgctggcagttgtaccaatcatcgccgtatcaggaatcgtcgaaatgaaacttctcgctggaaatgctaagcgcgataaaaaggagctggaagccgctggtaaaatcgccacagaagctatcgagaatatccggactgtcgtgtcgcttacccaagagaggaaattcgaaagcatgtacgtagaaaagttgtatggcccatatagaaacagtgtccaaaaagctcacatttatggaataaccttttctatttcccaggcgtttatgtatttctcctacgctggctgttttcgatttggtgcatacctcatagtcaacggacacatgcggttccgggacgtcatattagtattctccgctatcgtgtttggcgccgtggccctggggcacgcctccagcttcgcacccgattacgcaaaagccaaactctccgctgctcacttatttatgctgttcgagaggcagccactaatcgatagctactccgaagaaggccttaagcccgataaatttgaaggtaacataacattcaatgaggtggtctttaactatcctacaagggcaaatgttccagtacttcagggcctcagcctggaagtgaagaagggacaaacactcgcgctggtgggaagctctggatgcggaaaatcaaccgtggttcagctgttggagcgtttttacgatccgctggcaggaacagttttcgtcgattttggcttccagctcctggacggccaagaagcaaaaaaacttaatgtgcagtggctgagggcccagcttggaatcgtgagtcaggagcctatcctcttcgattgctctatcgctgagaacattgcctatggggataactcaagagttgtgagtcaagatgaaattgtcagcgcagcaaaagctgctaacatccatccatttatcgagactcttcctcacaaatatgagaccagagtgggggacaaggggacgcagctctcgggtggtcagaagcaacgtatcgctatcgctagagccctcattcggcagccccaaattctgttgttagacgaggcaacatcagcgcttgatacagagtcagaaaaggtggtgcaagaagcacttgacaaagctcgcgaagggaggacatgcatagtgattgctcacaggttgagtaccatacagaacgcagatttgatcgtcgtctttcaaaatggtcgtgtgaaggagcacgggactcatcaacaactcttggcacagaaggggatctacttttctatggtttcggtacaggcagggacacaaaacctg

SEQ ID NO: 200232 - DNA, 3858 bp, Artificial Sequence
  derived and/or modified sequence
atggacttggaggccgcgaaaaatggtaccgcttggcggcccaccagcgctgaaggagacttcgagcttggaatcagctcgaagcagaaacgcaagaaaactaagactgtgaaaatgatcggagtcctcaccctgtttcggtactcggattggcaggataagctgttcatgtccctggggaccatcatggccatcgcgcacggatcaggcctgccgctcatgatgatcgtctttggcgagatgaccgacaagttcgtggataccgcgggcaacttctcatttccagtgaacttctctctctcccttctgaatccgggcaaaatcctggaagaagagatgacgagatacgcgtactactactccggattgggagccggggtcctggtggccgcctacattcaggtgtcattctggactctcgccgcggggcgccaaatccggaaaatcagacagaagttcttccacgccatcctgcggcaggaaatcgggtggttcgatattaacgacactactgaactcaatacccgcctgactgatgatatcagcaaaattagcgaaggaatcggtgataaggtgggaatgttttttcaagccgtcgctactttcttcgccggatttatcgtgggattcatccgaggatggaagctgacccttgtcatcatggctatcagcccgattttgggacttagcgcagccgtctgggcgaaaattctgtcggctttctccgacaaggaactggcagcgtacgcgaaggccggagctgtggctgaggaggccctcggtgctatccgcaccgtgatcgcgtttggaggtcagaataaagagttggaaagataccaaaaacacctcgagaacgctaaggaaataggaatcaaaaaggcaatttctgctaacatcagtatgggcatcgctttcctcttgatctacgcgtcctatgcactcgcgttctggtacggctcgactctggtgatctccaaggaatacactatcgggaatgccatgaccgtcttttttagcatcctcattggagccttcagcgtcggacaggcggccccctgtatcgatgcattcgccaacgccaggggcgccgcctacgtcatcttcgacattattgataacaatcctaaaatcgactccttctccgaacggggccacaagccggacagtatcaagggaaacctggagtttaatgacgtccatttctcatacccctcccgggccaatgttaaaatcttgaagggactcaatctgaaggtgcagtcgggacagactgtggcactcgtcggatcgtcaggctgcggcaagtcaacgacggtgcagctcattcagcgcctgtatgatccagacgaaggaaccatcaatatcgacgggcaagatatccggaatttcaacgtcaactacttgcgagaaatcatcggtgtggtgtcgcaggaaccagtcctgttctcgactaccattgccgagaacatttgttacggccgcgggaacgtgactatggatgaaatcaagaaggcagtgaaggaagccaatgcgtacgagttcatcatgaaattgccgcagaagttcgacaccctggtgggtgagcggggagcgcagctgagcggaggacagaagcaaagaatcgccatcgcacgggcgctggtgcgcaaccctaagatcctgctgctggacgaagcaacttccgccctggacacggagtcagaggccgaggtgcaagctgcccttgacaaggccagagagggcaggaccacgattgtgatcgcccacagactgtcgaccgtccgaaacgctgatgtgatcgctggattcgaggacggagtcatcgttgagcaagggagccacagcgaactcatgaagaaggaaggcgtgtacttcaagctggtaaacatgcaaacgtccggttcccaaatccaatctgaggaattcgaactgaacgatgaaaaagcagcgactcgcatggcaccaaatggatggaagtcccgcctcttcagacactcaacccagaagaacctgaaaaattcgcagatgtgccagaagtcgcttgacgtcgaaaccgacggcctggaagcgaacgtgccgcctgtgtcgttcctgaaggtcctgaagctgaacaagaccgaatggccttacttcgtggtggggactgtctgcgctatcgctaatggcgggctccagccggccttctcagtgatcttcagcgagattatcgccatcttcggtccgggcgacgacgcggtgaagcaacagaagtgcaacattttttcgctcatctttctgttcctcggaatcatctcgtttttcaccttcttccttcaaggcttcacctttggtaaagcgggtgagatcctcactcggaggctgcggtcgatggcgttcaaagcaatgctccggcaggacatgtcgtggttcgacgatcacaagaatagcactggcgccctgtccactaggctcgccactgacgcggcccaagtgcagggagctactggaacccgcctggcgctcatcgcgcaaaatatcgcgaatctggggaccgggatcatcattagctttatctacgggtggcagctgactctcctgctgttggcggtggtgccgatcattgctgtgtcgggaattgtggagatgaagctcctggcaggcaacgccaagagggataagaaagagctggaggcagccggaaagatcgccaccgaagcaatcgagaacatccggaccgtcgtgtctctgactcaagaacgcaagttcgaatcaatgtacgtggaaaagctgtatggcccgtaccggaactcggtccagaaggcccacatctacggcatcactttctccatcagccaggccttcatgtacttttcatacgctggatgcttccgcttcggcgcatacctcatagtcaacggacacatgcgctttagggacgtgatactcgtgttttccgccatcgttttcggtgccgtggcactgggccatgcaagctcgttcgccccagactacgcgaaagcaaaactgtcggcggcccatctgttcatgctgtttgaacggcagccgcttattgactcgtactcagaggaaggactgaaacctgataagttcgagggaaatatcacctttaacgaagtcgttttcaactacccgactagagccaacgtgcccgtgctccaaggactctcattggaagtaaagaagggccaaaccctggccctggtcggaagctcgggatgcgggaagtccactgtcgtgcagctcttggagaggttttacgatccactggcgggcactgttttcgtggatttcggatttcaactcctggacggacaagaagccaaaaagctgaatgtccagtggcttagagcacagctgggaatcgtgtcacaagaaccaattctgttcgactgctcaatcgccgaaaacatcgcatacggggacaactcgcgcgtggtgtcccaggatgagatcgtctccgcggcaaaggctgccaacattcatcctttcatcgaaacgcttccgcataagtacgaaactcgcgtgggagacaaaggaacccaactgtccggtggacagaaacagcgtatcgcaatcgctagagctctcatacgccagccacagatcctcctgcttgatgaggccacgtccgcattggacaccgagagcgaaaaggtggtgcaagaggcgctggataaggcccgggaaggccgcacctgtatcgttatcgcacatcgcctttcaaccatccagaacgccgacctcatcgtggtgttccagaacggtagagtgaaggagcacggaacccatcaacagctgcttgcccagaagggaatctatttcagcatggtgtccgtgcaggctggaacccagaacctc

SEQ ID NO: 200233 - DNA, 3858 bp, Artificial Sequence
  derived and/or modified sequence
atggacctggaagccgcaaagaacggcacggcatggaggcccacttcggcggagggcgatttcgaactcggtatttcctcgaagcagaaacggaagaaaaccaagacagtcaagatgataggggtacttacactgttcagatactccgactggcaggataagctatttatgtccttgggaactattatggcaatcgcccatggctccggactacccctgatgatgatagtcttcggcgagatgaccgacaaatttgtggacacggccgggaacttctctttcccagtcaacttttcactttctctgctgaatccagggaagattctcgaggaggagatgacacgttacgcatattactattccggactaggcgccggggtgctagtggcggcctacattcaggtgtctttctggacattagctgccgggcgccaaatcaggaagataagacagaaattttttcacgccatccttaggcaggaaattggatggttcgacatcaatgacacaacggaactgaatacccgcctaactgatgacataagtaagatctctgaaggcatcggggataaggtggggatgttttttcaggccgtcgcgacatttttcgccggatttattgttggctttatcaggggctggaaactcacactggttatcatggctatttcaccgattctcggcctgagtgccgctgtctgggctaaaattctcagcgctttttcggacaaggaactggccgcatacgccaaagcaggggccgtggcagaggaggctctgggcgcaatccggaccgtcattgcttttggaggacaaaataaagaactggagcggtatcaaaagcacttggaaaacgccaaggagataggcataaaaaaagccatctcagccaatatcagtatgggcatcgctttcctactgatctacgcgtcctatgctctcgcattttggtacggatcaaccctggtgattagcaaggaatatacaattggaaacgctatgaccgtattcttctccatcctcatcggtgccttcagcgtgggtcaggcagccccatgcatcgacgcctttgctaatgcaaggggggctgcctatgtgatcttcgatatcatcgataataaccctaaaatcgactcgtttagcgaaaggggtcataagcccgactcgattaaaggcaacctggaattcaacgacgtgcacttcagttaccctagccgggctaatgtgaagattctgaagggactcaacttgaaagtacaaagcggccagacagttgccctggtcggatctagtggctgcggtaaatcgacaaccgtccagctgattcagagactgtatgatccagacgaggggaccattaacattgacggtcaggatatccgcaatttcaacgtgaactacctacgggaaattatcggcgttgtgtctcaggaacccgtgttattctctacgaccatagcggagaacatttgttacggaagggggaacgtcacgatggacgaaatcaaaaaggcagtgaaggaggcgaatgcctacgagttcattatgaaacttccacaaaagtttgacaccctagtgggcgaacggggagctcagctttccggcggccagaagcagaggattgcaattgcacgcgcgctagtcaggaaccctaagatcctgctgttggacgaggctacatctgcacttgacacagaatccgaagcggaggtgcaggcagccttggacaaggcccgggagggcagaaccacaatcgtcatcgctcatagattaagcaccgtccgcaatgcagatgttatcgcgggcttcgaggacggggttattgtggagcaggggtcccacagcgagctgatgaagaaggagggggtttacttcaagctggttaatatgcagacttcagggtcgcagattcagagcgaagagtttgagctgaacgacgaaaaagctgccactaggatggctccaaacggatggaagtctcgactatttcgccactccacacagaagaatctgaagaactctcagatgtgtcagaaatctctcgatgtcgagactgacggcctggaggcaaatgtgccacccgtgtccttcttgaaagttcttaagctcaataaaaccgagtggccgtatttcgtagtaggcaccgtctgtgcaatcgccaacgggggcttgcagccagccttctcagtgatcttttctgagatcatagcaatctttgggcccggggacgatgctgtgaagcaacagaagtgcaatatcttcagccttattttcctcttcctcggcattatctcatttttcacatttttcctgcagggattcacattcggcaaagcgggggagatcttaacccgaagattacgaagcatggccttcaaggccatgttaaggcaggatatgtcttggttcgacgatcacaagaacagtaccggtgccctgagtacccgcctggcaacggatgccgcgcaagtccagggggcgactgggacaaggctggcactgatcgcgcagaatatcgccaatttagggacaggaattataatctcctttatatacggctggcaactgacacttctcctgctggcagtcgtgcccataatcgcagttagcggcatcgttgaaatgaagctgctggccgggaacgcaaagcgggacaagaaggagttggaggctgcaggaaagatagccactgaggcgatcgaaaacattaggacagtggtgtctctgacccaagagcggaagtttgagtccatgtacgtagagaaactgtatggtccctacagaaactccgtgcagaaggcacatatttacgggataaccttttcgatctcccaggcattcatgtacttttcctatgctggatgctttcggttcggcgcttacctgattgtgaatggtcatatgcgatttcgcgacgtaatactcgtattcagtgcgattgtgtttggggcggtcgcccttggccatgccagttcatttgctcctgattacgccaaggccaaactgtcagctgcgcacttgttcatgctgttcgaacgccagcccctcattgacagttacagcgaagaggggctaaaaccagataaattcgagggcaacattacgtttaacgaagtggtgttcaactatcccactagagcaaacgttcctgtcctgcagggcctttcactggaagttaaaaaaggccagacactggctctcgtgggcagttcaggatgcggaaagtccactgtcgtccagctgctagagcgtttctacgaccccctcgcaggcacggtttttgttgacttcggattccagctccttgacggccaggaggcgaaaaagcttaatgtacaatggctgagggcacagttgggaattgtcagccaagagccaatcctttttgactgcagtattgccgaaaacattgcgtatggggacaactcacgagttgtgagccaggacgagatcgtcagcgccgcaaaggcggcaaacatccacccattcatagaaactctgccccacaaatacgaaacacgagtgggtgacaaggggacccagctgtctggcggccagaaacagcggattgcgatagcaagagccctcattcggcagcctcagattttactactggatgaggcgacctccgctctggacacagagtcagaaaaggtcgttcaagaggcactggacaaggcccgggaagggcggacttgcatagtgattgcccatagactgagcacgatccagaacgctgatctcatcgtagtttttcaaaacgggagagtcaaggagcatgggacacaccagcagcttctggcgcagaaggggatctatttcagcatggtctctgtccaggcagggactcagaacctg

SEQ ID NO: 200234 - DNA, 3858 bp, Artificial Sequence
  derived and/or modified sequence
atggacctggaagcagccaagaacggaaccgcatggcgtccaactagcgctgaaggagattttgaactgggtatatccagcaagcaaaagcgcaaaaagactaagaccgtgaagatgatcggcgtgctgaccctgttccgatactcggattggcaagataagctgtttatgagcctggggaccattatggcaattgcacatgggtccggcctgccacttatgatgatagtctttggagaaatgaccgacaagttcgtggatactgcgggaaacttttccttcccagtgaacttttccctttccctcctgaaccctgggaaaattcttgaagaggagatgactagatacgcatactactactcaggactgggagccggtgtccttgtggcggcctacatacaggtgtcattttggactctggctgcaggacgccaaattcgcaagattagacaaaagttcttccatgcaattctgcgacaggaaattggttggttcgatatcaacgacaccaccgaactgaatactcggttgaccgatgatatatccaagattagcgagggcattggtgataaagtgggaatgtttttccaggccgtggcaacttttttcgccggttttatcgtcggctttattcgcggatggaaactgaccctcgttatcatggccatcagcccaatactgggactctcggcggccgtctgggccaagattctgtccgcgttttcggataaggaactggcagcgtacgcaaaggcaggagcagtggcagaagaagccctgggagcaattagaactgtcatcgcctttggcgggcagaacaaagagttggaacggtaccaaaagcatcttgaaaatgcgaaagaaatcggaattaagaaggcgatttcggcaaacatctcaatgggcattgcatttctgttgatctacgccagctacgctcttgcgttttggtacgggtccacccttgtgatctcgaaggaatacaccatcggaaacgcaatgaccgtgtttttctccatacttattggtgctttttcggtggggcaggcagcgccctgtatcgatgcatttgcgaacgcacggggagccgcctacgtcatcttcgatatcatcgacaacaaccccaagattgacagctttagcgaacgaggtcataagcccgatagcattaagggtaatttggagtttaatgatgtccatttttcgtacccaagccgggctaatgtgaagattctgaagggacttaatctgaaagtgcaatctggtcagaccgtcgcccttgtgggtagcagcgggtgtggaaagtcaacgactgtgcaactgattcaacgcctttacgacccagacgaagggacgatcaacattgatggtcaggatatccggaactttaatgtgaactacctgcgtgaaatcattggcgtggtgtcgcaggagccagtgctgttttctactactattgctgaaaacatctgttacggtagaggaaacgtgactatggacgaaatcaaaaaggcggtgaaagaggcaaatgcatacgagttcattatgaaactccctcaaaagtttgacaccctcgtgggcgagagaggggcacaacttagcggaggtcagaaacagagaatagccatcgcccgtgctctcgtccgaaacccaaagatcctcctgctggatgaggcaacttcggcgctggatacggaaagcgaagcggaggtccaggcagccctggataaagcgcgcgaagggaggactacgatagtgattgcacatagactctccaccgtcaggaatgcagatgtgatcgcagggttcgaagatggtgtgattgtggagcagggttcgcatagcgaactcatgaagaaggaaggggtgtacttcaagctcgtgaatatgcaaacctctggttcacaaatccaatccgaggagtttgaacttaacgacgagaaagctgcaactagaatggcaccgaacgggtggaagtccaggctgttccgccattcgacccaaaagaacttgaaaaactcacagatgtgccaaaagtctcttgatgtcgaaaccgatggacttgaagccaatgttccgcctgtgtccttcctcaaagtgctcaaacttaacaaaacggaatggccctatttcgtggtgggtactgtgtgcgccatcgccaacgggggtctgcagcctgcattttcggtgattttctcagagatcatcgcaatctttgggcctggggacgacgcagtgaagcagcaaaagtgcaacatcttctcactgatctttctgtttcttgggatcattagcttctttacttttttcctgcaaggatttacctttggaaaggcaggtgaaattctcacccggagactgagatccatggcatttaaggcgatgcttagacaagacatgtcatggtttgatgatcacaagaattccactggagctctgtccaccaggctggctaccgacgccgcgcaagtccaaggtgcaacggggacccgtttggcacttattgcacagaacattgcaaacctcggcacgggaattatcatttcatttatctacgggtggcaactgaccctcctgctgctggcagtggtgcctattatcgccgtttcaggcatagttgaaatgaaactgctggcaggcaacgccaagagagataagaaagaactggaagctgcaggtaaaatcgctaccgaagcaattgaaaacatcagaactgtcgtgtcactgacccaggaaaggaaatttgagtccatgtacgtggagaagctgtacggtccttaccggaatagcgtgcagaaagcccatatctacggaattaccttcagcattagccaagcattcatgtatttctcctatgcaggttgttttcgatttggagcttacctcatcgttaatggtcacatgagatttagagacgtgatcctggtgttttccgcgattgtttttggtgcagtcgcactcgggcatgcatcatcattcgcaccagactacgcgaaggcgaaactgtcggcggcacatctgttcatgctgttcgagcgtcaacctctcattgatagctactcggaagagggtcttaagccagataagtttgaaggaaacatcactttcaatgaagtggtgttcaattaccccactcgagcaaatgtcccagtgcttcagggcctttccctggaagtgaaaaagggtcagactcttgccttggtgggatcgtcgggttgcggaaagtcgaccgtggtgcaactcctggaaagattctacgatcctctcgcagggactgtgtttgtggactttggattccaactcctcgatggacaagaagctaaaaagctcaatgtgcaatggctccgggcgcaattgggcattgtgtcccaagaacctatacttttcgactgttcaattgcagaaaacattgcttacggagacaacagccgggtggtgtcccaggatgaaattgtgtccgcagcgaaagccgcaaatatccatccttttatcgaaaccctgccccacaagtacgaaacccgggtgggtgacaaaggcactcagcttagcgggggtcaaaagcaacgcatcgcaattgcacgcgcgttgattaggcagccccagatcctcctgttggatgaagccacttctgccctcgacaccgaatccgaaaaggtggtccaagaggcactggataaagcacgcgaaggaagaacgtgcatcgtcatcgcacaccgactcagcactatccaaaacgctgatctgatcgtcgtctttcaaaacgggcgagtcaaagaacatggaactcaccaacagttgttggctcagaagggaatctactttagcatggtgtcagtgcaagccggtacccagaatttg

SEQ ID NO: 200235 - DNA, 3858 bp, Artificial Sequence
  derived and/or modified sequence
atggatctcgaggctgcgaagaacggtacagcatggagacctacctctgcagaaggggattttgagctgggaatctcttctaaacagaagcgcaaaaaaaccaaaacagtaaagatgatcggcgtgctaactctctttcggtacagtgactggcaggacaagctgtttatgagcctggggacaattatggcaatcgcccacggatccggactgcccctgatgatgattgtgttcggcgaaatgaccgataagttcgtggatactgctgggaacttttctttccctgtcaatttttcgttgtcactgctgaaccctgggaaaatcctcgaggaggagatgactagatacgcttattattacagtggcctgggggcgggcgtactggtggccgcgtacattcaggtatctttctggactctcgctgcagggagacagatccgcaagataaggcagaaatttttccatgccattttgcggcaggaaatcggctggtttgatatcaatgataccacggaattgaacactcgtctaaccgacgatatctccaaaatcagtgaaggtatcggggataaagttggcatgttttttcaggccgtggctaccttcttcgccggattcatcgtcgggtttattagggggtggaaactgacactggtcatcatggcaatttccccgattctcggactgtctgcagcggtgtgggcgaagatactatcagcgttctctgataaggagctcgctgcttacgcaaaggccggcgctgtggctgaggaagcactgggggcaataagaacagtgatcgcatttggtggtcagaataaggagctcgagaggtatcagaagcatcttgagaatgctaaggagatcggaatcaagaaagcaatctcagctaatattagcatgggcattgcatttctgctaatctacgcctcatacgccctcgctttctggtacggatcgaccctagttattagcaaggagtacacgatcggcaatgctatgaccgtgtttttctcaattctgattggcgcgtttagcgtcggccaggctgcgccgtgcatcgatgccttcgcaaacgcgcgcggagcagcctacgtaattttcgacatcattgacaataatcccaaaatcgattccttcagtgagcgaggacataagccggactccattaaaggcaacctggaatttaatgatgtccacttctcctatccgtcgagggccaatgtaaagatccttaaggggctcaatcttaaggtgcagtctggacagacggtggccctggtgggttcaagcggctgtggtaagtctaccacggtccagctcattcagagattgtacgaccccgatgaaggaacaattaacatcgacggacaagatatccggaattttaacgtgaattacttgcgggagatcatcggagtggtgtcccaggaacccgtactcttcagcacgaccattgctgagaacatctgttacggcaggggaaacgtcactatggacgagatcaagaaggcagtgaaggaggccaacgcctacgagttcattatgaagctacctcagaagttcgacacgcttgtgggtgaaagaggagcacagctttccggcggccagaagcagcgaatcgcaattgctcgagccctggttcgcaaccccaagatactactgctggacgaagctacaagcgcccttgacaccgagagcgaggccgaagtgcaggctgccctggataaggcacgcgaggggaggaccactattgttatcgcccatcggctgtctaccgtgcgcaacgcagatgtgatcgcagggtttgaggacggggtgatcgtggaacagggatcacactcagaactcatgaagaaggagggtgtgtacttcaagctggtgaatatgcaaacctctggctcacagatccaatcagaggagtttgagctcaatgatgaaaaggccgcaacacggatggctccaaacggatggaagtccagactctttcggcactctacacagaagaacctcaaaaacagtcagatgtgtcagaaatcactggacgtagagacggacggcttggaggctaatgtcccccccgtgtcatttctcaaagtgctcaagcttaacaaaaccgagtggccctactttgtcgtcggaactgtgtgcgccatcgctaatggcgggctgcagccggctttctccgtcatcttctccgaaattatcgcaattttcggccccggggatgacgctgtgaaacagcagaagtgtaacatcttcagcctaatatttctgttcctgggcatcatcagcttctttacattcttccttcagggctttacatttggaaaagctggggagatattgaccaggaggctccgttctatggcgtttaaagcaatgctgaggcaggacatgagttggttcgatgaccacaaaaatagcactggagccttgagtacacggttggccaccgacgcagcgcaagtgcagggagccacgggcactagactggccctgatagcacagaacattgctaatttggggaccggcataatcatctcatttatctatggctggcaactcactttgttgctcctcgccgttgtccctatcatcgccgtctcaggaatcgtcgagatgaagctgttggcaggcaacgctaaacgagacaagaaagaactggaggcggccggaaagatcgctactgaggccatcgaaaacataaggacggtggtgtccctgacccaggagcgcaaatttgaatccatgtatgtagaaaagctgtacggaccttaccgaaactcggttcagaaggctcatatatacgggataacgttttccatctcccaggcctttatgtatttcagctacgccgggtgcttccggttcggagcctatctgatcgtgaacggccatatgagatttcgcgacgtgattctggtcttctctgctatcgtttttggagctgtggctctgggacatgcttctagttttgcacccgactacgccaaagccaagttaagcgctgcccacctcttcatgctgtttgagcgacagccactcatagactcgtacagcgaggaggggctgaagcctgacaagtttgaagggaacattaccttcaatgaggtggtgttcaactatccgacaagagccaatgtccccgtgctccaaggcctcagcttagaggttaagaagggccaaactctcgctcttgtggggtcatccggatgtggaaagagcactgtcgtgcaactgctggaacggttttatgacccactggccggaacagtgttcgtcgacttcgggttccaacttctggacggccaggaagctaaaaagctaaatgtgcagtggctgcgcgcccaactcggcatcgtgtcacaggaaccaatactcttcgactgcagcattgctgagaacatcgcctacggggataactcccgggtcgtgagtcaggatgaaattgtgtctgccgccaaagctgccaacatccacccattcattgagacgctcccccataaatatgagacaagggtgggggacaaagggacccagttgtccggcgggcagaaacaaagaatcgcgattgctagggcgctgatcaggcaaccccaaatactgctgctcgatgaggccacctccgccctggacaccgagtctgagaaggtggtacaggaagccctcgacaaagcacgcgagggtcgaacgtgtatagtcattgcccatcgcctgagtactatccagaatgctgatctgattgttgtgttccagaacggcagggtcaaggagcacggcactcaccagcaattgctggcgcagaaaggaatttacttctccatggtcagcgtgcaggcggggactcagaacctc

SEQ ID NO: 200236 - DNA, 3858 bp, Artificial Sequence
  derived and/or modified sequence
atggatctggaggccgccaaaaatggaactgcttggcgcccaacctcggccgaaggagactttgaactgggtatatcctcaaagcaaaagcgcaaaaagaccaagaccgtgaaaatgattggagtccttaccctttttcgatattctgactggcaagacaaactgttcatgtcgcttggtactattatggccatagcccatgggtccggtctgcctcttatgatgatcgtgtttggagaaatgaccgacaagttcgtggacaccgcggggaacttctctttccccgtgaacttcagcctcagtctcctcaatccaggaaagattttggaagaagaaatgacccgctatgcatactactactcggggctgggcgcaggagtgctggtggctgcctacatccaggtgtccttttggaccctcgcggcgggcaggcagattcgaaagattagacagaagtttttccatgcgatcctgagacaagaaattggctggtttgacatcaacgatactactgagctgaacacccggctcaccgatgatatttcgaaaatctcggaaggcataggagataaggtgggtatgttttttcaagccgtggcaacgttctttgcgggattcatcgtcggttttatccgaggttggaaattgactctggtgattatggccatttcccctattttgggactctcggcagcggtttgggcaaagattctgtcggccttttccgataaagagctcgcagcctacgcgaaagccggcgccgtcgcagaggaagccctgggtgcaattaggaccgtgatcgcatttggtggacaaaacaaggaactcgagcgttaccagaagcacctcgagaacgcaaaggaaattggaattaagaaggccatatcggcaaacatctctatgggaattgcatttctcctgatctacgcttcatacgcactggccttttggtacggatcaaccctcgtcatttcgaaagaatacaccataggcaacgccatgactgtgttcttctctatattgattggtgcattttccgttggccaggccgcaccttgtattgatgcttttgcgaacgcaagaggagcagcatacgtcatatttgacattatagataacaatccaaagattgactcgttttccgaaagaggtcataagccggatagcatcaagggcaacctcgagtttaacgacgtgcacttttcatacccatcgagagcaaatgttaagatccttaagggactgaaccttaaggtgcagtccggacagaccgtcgccctcgtcggaagcagcggttgcggaaagtcgacgaccgtgcaacttatccaaagactttacgatcctgacgaaggaaccatcaacattgacggtcaggatatccgaaatttcaacgtgaactacctgcgggagattataggagtggtgtcgcaagaaccggtccttttctccacgactatcgctgagaacatctgttacggaagaggaaatgttaccatggacgagattaagaaggcggtgaaggaagcaaacgcctacgagttcataatgaaacttcctcaaaagttcgataccctggtcggtgagcggggcgcccaactgagcgggggtcagaaacaaaggattgcgattgcaagagccctcgtgagaaatcctaagattctgcttcttgatgaggctaccagcgcattggatactgaatcagaggcagaagtccaagcggcactggacaaggccagagagggtaggactactatcgtgatcgcacatcgcctctctactgtgcgcaacgcagacgttattgctggatttgaggacggtgtgattgtggagcaaggttcccactcagaactgatgaagaaggaaggagtctactttaaactcgtgaacatgcagactagcgggtcgcaaatccaaagcgaagaatttgaactgaacgatgaaaaagctgccactaggatggctcctaatggctggaaatcgcgccttttcaggcatagcacccaaaagaatcttaagaatagccagatgtgtcagaagtcgctcgatgtggaaactgatgggcttgaagctaacgtgccacccgtgtcctttctcaaagtgcttaagttgaacaagactgaatggccttacttcgttgtcggaacggtgtgcgcgattgcaaacggagggctccagcctgcattttcagtgattttcagcgaaatcatcgctatcttcggcccaggtgatgatgccgtgaagcaacaaaaatgtaacatattcagtcttatctttctctttctcggtatcatttcattcttcactttcttcctccaagggttcacttttggtaaagcgggggaaatccttactcgccgactgcgttccatggcattcaaagccatgcttagacaagatatgtcatggtttgatgaccacaagaattccaccggagccctcagtacgcgcctggcaaccgatgcggcacaagtccaaggtgctaccggcacccgcctggcactgattgctcagaacatagcaaatctgggaactggaattatcatatcatttatctacgggtggcagctcactctgctcctcctggctgtggtgccaatcattgctgtcagcggaattgtcgagatgaagctgctcgcaggtaacgccaagcgtgataagaaagaacttgaggcagccggaaagattgcaaccgaagctatcgaaaacatacgcaccgttgtctcgttgacccaagaacggaagtttgaatccatgtacgtggagaagctgtatggtccctatagaaactcggtgcagaaagcacatatctacgggataactttttccatctcacaagcatttatgtacttttcttacgcaggttgttttagatttggtgcatacctgatcgtgaacggtcacatgaggtttcgcgatgtgatactcgtcttttcggcaattgtgtttggagcagtggcacttggccacgcatcgtcatttgcccccgattacgcaaaagctaaattgtccgcagcacatcttttcatgctttttgaacgacaacctcttattgactcttactccgaggagggccttaagccagataagtttgaggggaacattacctttaacgaagtggtgtttaactacccaacccgggcgaacgtgccagttctgcagggactttctcttgaagtgaaaaaggggcagactctggcacttgtcgggagctcgggatgcggaaaatcgaccgtcgtccagcttcttgaacgcttctacgaccccctggcagggaccgtgtttgtggattttggtttccagctgcttgatggacaagaagctaagaagctcaacgtgcagtggctgcgtgcgcagttgggaattgtctcccaggaaccaattctttttgattgctccatcgccgagaatattgcatacggcgataattcgcgggtcgtgtcacaagacgaaattgtgagcgcagccaaggccgcaaacatccatccgtttatcgagactctgcctcataagtacgagactcgggtgggtgataaaggcacccaactttcaggaggtcaaaagcagagaatcgctattgcacgcgcactcatacgacaacctcaaattctgctgctcgatgaagcaacttccgcacttgacacggaatctgaaaaggtggtgcaggaagctctggataaagcgcgcgagggacgaacctgtatcgtcatcgcccatcggctttccacgattcaaaatgcagatctgatcgtcgtttttcaaaatggccgggtgaaagagcacggaacgcatcaacagttgctcgcccagaaagggatctacttttcgatggtgagtgttcaagcgggaactcagaacctt

SEQ ID NO: 200237 - DNA, 3858 bp, Artificial Sequence
  derived and/or modified sequence
atggacctggaagcagccaagaatggcacagcctggcgtccgacaagtgcagaaggggattttgagcttggaatctcgtctaaacaaaaaagaaaaaaaactaaaacggttaaaatgattggcgtgttaacactgttccgctactctgattggcaagataaactgttcatgtctctaggcacaatcatggcgatagcacatgggtcgggcttaccgttgatgatgatcgtttttggagaaatgactgacaaattcgtagacactgcaggaaactttagctttccagtcaacttcagcctttccctgttaaacccgggtaagattctggaggaggaaatgacgcggtatgcctattattattcaggacttggagccggagttttggtcgcggcatatattcaggtgagcttctggacactggctgccgggcggcaaatccgcaaaattcgtcaaaaatttttccatgcaatcctccgtcaagagattggttggtttgatattaacgatacaacggaactcaatacacggttgacggatgatatttcaaagatatcggaaggcatcggtgataaggttggaatgttttttcaagcggttgctacattctttgcaggcttcatagtgggtttcatccgcggatggaaactgaccctggtgatcatggctattagtccgattttgggcttgtcagcggcggtgtgggctaagatcctttcagctttttcagacaaggaacttgctgcatatgcaaaagctggagcagtggcagaggaagctttaggagcaatccgcacagtgatcgcatttgggggccagaataaagaactggaaaggtatcagaaacaccttgagaatgcaaaggagattgggattaaaaaggcgattagcgctaatatttcaatgggtattgccttcttgcttatttatgcgtcatacgcgctggcattttggtatggttcgacgctcgtaatatcaaaggaatacacgattggtaatgctatgacagtttttttttcgattttaatcggagcatttagcgtaggacaggcagctccgtgtattgacgcgtttgccaatgcgagaggagcggcctatgttattttcgatattatcgacaataacccaaaaattgactcctttagcgagagaggccataagccggattccattaaaggaaatctcgaatttaatgatgtccatttcagctacccttctagagcgaatgtaaaaatcttgaagggactgaacctcaaagtccaaagtggccaaacggtcgccttagtgggaagtagcggctgcggcaagagcacaacggtacaattgatacaaagactctatgacccagacgagggaaccataaacattgatggccaggatatccgcaattttaacgtaaattatttacgggaaattattggagttgtgagtcaagagccggtactattttcaacaacaatcgccgaaaacatctgctatggacgcggaaacgtcaccatggacgaaattaaaaaggccgttaaagaggctaatgcgtatgaatttataatgaaactgcctcagaaatttgatacacttgttggagaaagaggggctcaattatcagggggccaaaaacaacgcattgcgatagctcgtgctctggtacggaaccctaaaatattacttctcgatgaggcgacaagcgcattagacactgaatcagaggctgaggtacaagccgcgcttgataaggcaagagaagggcgcacaacaatagtgatcgcgcatcgtctgtctacggttcgtaatgctgatgtgatagctggctttgaggacggcgtcatcgtggaacagggctcgcattccgaactgatgaaaaaagaaggtgtatactttaagttagtcaatatgcaaacatctgggagccagattcaatctgaggaatttgagcttaatgatgaaaaagcggctacacgaatggctcctaacggatggaaatcaagactatttaggcatagtacacaaaaaaatttaaagaatagccaaatgtgtcagaaaagcttagatgttgagacggacggccttgaagcgaatgtgccgccggtgagctttttgaaggttctgaagttgaataagacggagtggccttattttgttgtgggtaccgtctgcgctattgcaaatggggggctgcaaccagcattttctgtaattttttcagaaatcatcgcgattttcggaccaggagacgatgctgttaaacaacaaaaatgtaacatcttctcacttatttttctttttctcgggataatttcattttttacgttttttcttcaaggctttaccttcggcaaagcaggagagattctgacgcgacggttacgcagcatggcgttcaaagcaatgttaaggcaggacatgtcatggtttgacgaccataaaaattcaacgggagcgctttccacgcgcctcgccaccgatgcggcgcaggttcaaggcgcgacaggtactcgcttagcgctgattgcgcagaatattgctaatctaggcactggcatcatcataagcttcatttatggttggcagctgacgctgttattacttgcagtcgtgccaatcatagcagtttccggaatcgtggagatgaaactcttagctggcaacgcgaagcgagacaaaaaagaacttgaagcggcgggcaaaatcgcaacggaggcgattgaaaacattagaaccgttgtaagcttaacacaagagcgtaagtttgaatctatgtatgttgaaaaactgtacgggccttacagaaattcagttcagaaagcacatatatatggaatcacttttagcatcagccaagcatttatgtacttttcctacgctggatgttttagatttggtgcttatttaattgttaatggacatatgcgctttcgagacgtgatccttgtattttccgccatcgtttttggcgctgttgcgttaggacatgcgtcatcatttgcccccgattacgcaaaagcgaaactatctgcagcgcatttgtttatgctgtttgaacgccaaccgctgatcgatagctactcagaagaaggattgaaaccggataaattcgagggaaacattacatttaatgaggtagtatttaattacccaacacgggcaaatgtacccgtcttacagggtctgtcgttagaggttaaaaagggtcagacattagcattggtcggatcaagcggctgtggcaaatcaactgtggtccagttacttgaaagattttatgatccgctggcgggcacagtatttgttgattttggttttcaattattagatgggcaggaagcgaaaaagttgaatgtgcagtggttgcgtgcgcaactggggatcgtctcacaagaacctattcttttcgactgctctattgctgaaaacattgcatacggtgataactcacgggtggtgagtcaagatgaaattgtgtccgcggcgaaagcggccaacatacatccatttatcgaaacactgccccataaatacgaaacgcgcgtcggcgataaagggacgcagttatctggcggacagaaacagagaatagcgatagcacgagcgctgatccgccagccgcagatattactgcttgacgaagcaactagcgcccttgatacagaatcagaaaaagtcgttcaagaagctctcgataaagctcgtgaaggccggacctgcatcgtcattgcgcataggttatccacgatccaaaatgcagacttaattgtcgtctttcagaacggtcgggtcaaggaacatggaacacatcagcaattgctagcacagaaaggaatttatttttcaatggtctccgttcaggcaggcacccagaatcta

SEQ ID NO: 200238 - DNA, 3858 bp, Artificial Sequence
  derived and/or modified sequence
atggacctcgaggcggccaagaacggaaccgcatggcggcccacctcagccgaaggtgattttgagctcggaatctcgtcaaagcagaagagaaaaaagacgaaaactgtgaagatgatcggagtgttgaccctgttccggtactcggattggcaagataagctgtttatgtcgctgggcactattatggccattgctcacggttcaggcctccctctgatgatgatagtgtttggagaaatgaccgataagttcgtggacaccgcaggaaacttttccttcccggtgaatttctcgctctcccttttgaacccaggtaagatcctggaggaagaaatgactcgatacgcatactactactccggactcggtgccggagtcctcgtggccgcttacatccaagtgagcttttggaccctcgctgcaggtcgccaaatccggaagattaggcagaaattcttccatgcaattctccgccaagagattggatggttcgatatcaatgacactacggaactcaacactcgactgactgatgatatctccaagatttcggaaggtatcggagacaaggtgggcatgttctttcaagcagtcgcaacttttttcgcaggattcatagtcggtttcattagaggttggaagttgacccttgtgataatggccatctcccccattcttggtctgagcgcagccgtgtgggcaaaaatcctttcagcattctccgataaagagctggcagcatacgcgaaggcaggagccgtggcagaggaggcacttggcgccatacgtactgtgattgcctttgggggtcagaacaaagagctggagcggtatcaaaaacacttggagaacgcaaaggagataggcatcaagaaggcgattagcgcaaacattagcatgggtatcgcgttccttcttatctacgcgtcgtatgcgttggcattttggtacggatctaccctggtcatttctaaagagtacactattggtaacgcaatgacggtgtttttctccattcttattggagcattttcagtcggacaagcagcgccatgtatcgacgcatttgcaaacgcaagaggcgcagcttacgtgatttttgatatcattgacaacaaccctaagattgactcgttctcggaacgggggcacaaacctgattctattaagggaaacctggaattcaacgatgtgcatttttcgtatccatccagagctaacgtgaagattctgaagggtctgaatctcaaggtccaatcgggccaaaccgtggcactcgtggggtccagcggatgcggcaagtcgaccactgtgcaattgatacagagactttacgatcctgacgaagggaccattaacattgatggtcaggatatcaggaatttcaatgtgaactacctgagagagattattggtgtggtgagccaggagccagtgctgttcagcaccacgatcgcagagaacatctgttacggtcggggcaacgtcactatggacgagatcaagaaggccgtgaaggaggcaaacgcatacgaattcataatgaaacttccacagaaatttgatacccttgtgggggagagaggtgcgcaactctcaggtggccaaaagcagcgcattgccattgcacgagcacttgtgagaaatcctaagattctcctgctggatgaggctacgtcggcacttgacacggaaagcgaggcagaggtccaagcagccctggataaggccagagaaggacgcaccactattgtgatcgcacatcgtttgagcactgtgcgcaatgctgatgtcattgcgggttttgaagatggcgtgattgtggaacaagggagccattcggaacttatgaagaaggaaggcgtgtactttaaacttgtgaatatgcagacgtccggaagccaaatacagagcgaggagtttgaacttaacgatgagaaagcagcaacccggatggcaccgaacggatggaaatctaggctttttagacattcaactcagaaaaaccttaagaatagccaaatgtgccagaaatcgctcgatgttgaaaccgatggactggaggcaaacgtgcctccagtgagctttctgaaagtgctgaaactcaataagactgaatggccatactttgtggttggcaccgtctgtgctattgcaaatggtgggctgcagccagctttctcagtgattttctctgaaatcatcgcaattttcggtcctggggatgacgcagtgaagcagcaaaagtgcaacattttcagcctcatctttcttttccttggtatcatctcgtttttcactttctttctgcaaggctttacgtttgggaaggcaggagaaattctcactcgaagattgcgatcgatggcatttaaggcgatgctgagacaagatatgtcgtggtttgacgatcacaagaattccaccggtgcattgtcgactaggctcgcaaccgacgcagcacaggtgcagggagcaaccggaacccgcctcgcactgatcgcccaaaacatcgcaaacctgggtaccggcatcatcatctccttcatatatggttggcagctcaccttgcttcttcttgctgtcgtgcccataattgcagtcagcgggattgttgagatgaaacttcttgcgggaaacgcaaagagagacaaaaaggaactggaagcagccggcaagatcgcaaccgaggcaatagaaaacatacggaccgttgtctcccttactcaggagcgcaagtttgagtcgatgtacgtcgaaaaactttatgggccatacaggaatagcgtgcagaaagcccacatctacggtattacctttagcatctcgcaggcctttatgtatttctcatacgcgggatgttttcgtttcggagcatacctgattgtcaatggtcacatgagatttcgggatgtcattctcgtgttctctgccatcgtctttggagcagtcgcccttggacatgcttcatcattcgctcccgactacgccaaggcaaaactttcagcagcacatctgttcatgctgttcgaacgtcagcccctgatcgattcgtactcagaggaaggactcaagcctgacaagtttgaaggaaacatcaccttcaatgaggtcgtattcaactaccctacccgggccaacgtcccggtccttcagggactttccttggaagtcaagaagggccaaaccctggccctggtcggaagctcgggatgtgggaagtcgactgtggtgcaacttctggaaagattttacgacccgctggcgggaactgtttttgtggatttcgggttccaactccttgatgggcaagaggcaaaaaagctcaacgtccaatggctccgggcacaactcggaatagtgtcgcaggaaccgatcctgtttgactgctctatcgcagaaaacattgcctacggagataactcgagagtggtgtcgcaagatgaaattgtgtctgcagccaaggctgctaacatccaccccttcattgagactcttccacataagtacgagactcgtgtgggtgataagggaacgcagctttcgggtggacaaaaacaacgcattgctattgcgagggcactcattagacagcctcagattctgctgcttgacgaagcaacctcggcgctcgacaccgagtcggagaaggtggtgcaggaagcattggataaagcccgggaaggtcggacctgtatcgtcatcgctcatcgcctgtcgactattcagaatgcggatctcattgtcgtgttccaaaatggtcgtgtgaaggagcatggcacgcatcagcaactgcttgcacagaagggaatttacttctcaatggtttcggtccaggcaggaacgcagaacctg

SEQ ID NO: 200239 - DNA, 3858 bp, Artificial Sequence
  derived and/or modified sequence
atggacctggaggcggctaaaaatggcacagcatggcgacctacctcagcggagggcgacttcgagctggggataagctcaaagcaaaaacggaaaaaaactaagacagttaaaatgatcggagtgctcacccttttccggtacagtgattggcaggacaaacttttcatgtcacttggaacgattatggcgattgcacatggctcgggacttcctctcatgatgatagtctttggcgagatgaccgacaaatttgtcgataccgcaggaaacttttcttttcccgttaacttctcgctctccctgcttaaccccggtaagatccttgaagaggaaatgacacggtacgcttattactacagcggtcttggcgcgggagttctggtggcagcctatatccaagtaagcttctggacccttgctgctggcaggcaaatccgtaagatcaggcagaagttcttccatgctatcctgagacaagaaatcggttggtttgatatcaacgatacgacggaactcaatacaagactgacggatgatatctctaaaatcagtgagggtattggagacaaggtgggcatgttcttccaagccgtggccacattcttcgcagggttcattgttggttttattcgtggctggaagttgaccctggtcatcatggcaataagccccatccttggactgtctgccgcagtgtgggcaaagattctgagtgccttttcagataaagaacttgccgcctacgcaaaggctggtgccgtcgcagaagaagcccttggcgctattagaactgtgatcgcatttggtggtcagaataaagaattagagcggtatcagaaacacctggaaaacgcgaaggaaatcggaatcaagaaagccatctcggccaacatcagcatgggaattgcctttcttctgatctatgcatcctatgctttggcattctggtacggatcgaccctcgtgatttccaaggaatatacaatcggaaacgccatgactgtgtttttcagcatcctgatcggcgcgttcagtgtgggtcaggctgccccctgcatagacgctttcgccaatgcgcgtggggccgcctacgtgatcttcgacataatagacaacaaccctaagattgattcgttttccgagcgagggcataagccagactccataaaaggaaatctggagtttaatgatgtccacttctcctatccttccagagccaacgttaagatcctaaaaggactaaatctaaaggtgcagtcaggtcagactgtggccctggtggggtccagcggctgtggcaagtctactactgtgcagctaatacagagactgtacgatccggacgagggcaccatcaacattgatggacaagatatacgcaatttcaacgtgaactatctgcgcgagattatcggagtggtttcacaggagccggtactcttttcaactaccattgccgagaacatctgttacggcagagggaatgtcaccatggacgagattaagaaggctgtgaaagaggccaacgcctatgaattcattatgaaactccctcaaaagttcgacacattagttggcgagcgcggagcacagctgtcaggaggccagaaacagagaatcgcaatcgctcgggctctggtgaggaaccccaaaattcttctactcgacgaagccacctccgcccttgataccgagtccgaggctgaagtgcaggctgccctggacaaggcccgggagggaagaactaccatcgtcatagcccaccgcctcagtacagttcgcaatgccgacgtgatcgcaggcttcgaagatggcgtgatcgtggaacaaggcagccattccgaactcatgaagaaggaaggcgtgtatttcaagctggtcaatatgcaaacctcagggtctcagattcagtctgaggagtttgaactgaatgatgaaaaggcggccactcgaatggcccctaacggatggaagagcaggttgttcaggcactcaacgcagaagaatttaaaaaactcacagatgtgtcaaaagagtctggacgtggagactgacggcctcgaagccaacgtgccgcccgtctctttcttgaaggtgttgaagctgaacaaaaccgagtggccgtatttcgtggtaggcactgtttgcgccatagctaatggcgggttacagccagctttctccgttattttttcagaaattattgcaatttttgggcctggcgatgacgccgtgaagcagcagaagtgcaacatctttagtttgatcttcctcttcttaggcatcatcagcttttttacttttttcctacaggggtttacgttcggtaaggctggagagatcctcactaggagactgcgttccatggctttcaaggccatgctccggcaggatatgagctggtttgatgaccacaaaaacagcacaggtgctctcagtacccgcctggctactgacgcagcccaagtacagggggctaccggtactcggctggcccttatcgcccagaacattgcgaatctcggcactggcattataatctcatttatctacggttggcaacttactcttcttctgttagccgtcgtgcctattatcgccgtgagcggcatcgtagaaatgaaattgcttgcaggaaatgctaagcgggacaagaaggagttagaagcagctggtaagatcgccaccgaggcgattgaaaacatcaggaccgttgtcagccttactcaggaacggaaatttgagtctatgtacgtggagaaactgtatggcccttataggaactctgtacagaaggcacacatttacgggatcacgttcagcatctctcaggccttcatgtacttcagctatgcaggctgttttcggtttggagcgtacctcattgtcaatggccacatgcgattccgcgacgtgatactcgtgttcagcgcaattgttttcggagcagtggccctgggacacgctagttctttcgcccctgactatgccaaagccaagctatccgctgcgcacttgttcatgctgtttgaacgccagccacttattgatagttacagcgaggaaggccttaaacccgacaagtttgaagggaacatcactttcaatgaagtggtcttcaactatccgacccgggcaaacgtcccagtccttcagggcctcagcttggaggtcaaaaagggccagactctggccctggtgggatctagtgggtgcggaaaatctactgtggtccagctgttggagagattttatgaccctcttgctgggaccgttttcgtggacttcgggtttcagctcctagatgggcaggaagccaagaaattgaacgttcagtggcttcgagctcagctgggcatagtttcccaggagcccattcttttcgactgctccatcgccgagaacatcgcctacggcgacaattctagggtggtctctcaggacgagatcgtgtctgctgcgaaagccgccaatattcaccccttcatcgaaactctgccacacaaatacgaaaccagggtgggtgacaaaggaactcagcttagtggtgggcaaaagcaacggatagcaatcgcccgcgccctcatccgccaaccgcagattctcttattggatgaggcaacatccgctctcgacacagagtccgagaaggtggtgcaggaagcgctggacaaggcccgagagggtcggacatgcattgtcatcgcacaccgtctgtcaacgatccaaaatgccgatctgatcgtcgtgtttcagaatggcagggtgaaagagcacggaacacatcagcagctcctggcccagaagggaatttatttttcaatggtgtcggtgcaagcgggcacgcaaaatctt

SEQ ID NO: 200240 - DNA, 3858 bp, Artificial Sequence
  derived and/or modified sequence
atggatctggaggctgcaaagaacggtactgcttggcgacctacatcagctgaaggcgacttcgaactgggaatctcctcgaagcagaagcggaagaagacgaaaaccgtcaaaatgataggagttctcacactgttcaggtattcagactggcaggacaagctgtttatgtccctgggaacaatcatggccattgcacatggcagcggcttgcccttaatgatgattgtgtttggcgagatgaccgataagttcgtcgataccgccggaaatttcagctttcctgtaaatttctccctaagccttctgaatccaggcaaaatcctcgaagaagaaatgacgaggtacgcctactactattccggtctcggcgccggggtgctcgtggcagcctacatccaagtgtctttctggacgttagcagcgggtaggcagatccgtaaaatcaggcaaaagtttttccatgctattttaaggcaggagatcggctggttcgatatcaatgatacaaccgagctgaacaccaggttgacggacgacatctctaaaataagcgagggcattggggacaaagtcggtatgttcttccaggccgtcgctactttttttgctgggtttattgtggggtttatccggggttggaagctgacactcgtgatcatggctatatcaccgatcctgggactgtccgcagcagtttgggctaaaatcctgtctgccttttctgacaaggaactggccgcctacgccaaggctggcgctgtcgcagaggaggcccttggtgcaataagaacagtgatagccttcggcggtcagaacaaggagctggagaggtatcagaaacacttggaaaacgcaaaagagattgggatcaagaaggctatttcggctaatattagcatggggatcgcctttctgcttatatacgcatcatatgcacttgcattttggtatggaagcaccctcgttatttccaaagagtatactatcggcaacgcgatgactgtgttcttctccatcctcatcggggccttctcagtgggacaggccgctccatgcattgatgcctttgccaatgccagaggcgcagcctacgtcatttttgacataatcgataataatccaaaaatcgatagtttctctgaaaggggtcacaagccagacagcattaagggcaatctcgagttcaacgatgtccactttagctaccccagtagagccaacgtgaagatattgaaggggttgaatctaaaagtgcagagcggccagactgtcgccctggtggggtcttcaggctgtggaaagagtaccacagtgcaacttattcagcgcctttacgatccagacgagggcaccatcaacattgacgggcaagatattagaaattttaacgttaactatctgcgcgagatcataggtgttgtgtcacaggagcctgttctcttttccaccacgatcgcagagaacatatgttacgggcgaggaaacgtaactatggatgagatcaagaaggccgtgaaggaggccaacgcctatgagtttatcatgaagctgccccagaagttcgataccctggtcggagagaggggcgcccagctgtcagggggacagaagcagcggatcgcaatcgccagggcactggtgaggaatccaaagattcttttgctagacgaagccactagtgctttagataccgagagcgaggctgaggtgcaggccgcattagacaaagctcgcgaaggacgtactacaatcgtcatcgctcacagacttagcactgtgcggaatgcggatgttatagccggcttcgaggacggtgtcatcgtggagcaggggtcgcattctgagctgatgaagaaggaaggtgtgtattttaagctagtaaacatgcagacctctggctctcagatccagagcgaggagtttgagctaaatgacgagaaagcagctacacgtatggcaccaaacggttggaagagccggctgtttcgacatagtactcagaaaaatctgaaaaactcccagatgtgtcagaagtctctcgatgtggaaacggatggactcgaagccaatgtgcctccagtgagttttctcaaggtcttgaagctgaacaaaaccgagtggccgtattttgtggttggcacagtgtgcgctattgccaatggggggctccagccagccttctctgttatcttctcggagatcattgcaatattcgggcctggcgatgacgctgtgaagcagcagaagtgtaatatctttagtctcatcttcctttttctcggaattatttcttttttcacttttttcctgcagggattcaccttcggaaaggcaggggaaatcctgacccggaggctgcgtagcatggcattcaaggcgatgttgagacaggacatgtcatggttcgatgatcacaagaactctactggcgcgctcagcactaggctcgctacagacgctgctcaggtgcaaggcgcaactggaactagattggcacttattgcgcagaacatagccaatctggggacgggcatcatcatcagttttatttacggctggcagcttacactgctcctactggcagtggtccctattatcgccgtctccgggattgtcgaaatgaagctgctagccggcaatgccaagagggataaaaaagagctggaggcggcgggcaagatcgccacagaagcgattgagaatatcagaaccgtcgtgtctctaactcaggaacgaaagtttgaaagtatgtacgtcgagaaactctatggcccatacaggaatagcgtgcagaaagcacatatctatgggataactttctccatttctcaagcattcatgtacttcagttacgctggctgttttcgtttcggcgcctatctaatcgtgaacggccatatgagattcagggacgtcatcctggtcttttccgccatagtgtttggagccgtcgcgctcggccacgcatcaagctttgcaccagactacgccaaagctaagctgtctgccgcccacctgttcatgctcttcgaaaggcagcctcttattgacagttattcagaggaaggccttaaacctgacaaatttgagggtaatattaccttcaacgaggttgtctttaattatccaaccagagctaatgttccggtgttacaggggctaagcctagaagtaaagaagggacaaacgttagctttagttggctcttctggatgcgggaagagtactgtagtgcaactgttggagagattttacgatcccctggcgggcactgtgtttgtggactttggatttcagttgctagacggccaggaggccaagaagctgaatgtgcagtggcttcgcgctcagctcggcatcgtgtcccaggaaccaatcttatttgactgcagcattgccgagaacatcgcgtatggggataatagcagagttgtaagccaagacgagatcgtgtccgcggccaaggcagcgaatattcatccctttatcgaaaccctgccccataagtatgaaactcgtgtcggggataaggggacccagctttctggggggcagaagcagagaatcgcaatcgccagggctctgattcggcagcctcagatcttgctgctggatgaggctacgtccgcactggacactgagagtgagaaggtggtccaggaggcccttgataaggccagggaagggcggacctgcatcgtgattgcacaccgcctgtcaactattcagaatgccgacttgattgtggtcttccagaatggccgggtgaaggaacacggcactcaccaacagctcctggctcagaagggcatctatttcagcatggtctctgtccaggccggcactcagaatctg

SEQ ID NO: 200241 - DNA, 3858 bp, Artificial Sequence
  derived and/or modified sequence
atggacctggaggcagccaagaatggaacagcatggcgcccgaccagtgcagaaggggactttgaactcggcatttcttccaaacagaagcgcaaaaagacgaagactgtaaagatgatcggtgtgctgacactgtttcgatattctgattggcaggacaaactctttatgtcactggggaccatcatggcaatcgcacatggaagcggactgcctttaatgatgatcgtgttcggggaaatgacagataaatttgtggacacggcaggcaacttttcatttccagtgaatttctctttaagtttgcttaatcccgggaagattctggaagaggaaatgacaaggtacgcctattattactctggtctcggtgccggggtgttggtggccgcgtatatccaggtgtccttctggaccttagccgctggtaggcagattcgaaagataagacagaaattctttcatgctattctgaggcaggagatcggctggtttgacattaatgataccacagagttgaacacccgcctgaccgacgatatatccaaaatctcagaagggatcggggataaggtcgggatgttctttcaggcagtggctacttttttcgctgggttcatcgtcgggtttattcgaggatggaaactaactttggtgatcatggctatttccccaattttgggactgagcgcagccgtgtgggctaaaatcctcagtgccttttctgacaaggagctggccgcttacgctaaagccggtgcagtagcggaagaagccctcggggccattcgaaccgtgatcgctttcggtgggcagaataaagagctggaaaggtaccaaaaacatctggagaatgctaaggagatcggaataaagaaagccataagtgctaacatcagcatgggtatcgcctttttgctgatctacgcaagctacgcactagccttctggtatgggtctactctcgttatttcgaaggaatataccatcggaaatgctatgactgtatttttctctatcctgatcggagcatttagcgtaggacaagccgccccttgtatagacgcattcgcaaacgcccggggcgccgcatacgttatcttcgatatcatagataataaccccaaaatagactctttctcagagagaggacacaagccagactcgatcaagggcaacctagagtttaacgacgttcacttttcttacccttcacgggccaatgtcaaaatccttaaaggtctcaatctcaaggttcagagtgggcagacggtcgctctagtagggtcctccggatgtgggaagtccaccaccgtacaactcatccagagactatatgatccagatgagggtaccatcaacatagatggacaggatatcagaaactttaacgtgaattatttgcgggagataattggagtggtgagtcaagagccagttctttttagcacaactatcgcagagaatatttgctacggacgcgggaacgtaactatggatgagatcaagaaggccgtgaaagaggcaaatgcctacgagtttatcatgaagcttccccagaaattcgacaccctcgttggagagaggggagcccaactctctgggggccagaaacagcgaatcgctatcgcaagagccctcgtacgtaatcccaaaattctcctgctcgacgaggccacttcggccctagacaccgagtctgaagcagaagttcaagcagccctggacaaggccagagagggtaggacaactatagtgatcgcccacaggctctccacagtgagaaacgcggacgtcattgcaggattcgaggacggagtcatcgtggagcagggtagtcacagcgagctgatgaagaaggaaggagtgtattttaagctagtaaatatgcagacatcgggctctcagatccagagcgaggagtttgagttgaacgatgagaaagctgccaccaggatggctcccaacggctggaagagccgcttgttccggcacagtacccagaaaaatttgaagaattcccagatgtgccaaaagagtctggatgtggagacagatggactcgaggccaacgtgcctcccgtgtccttcctgaaagtgctcaaattgaataagacggagtggccctacttcgtggttggtacggtgtgtgcaattgcgaatggcgggctccagcccgcattcagtgtaatattttctgagatcattgccatctttggacccggggatgacgccgtcaagcagcagaaatgtaatattttttctctgatatttctttttttggggatcatctccttcttcacctttttcctgcagggcttcactttcggaaaagccggcgagattttaacaaggaggctgcggtctatggcattcaaagcaatgcttcggcaggatatgagctggtttgacgaccacaaaaactctaccggcgccctgtcaacaaggctggccacagatgccgcgcaggtacagggtgctacaggcacccgcctggcgctgatagcccagaacattgccaatctgggcacgggaattatcatttccttcatttatggctggcagcttactctcctgctccttgccgttgttcctattatagccgtctctggtatcgtcgaaatgaagctgctggctgggaatgccaagcgcgacaaaaaggagttggaagccgccgggaagatagccacagaggccatcgagaatattcggaccgtggtgtctctgactcaggaacgaaaattcgagtcgatgtatgtggagaaattgtacggcccgtatcgaaactcagtgcagaaggctcatatttatgggatcacattttccatctcccaggcattcatgtatttctcctatgctggttgctttcgctttggagcttatctgattgtcaacggtcatatgcgctttcgagacgtaatactcgtgtttagcgcaattgtgttcggagctgtagctcttgggcatgcgagcagcttcgcacctgactacgcaaaggccaagctctccgctgcgcacctattcatgttgtttgagcggcagcctctgatcgatagctacagcgaagaaggattaaagcccgataagttcgagggtaatataacttttaacgaagtggtgtttaactatcccactcgcgccaacgtcccggtgctgcagggcctatctctcgaagtcaaaaagggacagacattggccttagttggttcttcagggtgcggtaagtcaacagtggtgcagctactggaacgcttttatgaccccctagccggtacagtatttgtggattttggctttcagctgctggacgggcaggaggctaagaagctgaacgtacagtggctgcgtgcccagctcggcattgtcagccaggagccaattttgtttgattgttctattgcggaaaacatcgcctacggagacaactcccgcgtggtgtctcaggacgagattgtgagcgccgccaaggccgccaatattcacccattcattgagaccctgccacataaatatgagactcgcgttggagataaaggcacccaacttagcggaggacagaagcagagaatcgccatcgctcgggcactgatccggcaacctcagattctgctgctcgatgaagccacaagcgccctggacacagagagtgaaaaggtcgtgcaggaggctctggataaagctagggaggggaggacatgcatagtcatcgcccatagacttagtaccatccaaaatgctgatctaatagtggtttttcagaatggtcgtgtgaaggagcatggcacacatcaacaattgctggcccaaaaaggcatatactttagcatggtcagcgtgcaggccggaacacagaatctg

SEQ ID NO: 200242 - DNA, 3858 bp, Artificial Sequence
  derived and/or modified sequence
atggacttggaagccgcaaaaaatggtacggcctggcggcccacttctgccgaaggggacttcgaattaggcatcagcagcaagcaaaaaaggaaaaagacaaaaactgtgaagatgatcggggtgttgaccttgttccgatatagcgattggcaggacaagttatttatgtccttaggcaccatcatggctatcgctcacggctcaggcctgccactcatgatgattgtgtttggcgagatgactgacaagtttgttgacactgcaggaaacttcagctttcctgtcaatttcagtctgtcacttctcaaccctggaaaaatactggaagaggaaatgacaagatatgcctactactactcaggactaggggctggagttctggttgctgcttacattcaggtatccttttggacattggccgcaggccgccagatacgaaaaattcgccagaagttttttcacgcaatcctgcgacaagaaatcgggtggtttgatattaacgacaccacggagctgaacacccgactgactgacgacatcagtaagatatcagagggtataggggacaaggtagggatgttttttcaggcggtagctacctttttcgcaggttttattgtcggatttatccgagggtggaagctcaccctggttattatggcaatcagccctatcttggggctgtcagcagctgtgtgggcgaagatcctctcggccttttcagacaaagaactcgcggcctacgcaaaggccggcgctgtggctgaggaggccctgggggcaatacggacagttatcgccttcgggggccagaacaaggagctggagagatatcagaaacatttagagaatgctaaggaaataggaatcaaaaaggcaatcagtgccaatatttccatgggcatagcttttctgctgatatatgcaagctacgcgcttgccttttggtacgggtctacattagtgatcagcaaagaatacactattggcaatgcaatgactgtgtttttttccatactaatcggggcattttccgtgggccaggccgccccctgtattgacgctttcgctaatgctcgtggcgcagcttatgtcatattcgacattatcgacaacaatcccaaaatagattctttctcggagcgaggacataagcctgactccataaagggaaatctggaattcaatgacgtgcatttctcttacccgagtcgggcaaatgtgaagatccttaagggactgaacttgaaggtacaaagtgggcagaccgtcgccctggtgggcagctctggctgcgggaaatctaccaccgtgcaactcattcaacgtctttacgacccagacgaaggaacaatcaatattgacggccaggatatcaggaattttaacgtgaattacctgcgggagatcatcggagtcgtgagtcaggaaccggtcctgttttcaactactatcgcggaaaacatttgctatggaaggggaaacgtcacaatggatgaaatcaagaaagccgtcaaggaggcgaatgcatatgaattcatcatgaaactgccccagaagttcgacacccttgtcggggagagaggtgcccagctatccgggggtcagaagcaaaggattgcaatcgcccgggcactggtaagaaatcctaaaatactcctactcgacgaggctacttcggccctggacacagagtcagaggcagaagttcaggctgccttggataaagctagggaaggcagaacgaccatagtgattgcccatcgtctgtctaccgtgcgcaacgcggacgtaattgcagggttcgaagatggcgtcatagttgaacaggggagtcactctgaactaatgaagaaagagggggtatatttcaagctggtgaacatgcagacatcaggcagtcagatccagagtgaggagttcgaattgaacgacgaaaaggccgcaaccagaatggctcccaacggttggaagagccgtctttttaggcactctacccaaaagaatctcaaaaattcacagatgtgtcaaaagtcattggacgtggagacggatggactggaagccaatgtgcctccggtttcttttttgaaagtcttaaaactgaacaagaccgaatggccttacttcgtcgtcgggacagtgtgcgccatcgcaaacggcggtctgcaacctgcgttctccgtgatctttagtgagattattgcaatctttggccctggcgatgatgcagtgaagcaacagaagtgcaatatcttctcactcattttcttgtttttgggcatcatatcgttttttacgttcttcctgcaaggtttcactttcgggaaggcaggcgaaattctaactagaagattgcgcagtatggcttttaaggcaatgctgcggcaggacatgagctggtttgacgaccataagaactccaccggtgctctgtctacaagactggctacagatgctgcccaggtccagggggccaccggcaccaggcttgcgctgattgctcaaaatatcgcaaatctgggcaccggcataatcatttcgttcatttacggctggcaattgaccctcctccttctggccgtcgtgcccatcattgctgtgagtggcatcgtggagatgaaactgcttgcaggaaacgctaaaagagataaaaaagagctggaagccgccgggaagatcgccaccgaagctatagaaaatatccgcacggtcgttagtctaactcaggaaagaaaatttgaatctatgtatgtggaaaaactgtatggtccctaccgcaactctgtgcagaaggcacacatatatggaatcacgttttcaatctcacaggctttcatgtacttctcctacgccggctgttttcggttcggtgcatacctgatcgtcaacgggcacatgagattccgtgatgtcattctggtgttcagtgctatcgtgtttggggccgtcgccctcggccatgccagctcctttgcccctgactacgcaaaagccaaactctctgcagctcaccttttcatgctcttcgaacggcagcccctgattgattcttactccgaggaggggctaaagccagataagttcgagggaaatatcacctttaatgaggtcgtattcaactaccccacacgggctaacgttcctgttctacagggtctatctctggaggtgaagaaggggcagaccctagcgttagtaggcagctccggctgcggaaaaagtacagtggtccaactactggagagattttatgatcccctggcggggaccgtgttcgtggatttcggttttcaactgctcgacggacaggaggcgaaaaaactcaacgtacagtggctgcgcgcacaattgggcattgtatcgcaagagccgattctttttgattgtagcatcgccgagaacatagcatacggagataatagtcgcgttgtgtcccaggacgagatcgtttccgcagcaaaagccgctaacatccatccttttattgagactctcccacacaaatacgaaacgagggtgggtgataaggggacccaactctcgggagggcagaaacagagaattgccatcgccagggcactgattcggcagccacagatcctgctgctggacgaagctactagcgcgttggacaccgagagcgaaaaagtagttcaggaggcccttgacaaagcccgtgaaggccggacgtgcatcgtgattgctcatcgtttatcaacaatccagaatgccgacttgatcgtggtcttccagaacggtagagttaaggaacatggaacccaccagcaactcctggcgcagaaaggaatctattttagtatggtgagcgttcaagcaggaactcagaacctt

SEQ ID NO: 200243 - DNA, 3858 bp, Artificial Sequence
  derived and/or modified sequence
atggatctggaggccgcgaagaacggcaccgcctggcgcccgacttcggcggagggtgacttcgaactgggaatctcgtctaaacagaagagaaagaaaaccaaaaccgtcaaaatgatcggagtcctgaccctcttcagatacagcgattggcaagataagctctttatgtccctgggaacgatcatggccattgcacatggaagcggcctccctctcatgatgatcgtgttcggagaaatgactgataagttcgttgatactgctgggaacttctctttccctgtcaatttctccctgtccctgctgaaccccggtaagatcctggaagaagagatgaccaggtacgcatactactactccggcctgggagccggagtgctcgtcgcagcatacatccaagtctcgttttggaccctggctgcgggcagacagattaggaagatccggcagaagtttttccatgccatcctgcgccaagagatcggatggtttgacattaacgataccaccgaattgaacactcggctgactgacgacatctctaagatctccgaaggtatcggcgacaaggtgggcatgttcttccaggctgtggcgacctttttcgcgggattcattgtcggtttcatccgaggttggaaactcaccctggtcatcatggctatttcgccgatccttggcttgtcggctgcagtgtgggccaagatcctgtccgcattctccgacaaggaactggccgcctacgccaaagcaggcgcagtggccgaagaggcgctgggagccatcagaactgtcatcgcattcggtggccagaataaggagctcgaaagataccagaaacatctcgaaaatgcaaaggagatcggaatcaagaaggctatctccgccaacatctcaatgggaattgccttcctcctgatctacgcttcgtacgccctcgccttctggtacggttcgacccttgtgatctcaaaggaatacaccatcggaaacgcaatgaccgtgttcttttcaatccttattggtgcctttagcgtggggcaggcagcaccgtgtatcgacgcttttgcgaacgcacggggcgccgcatatgtgatcttcgacatcatcgacaataaccccaaaattgatagcttttcggagcggggacataagcccgacagcatcaaggggaacctggagtttaacgacgttcacttcagctacccaagtcgcgccaacgtcaaaatccttaagggattgaaccttaaggtgcagagcggacaaaccgtggcgctggtcggaagctccggctgtggaaagtcaactactgtgcagctgatccaacggctgtacgacccggacgagggaactataaacattgatggacaagacattcggaatttcaacgtgaactacctgcgcgaaatcatcggggtggtgtcgcaagagccagtcctgttcagcaccactattgcagaaaacatctgctacggacgcggaaacgtgaccatggatgaaatcaaaaaggctgtcaaggaagccaacgcctacgaattcattatgaagctgccgcagaagtttgacaccctggtcggggaacgcggagcccagctctcgggagggcagaagcagagaatcgccatcgcgagagccctggtgcgcaatccaaagatcctgctgctcgacgaggcaacttcggcactggacactgagtccgaagctgaagtgcaggccgccctggacaaagcccgggaaggacgcaccacgattgtcattgctcacagactgtcaaccgtgcggaatgccgatgtcatcgcgggattcgaagatggggtgattgtggagcagggcagccattccgagctgatgaagaaggagggggtctacttcaagctggtcaacatgcagactagcggtagccaaatccagagcgaggagtttgaactgaacgatgaaaaggctgccactcggatggcacctaacggatggaaatcccggctgttccgccatagcacgcagaagaacctgaagaactcccagatgtgtcaaaaatccctggacgtcgaaactgacggactcgaagcaaacgtgcctccagtgtccttcttgaaagtcctgaaactgaacaagactgagtggccctacttcgtggtgggtaccgtttgtgctatcgccaacggaggattgcagccggcgttctcggtcatcttttctgagatcatcgccatcttcggtcctggggacgacgcggtgaagcagcaaaaatgcaacatcttctcactcatctttttgttcctggggattatctcgtttttcaccttcttcctccaaggatttactttcgggaaggccggagagatcctgacccggcgcctgcgctctatggcgttcaaggctatgctccggcaggatatgtcctggttcgatgaccacaaaaactcgactggagcccttagtacccggctggcgactgacgctgcgcaggtgcagggggccactggaacgcgcctcgccctgatcgcgcaaaacatcgcaaacctgggaaccggcatcatcatctccttcatctacggatggcagctgactcttctcctgctggccgtggtccctatcatcgctgtcagcgggatcgtggaaatgaaactccttgccggtaatgcaaagcgggacaaaaaggagctggaggctgctggaaagatcgctaccgaagcgatcgagaacattagaaccgtcgtcagcctgacgcaagaacgcaaatttgagtccatgtacgtggaaaagttgtacggaccctataggaattccgttcagaaggcccacatatacggaattaccttttcgatctcgcaggccttcatgtacttttcgtacgcaggctgcttcagattcggagcctacttgatcgtgaacggacacatgcggtttcgcgatgttatcctggtgttctccgccatcgtgtttggagcagttgctttgggccatgcctcaagtttcgccccagactacgcaaaggccaaactgtccgcggcccacctcttcatgctgtttgaacgccagcctctcattgactcatacagcgaagaaggcctcaaaccagataagttcgaaggtaacattaccttcaatgaagtcgtctttaactacccgacccgggcgaacgtccctgtgttgcaaggcctgagcctcgaggtgaagaaagggcagactctggcccttgtgggttcttccggttgcggaaaatcgactgtggttcaactcctcgagaggttctacgacccccttgcgggaaccgtgttcgtggacttcggcttccagctcttggatggtcaggaagccaagaagctgaatgtccagtggcttcgcgcccaactcggaatcgtgtcccaggaaccaatcctcttcgattgctccatcgccgaaaacatcgcctacggagataattcgcgggtggtgagccaggacgaaatcgtgtcagctgctaaggccgccaacatccaccctttcatcgaaaccctcccacacaagtacgaaacccgcgtgggggacaaaggcacccagctgtcaggcggacaaaagcaacgcattgccattgctcgcgccctgattaggcagccacagatactcctgctggacgaggcgacctccgccctcgatactgaatcagaaaaggtcgtgcaggaagcgctcgataaagcgcgggaagggagaacctgcattgtgatcgcccaccgcctgtccactatccagaacgctgatctcatcgtcgtctttcagaacgggagagtgaaagaacacggaactcatcaacaattgcttgcacagaaggggatctacttttccatggtttccgtgcaggccgggacccaaaatctg

SEQ ID NO: 200244 - DNA, 3858 bp, Artificial Sequence
  derived and/or modified sequence
atggacctggaggcggcgaagaacggaaccgcgtggcgtccaaccagcgccgagggagatttcgaactggggatctcctcgaagcagaagcgcaagaaaacgaaaaccgtcaagatgatcggggtgctgactctctttcgctactcggactggcaagataagttgttcatgtccctgggtactatcatggctattgcacacggaagcgggctgccgctgatgatgatcgtgtttggtgagatgaccgacaagttcgttgacactgctggaaatttctcatttcctgtgaacttctcgctgtccctcttgaatcctgggaaaatcctggaggaagaaatgaccagatacgcttattactactcaggactgggagcgggagtgctggtggccgcctacatccaagtctcgttttggaccttggctgctggtaggcagatcaggaaaatccgccagaagtttttccacgcaatactccggcaagaaataggatggtttgatatcaatgatactaccgaactgaacactcgcttgactgatgacatctccaaaatctcggagggaatcggcgacaaggtcggaatgtttttccaagctgtggcgacttttttcgccggctttatcgttggatttatcagaggatggaaactgacgttggtgatcatggctatctctcctatcctcggactttctgcagccgtgtgggcaaagatcctgtccgccttttccgataaggaactggccgcgtacgcgaaggcaggggctgtggccgaagaggcactgggagccatcagaaccgtgatcgcgttcggcgggcagaataaggaactcgagcgttaccagaaacatctcgaaaatgcgaaagaaattgggatcaaaaaggcgatctctgccaatatcagcatgggcatcgcgtttctgctgatctacgccagctacgcgcttgcattctggtacggatcaactttggtcatctcgaaggagtacaccattggcaacgccatgaccgtgttcttctcaatcctgattggggcgttctcagtaggccaggccgcgccgtgcatcgatgcttttgccaacgcgagaggggccgcctacgtgatcttcgatatcattgataacaatccgaaaatcgattcattttccgaacgcgggcacaagccagatagcatcaagggaaatctggagttcaatgacgtccacttctcgtacccgtctcgggccaacgtcaaaattctgaaggggctcaatctgaaggtgcaatccggccagaccgtggctcttgtcggcagcagcgggtgcggaaagtcgactactgtccagctcatccagagactctacgaccccgacgaaggcaccatcaatatcgacggacaggatattcggaactttaacgtgaattatctgcgcgagatcatcggagtagtctcccaagaaccggtgttgttttccactactatcgccgagaacatttgctacggaagaggaaatgtcactatggatgagatcaagaaggcagtcaaggaagccaatgcctacgaattcatcatgaaactgccccagaagttcgacactctggtgggggagcgcggcgcccagctctccggaggacagaagcagcgcatcgcaattgcgcgggcgttggtgcgcaacccgaagattctgctgctggatgaagcgacttcggcccttgacactgaatccgaagcggaggtgcaggccgccctggataaggctagagagggaagaaccactatcgtgatcgcccaccgcctgtcaacggtccgcaacgccgacgtgatcgccggattcgaggatggtgtgattgtggaacagggatcacattcggagctgatgaaaaaagaaggagtgtacttcaaactggtcaatatgcaaacttctggatcgcagattcaatctgaggaattcgaattgaacgacgaaaaggccgcgacccgaatggcgcccaatggttggaagtcgcgactcttccgccattcgacccagaagaacctgaagaatagccagatgtgccagaagtcgcttgacgttgagacggatggactcgaggccaatgtgcctccggtgtccttcctcaaagttctgaagctcaataagactgagtggccatacttcgtggtgggaactgtttgcgcgatcgccaacggagggctgcaacccgccttcagcgtcatcttctcagaaatcatcgcgatttttggcccgggagacgacgcggtgaaacagcaaaaatgtaatatcttctcgctgatcttcttgttcctgggtattatcagcttcttcaccttcttcctgcaaggattcactttcggaaaagcgggagagatcctgacccggcggcttcgctcgatggccttcaaggcgatgttgagacaggacatgtcatggttcgatgatcataagaactcgaccggcgccctctcgacccggctggcgaccgacgctgcacaggtgcaaggggcaaccgggactcgcctggccctgatcgctcaaaacatcgcaaacttgggcaccggaatcatcatctcctttatctacggttggcagttgaccctcctgcttctggccgtggtgccgatcatcgcggtgagtgggatcgtggaaatgaagctgctggccggtaacgccaagagagacaaaaaggagttggaggcggcaggaaagattgccaccgaagccatcgaaaacatccgcaccgtcgtgagcctgactcaggagcgcaagttcgagtcgatgtacgtggagaagctgtatggcccgtaccgcaacagcgtccagaaggcccatatctacgggatcaccttctctatctcacaggcctttatgtacttctcgtacgccggatgcttcagattcggagcgtacctgattgtcaatggacacatgcgattcagagacgtgatcctcgtgttctcagctattgtgttcggagccgtcgctcttggtcacgcttccagtttcgcaccggactatgcgaaggcaaaactgagcgccgctcacctgtttatgctcttcgaacggcaaccgctcatcgactcctactcggaagaggggctgaagccagataagttcgaaggaaacatcaccttcaacgaggtcgttttcaattatccgacccgcgcaaacgtgccggtgctgcaagggctttcgttggaggtcaaaaagggacaaaccttggccctggtcggatccagcggttgcgggaagtcaactgtggtccaactgttggaacgcttctacgacccactggcaggaactgtgtttgtggatttcggtttccagctcttggacggccaggaagctaagaaactcaatgtgcagtggctcagggctcagctgggtatcgtgtcgcaagagcccattcttttcgactgcagcatcgctgagaacatagcttacggcgataactcccgggtggtgtcgcaggacgagatagtgtccgccgcgaaagcggcaaatatccacccgttcatcgaaaccctcccacacaagtacgaaaccagagtgggagacaaggggactcaactgtcaggcggacagaaacaaagaatcgcgattgcgcgggccctgatccgccagccacagattttgctgctcgacgaggccactagcgccctggacaccgaatccgaaaaggtggtgcaagaggcgctcgacaaggccagagaaggacgcacctgtattgtcatcgcccaccggctgtccaccatccagaatgccgacctgatcgtggtgtttcagaacggaagagtcaaagagcatggaactcatcagcaactgctcgctcagaaaggcatctacttctccatggtgtcggtgcaagccggaacccagaacctg

SEQ ID NO: 200245 - DNA, 3858 bp, Artificial Sequence
  derived and/or modified sequence
atggacttagaggcagccaagaacggaacagcatggaggccaaccagcgccgagggcgatttcgaattgggcatcagttcaaagcagaaaaggaagaagaccaaaactgttaagatgatcggcgtcctcactctctttcggtatagtgactggcaggataagctatttatgtcacttggcacgattatggccatcgcccatggcagcggcttgccactcatgatgatagtcttcggagaaatgaccgacaagttcgtggacacagccggcaactttagtttcccagtgaacttctccctctcactccttaacccaggaaaaatccttgaggaagagatgacccgttacgcatattattacagcggtttgggggctggcgtactcgtcgctgcctacatccaggtgagcttctggaccctggctgccggaaggcagatccgcaaaatcagacagaagttttttcacgctatacttcgacaagagatcggatggttcgacatcaatgacaccactgaactcaataccaggctgacagacgatatatccaagatctctgagggaataggcgataaggtgggtatgttcttccaggcagtcgccactttcttcgccggatttatcgtcggcttcattagagggtggaaactcactctcgtgatcatggcaatatccccgatcctggggctgagcgccgctgtttgggcgaaaatcctgagcgctttttcagacaaagagctggccgcttacgccaaagcaggcgccgttgctgaagaggccctgggagcaatacggaccgtcattgctttcggaggccagaacaaagagttagagaggtaccaaaagcacctggagaatgctaaagagattggaattaagaaggctattagtgcaaatatttccatgggcatcgcttttctccttatttacgcctcctatgccctcgcgttctggtacggcagcaccctcgtcatatcaaaagagtacacaattggcaatgcgatgaccgtgttcttttcaattctcattggcgctttcagtgtcggacaggccgccccttgtatagatgcctttgcaaacgctagaggagcagcatacgttatcttcgacatcatcgacaataaccccaagatcgatagcttttctgagagagggcataagcctgactcgatcaaggggaacctggagtttaacgacgttcacttctcctacccgagtagagccaacgtgaaaatcctgaaggggctgaacctgaaggttcagagcggccaaactgtcgccctggtgggcagcagcggctgtggtaagagtaccactgtgcagctcatccagcgcctatacgaccctgacgagggcaccataaatatagacggacaggacattcggaactttaacgtgaactatttgagagaaatcatcggcgtagtctcacaggaacccgtgctgttcagtactaccatcgcggaaaacatttgctacggccggggtaacgttactatggacgaaattaaaaaggccgttaaggaggccaatgcctatgagttcatcatgaagcttccccagaagtttgacacacttgtgggcgagcggggtgcacagctgagtggaggtcagaagcagcggatcgccattgcccgagcgctcgtaaggaatcctaaaatcttacttctggacgaggctacatctgcattagataccgagagcgaggcggaagttcaggccgccctcgacaaggcaagagaaggccgcacaacaattgtcatagcacacaggctgtccactgtgaggaacgccgacgtcatcgctggctttgaggacggcgttatcgtcgagcagggatctcactctgaactgatgaagaaggaaggagtctactttaaactggtcaacatgcagacctcagggtctcaaattcaatcagaggaatttgagcttaatgacgaaaaggccgccacgagaatggcccccaatggctggaagtctcgcctcttccgtcacagtacgcagaagaacctgaagaactctcagatgtgccagaagagtctcgacgtggaaactgacggcctggaagccaatgtgcccccggtatcatttctaaaggtgctcaaattgaataagacagaatggccatacttcgttgtggggaccgtgtgcgccatagccaatggggggctgcaacccgctttttctgtgatctttagcgagatcattgctatctttggtcccggggacgacgccgtcaaacagcagaaatgcaatatcttcagtctgatcttcctgttcctgggtataattagcttcttcacattctttctgcaggggttcacatttggaaaagctggcgagatcctgacaaggcgactccggagcatggcatttaaggcaatgctgaggcaggacatgagctggttcgacgatcataagaactctactggcgcactgagcactcgcttagccaccgacgccgcccaggtgcaaggggcaactgggacgcgcctggcattaatcgcccagaacatagcaaatctgggcaccgggattattatttcattcatctacggatggcaacttaccctgcttctgctggcagtggtgcctatcattgctgtgtcaggtatcgtggagatgaaactgcttgccggcaacgccaagagagacaaaaaggaactggaagcggccggtaaaattgccacagaggccattgaaaacattaggaccgttgtgagtctgacacaggaacgcaaatttgagtcaatgtacgtggagaagctgtatggtccctacaggaatagtgtgcagaaggcccacatctatggcattacatttagtatatcacaggctttcatgtacttctcctatgccggctgtttcaggttcggtgcctacctgatcgtgaatgggcatatgaggttccgcgacgtcatcctcgttttttccgctattgtttttggcgcagtcgcactggggcacgcatcttcattcgcccctgattacgcaaaggcgaaactatccgccgcgcacctgtttatgctgtttgaacggcagcctctgattgacagttactctgaggagggcctgaagcccgataagttcgaggggaacattactttcaacgaagtggtgttcaattatcctaccagagctaacgtccccgtactacaggggctgtcacttgaagtgaagaaaggccagacgctggcccttgtaggttcttccggttgcggtaaatctacagtggtacagctacttgaacgattctacgatccactggcaggcactgtctttgtggattttggatttcagttgcttgacgggcaggaagcgaaaaagctcaatgttcagtggctgcgggcccaactcggtatcgttagtcaggagccaattctgttcgattgcagtatcgccgagaacattgcatacggggataactcccgtgtggtgagtcaggatgagatcgtgagcgccgccaaagcggcaaacatacatccattcatcgagactcttcctcacaagtacgagactcgggtgggcgataaaggaacacagctgtcaggggggcaaaaacaacgaattgctattgcacgggccctcatccgccagcctcaaattctgctgctggatgaagctacaagcgcactcgatacagaatccgaaaaagtcgtgcaagaggctctggataaggctcgtgagggtcggacatgcattgtgatcgcacatagattatctacaattcagaatgctgacctgatcgtcgtcttccagaacggcagagtgaaggagcacggcacccaccagcaactgttggcacaaaaaggtatctacttttcaatggttagcgttcaggccggaacacagaacctc

SEQ ID NO: 200246 - DNA, 3858 bp, Artificial Sequence
  derived and/or modified sequence
atggacctcgaagccgcaaagaatggaactgcctggcggccaacctcggcagaaggagattttgaactgggaataagctccaaacaaaaacgcaagaaaacgaagacagtgaaaatgatcggggtgttaacccttttcagatacagtgattggcaggataagctctttatgtccctaggaactataatggctattgctcatgggtccggactgcccctgatgatgattgtgtttggggaaatgacagacaagttcgttgacaccgccggaaatttcagtttccctgtaaatttcagcctttccctcctcaatcctggtaaaattcttgaagaggaaatgacaaggtacgcgtattattactctggtcttggtgccggagtccttgtcgccgcttacatccaggtctccttctggaccctagcggccgggcggcaaatcagaaagatccgacagaagtttttccatgcgatcctgaggcaagaaataggttggttcgatatcaacgatacaacagaactcaacactcgcctgaccgatgacatcagtaagatatccgagggcataggtgacaaggtaggaatgtttttccaagccgtggcaacatttttcgctggttttattgtcgggtttatcagaggttggaaactgaccctggttataatggccattagtcctatcctagggctatccgctgctgtgtgggcaaagattctctcggcattcagtgataaggagctggcagcgtatgcaaaagctggtgctgtagccgaggaagcactgggggcaatcaggaccgtgattgctttcggaggccagaacaaagagctagaaagataccagaaacatctcgaaaacgccaaggaaattgggatcaagaaggcgataagcgcgaatatcagtatgggcatcgccttcctgctgatctacgcatcatatgccctggctttttggtacgggtccaccctagtgatatctaaagagtatactataggaaacgcgatgactgtgtttttcagtatcctcattggtgccttctcagttggacaggccgctccatgtatcgacgccttcgccaacgctagaggagcagcttatgtcatattcgatatcattgacaacaatcccaagatcgattctttctccgaacgtggtcataagcccgacagcatcaagggtaacctggagttcaatgacgtgcatttctcctatcccagccgcgccaatgtgaagatcctgaagggcctcaatctgaaggtgcaatcaggccagaccgtggcgctagtggggagctcaggatgtggaaagagtactactgtccagctgattcaaagactgtacgatcctgatgaaggcactattaacatcgatgggcaggatatccggaactttaacgtgaattacctgcgagaaatcatcggcgtggtgagccaagaaccagtactcttttcaacaacgatcgccgaaaacatctgctatggccggggcaacgtgacaatggatgagatcaagaaggccgtcaaggaagccaatgcctacgagtttataatgaaacttccacaaaaatttgataccctggtaggggagagaggggcccagctgtcaggggggcagaagcaacggattgcaatcgcaagagcactcgttagaaatcctaaaattttgctgcttgatgaagctacgagcgctttggataccgaatccgaggcggaggtgcaggccgcactcgacaaggctagagaaggtagaaccaccatcgtgatcgcacatagactcagcacggtaaggaacgcggacgtgatcgccgggttcgaggatggcgtgatcgtggagcagggaagccacagtgagctgatgaagaaagagggggtttattttaaactggtgaacatgcagacaagcggatctcagattcagtctgaagagttcgagctcaatgacgaaaaggccgctaccagaatggcaccgaatggttggaagtccaggctattcagacacagtacccaaaaaaatttaaagaactcccagatgtgccaaaaatccctagatgtggagacagatggattagaagcgaacgttccaccagtgtctttcctgaaggtgttgaagttaaataaaaccgaatggccgtacttcgttgtgggtacagtatgcgctattgcaaacgggggacttcagccagcattctctgtgattttttcagaaatcatagccatattcggccccggggatgacgctgtgaagcagcagaaatgtaacattttttccctgatttttctttttttgggcattattagtttctttacctttttcttgcaagggttcacgtttggaaaggcgggggagattttgaccaggagattgcgctcaatggccttcaaagccatgctgcggcaagatatgtcatggttcgacgaccataagaactccacaggggcactgtccacccgcctggccaccgacgctgcacaggtacagggtgctacagggacccgcttggcgctgatcgctcagaatatcgcaaatcttggtacggggatcatcatcagttttatatatgggtggcagctgacattactgctcttagcagtcgtgcccatcatcgccgtctccgggatcgtggaaatgaaactactggccggcaatgctaagagggataagaaagagcttgaggccgcaggcaaaatcgctaccgaggccatcgagaacatcagaacagtcgtgtcgctaacccaggagcgcaagttcgaaagcatgtatgtggagaagctgtacggaccctacaggaactctgtacagaaagctcacatttatggaataaccttctcaatctcacaggcgttcatgtacttttcgtacgccgggtgcttccgatttggggcttacttgatcgtgaacgggcacatgcggtttcgggacgtgatcctggtattctcagctatagtcttcggggccgtggcactgggacacgccagttctttcgctccagattatgcaaaagccaaattgtcagcagctcatctgtttatgctcttcgagcgacagcccctgatcgactcttattcagaggagggcctgaaacctgacaaattcgaggggaatatcacctttaacgaagtggtgttcaattacccaactagggcgaatgtgccagttctgcagggattgtctctagaggtgaagaaaggccaaactttagcgcttgttgggagtagcggatgcggaaaaagtactgttgttcagttgcttgagaggttctacgacccccttgccggcacagtctttgtagatttcgggtttcagctgctggacggccaggaggccaagaagctgaacgtgcagtggctaagagctcagctcgggatcgtgtcacaggagcccatcctgtttgattgcagcattgcagagaatatcgcgtatggagataattccagggtagtgagccaagacgagattgttagcgcggcaaaagccgccaatatccatccatttattgagactctccctcacaaatatgagacacgcgtgggcgataagggtacacagctgtccggaggccagaagcagcgaattgcaatcgcccgtgcgctgataaggcagcctcagattctactgctggatgaggctacgtctgctctggacaccgagtccgaaaaggtagtgcaagaagctctggataaggctcgagagggccggacctgcatcgtgatagcccaccgactgagtactattcagaacgcagacctcatagtcgtgttccagaacggcagagttaaagagcatggaacccaccagcaactgcttgctcagaagggaatttactttagcatggtctcagtgcaagcaggaacgcagaatctt

SEQ ID NO: 200247 - DNA, 3858 bp, Artificial Sequence
  derived and/or modified sequence
atggacctggaagcggccaaaaatggaaccgcatggaggcccacttctgcggagggggactttgagctggggatcagtagcaaacaaaaacggaagaaaaccaaaacagtaaagatgatcggtgttctgacactattcaggtactctgattggcaggataagctgtttatgtctctgggaacgataatggctattgctcacgggtccggtcttccccttatgatgatagtctttggggaaatgacagataagttcgtggataccgccgggaattttagtttccctgtcaatttttcactatctctgctcaaccccgggaaaatactggaagaagagatgacccgttatgcatactactactccggtttaggcgccggtgtgttagtggccgcctacatacaggtgtctttctggaccctggctgcgggacggcagattcggaaaatccgtcagaagtttttccacgccatcttgcgacaggagattggctggttcgacataaatgatacaaccgagcttaacaccaggttaaccgatgatatatccaaaattagcgaagggattggcgataaagtgggaatgtttttccaggctgtagctaccttttttgccggtttcatagtcggtttcattcgcggatggaaactgaccttagttatcatggccatatctccaatcctagggctgagcgctgctgtgtgggcaaaaattctcagcgcctttagtgataaggagctcgccgcatacgctaaggcaggtgcagtggcagaggaagccctcggagcgatcagaactgtaattgcctttgggggacagaacaaggaattggaaagataccagaaacacctcgaaaatgcaaaagagatagggatcaaaaaagcgatctccgcaaatatttccatgggtattgccttcctgcttatctatgctagttacgcattggccttttggtacggctccactcttgtgatcagcaaggaatacacaattggaaacgccatgaccgtttttttctcaatccttatcggggcgtttagtgttggacaggccgcgccttgcatagatgcctttgcaaatgcaagaggcgcagcctacgtgatctttgacataatcgacaacaaccctaaaatcgactctttctccgaacggggccataaacctgacagtataaagggcaatctggagtttaatgatgtgcacttttcataccccagccgagctaatgtaaagatcttgaagggacttaatctcaaggtccagagcggccagaccgttgcccttgttggatcctctggatgcggcaaaagtactactgtccagctgatccagaggctgtatgaccccgatgaggggaccatcaacattgatggccaggacattcgcaatttcaacgtaaactacttacgagaaattatcggggtcgtgagccaggaaccggtactgttctccacaaccatcgctgagaatatttgttatgggcgcggcaatgtcactatggacgagatcaaaaaggcggttaaagaggccaacgcctatgaatttataatgaaattaccccagaagtttgacacattggttggcgagagaggcgcccagctgtcgggaggccaaaaacagcgtatcgccattgcccgcgccttagttcgaaatccgaagatattgctgctggatgaagctacctccgctcttgacacagaaagcgaggctgaggtacaggctgcgctggacaaggcacgcgagggaagaaccactatcgtcattgctcaccgcctgagtacagtgaggaatgcagacgttatcgcggggtttgaggacggggttatagtggaacagggcagtcattctgagctgatgaagaaagagggcgtgtatttcaaactggtgaatatgcagacaagtggctctcagattcagtcggaggaatttgaactaaacgacgaaaaagccgcgaccagaatggccccgaacggatggaaatcaaggcttttccggcacagcacccagaaaaacctgaaaaactcccagatgtgtcagaagtcacttgacgtagagactgacggcctggaagcgaatgttcctcccgtgagttttctgaaagtgttgaagctgaataagaccgaatggccatacttcgtcgtcgggacagtctgcgctatcgccaatgggggtttacagcctgcatttagtgttatctttagcgaaatcattgctatcttcggacctggagatgacgcggtcaagcagcagaagtgtaacatcttttccctcatctttctgttcctgggtatcatctccttctttacattttttctgcagggcttcaccttcggcaaagcaggtgagattctgactcggcggttgcggagcatggccttcaaggccatgctgaggcaggacatgtcttggtttgatgaccacaagaattctacgggcgccttatccacccgactagccaccgacgctgcccaggtgcagggagctacaggaacccgcctcgcactgatcgcccagaacatcgctaacctcggaacagggataataatttcattcatctacggctggcagctcactttgcttctgctggctgtagtgcctatcatagccgtttccggaatagttgagatgaagctgctcgctggcaacgccaagcgggataaaaaagaattggaggcagctggcaagatcgctactgaggcaatcgaaaacatccggactgtggtgagcctgacacaagaaagaaaatttgagtctatgtatgtggagaagctgtacggaccatatcgcaatagcgtgcagaaggcccacatctacggtatcacgtttagcataagtcaggccttcatgtacttctcatacgctggttgcttccgctttggcgcataccttatcgtgaacggccacatgagatttcgcgatgtcatcttggtttttagcgccattgtttttggggccgtggcacttggacatgcctcaagttttgcacccgactacgccaaagctaagctgtccgccgcccacctgtttatgcttttcgagcgacagccacttatcgatagctactctgaagagggccttaaaccagacaaattcgaaggcaatattacgtttaacgaggtcgttttcaactacccgactcgtgccaacgtaccggtccttcaggggctgagccttgaagtaaaaaagggacagactcttgctctcgtcggcagttctgggtgcggcaagtctactgtggtgcaactgttagaacggttttacgatccactggccggaacagtatttgtggactttggctttcagctgttagatggccaagaagccaaaaagctgaatgtgcagtggttgcgcgcacagctgggcattgtcagccaggagccaatactgttcgattgtagcatcgcagagaatattgcctacggagataactccagagtcgtttctcaggacgaaatcgtgagcgcggccaaagccgccaacatccacccgttcatcgagaccttgccccacaaatatgaaacccgagtcggcgacaagggtacccagctttccgggggccagaagcaacgcatagctatcgcacgggcattaataaggcagcctcagatactgctgctggacgaagctacctccgccctcgacaccgagtctgagaaggtcgtccaagaagccctggataaagcaagggaaggacgcacctgtattgtaattgcacacaggctctccaccattcagaatgccgacctcatagtcgtgtttcagaacgggcgggtcaaggagcacgggactcaccagcagcttctggcccagaaaggtatatattttagtatggtgagtgtgcaagcggggacgcaaaatctg

SEQ ID NO: 200248 - DNA, 3858 bp, Artificial Sequence
  derived and/or modified sequence
atggatttagaagcggcgaaaaatggtacggcgtggcgtccgacgtcggcggaaggtgattttgaattaggtatatcgtcgaaacaaaaacgaaaaaaaacgaaaacggtaaaaatgataggtgttttaacgttatttcgatattcggattggcaagataaactatttatgtcgttaggtacgataatggcgatagcgcatggttcgggtctaccgttaatgatgatagtttttggtgaaatgacggataaatttgtagatacggcgggtaatttttcgtttccggtaaatttttcgctatcgctattaaatccgggtaaaatactagaagaagaaatgacgcgttatgcgtattattattcgggtctaggtgcgggtgtattagttgcggcgtatatacaagtatcgttttggacgttagcggcgggtcgtcaaatacgaaaaatacgacaaaaattttttcatgcgatactacgtcaagaaataggttggtttgatataaatgatacgacggaactaaatacgcgattaacggatgatatatcgaaaatatcggaaggtataggtgataaagtaggtatgttttttcaagcggttgcgacgttttttgcgggttttatagttggttttatacgaggttggaaactaacgctagttataatggcgatatcgccgatattaggtttatcggcggcggtatgggcgaaaatactatcggcgttttcggataaagaactagcggcgtatgcgaaagcgggtgcggtagcggaagaagcgctaggtgcgatacgtacggttatagcgtttggtggtcaaaataaagaattagaacgttatcaaaaacatctagaaaatgcgaaagaaataggtataaaaaaagcgatatcggcgaatatatcgatgggtatagcgtttctactaatatatgcgtcgtatgcgttagcgttttggtatggttcgacgctagtaatatcgaaagaatatacgataggtaatgcgatgacggtatttttttcgatactaataggtgcgttttcggttggtcaagcggcgccgtgtatagatgcgtttgcgaatgcgcgaggtgcggcgtatgttatatttgatataatagataataatccgaaaatagattcgttttcggaacgaggtcataaaccggattcgataaaaggtaatttagaatttaatgatgtacatttttcgtatccgtcgcgagcgaatgtaaaaatattaaaaggtctaaatctaaaagttcaatcgggtcaaacggtagcgctagtaggttcgtcgggttgtggtaaatcgacgacggtacaattaatacaacgactatatgatccggatgaaggtacgataaatatagatggtcaagatatacgaaattttaatgtaaattatttacgtgaaataataggtgttgtttcgcaagaaccggttttattttcgacgacgatagcggaaaatatatgttatggtcgaggtaatgtaacgatggatgaaataaaaaaagcggttaaagaagcgaatgcgtatgaatttataatgaaactaccgcaaaaatttgatacgttagtaggtgaacgtggtgcgcaactatcgggtggtcaaaaacaacgtatagcgatagcgcgtgcgttagttcgaaatccgaaaatattactactagatgaagcgacgtcggcgctagatacggaatcggaagcggaagttcaagcggcgctagataaagcgcgtgaaggtcgtacgacgatagtaatagcgcatcgtttatcgacggtacgtaatgcggatgtaatagcgggttttgaagatggtgttatagttgaacaaggttcgcattcggaactaatgaaaaaagaaggtgtttattttaaattagtaaatatgcaaacgtcgggttcgcaaatacaatcggaagaatttgaattaaatgatgaaaaagcggcgacgcgaatggcgccgaatggttggaaatcgcgtctatttcgacattcgacgcaaaaaaatctaaaaaattcgcaaatgtgtcaaaaatcgctagatgttgaaacggatggtttagaagcgaatgtaccgccggtttcgtttttaaaagtattaaaattaaataaaacggaatggccgtattttgttgtaggtacggtttgtgcgatagcgaatggtggtttacaaccggcgttttcggttatattttcggaaataatagcgatatttggtccgggtgatgatgcggtaaaacaacaaaaatgtaatatattttcgctaatatttctatttctaggtataatatcgttttttacgttttttttacaaggttttacgtttggtaaagcgggtgaaatactaacgcgtcgattacgttcgatggcgtttaaagcgatgttacgacaagatatgtcgtggtttgatgatcataaaaattcgacgggtgcgttatcgacgcgtctagcgacggatgcggcgcaagttcaaggtgcgacgggtacgcgtctagcgctaatagcgcaaaatatagcgaatttaggtacgggtataataatatcgtttatatatggttggcaactaacgttactactactagcggtagttccgataatagcggtatcgggtatagttgaaatgaaactattagcgggtaatgcgaaacgagataaaaaagaattagaagcggcgggtaaaatagcgacggaagcgatagaaaatatacgaacggtagtttcgttaacgcaagaacgtaaatttgaatcgatgtatgtagaaaaactatatggtccgtatcgaaattcggtacaaaaagcgcatatatatggtataacgttttcgatatcgcaagcgtttatgtatttttcgtatgcgggttgttttcgatttggtgcgtatctaatagtaaatggtcatatgcgttttcgtgatgtaatattagtattttcggcgatagtatttggtgcggttgcgttaggtcatgcgtcgtcgtttgcgccggattatgcgaaagcgaaactatcggcggcgcatttatttatgttatttgaacgacaaccgctaatagattcgtattcggaagaaggtctaaaaccggataaatttgaaggtaatataacgtttaatgaagtagtatttaattatccgacgcgtgcgaatgtaccggttttacaaggtctatcgttagaagtaaaaaaaggtcaaacgctagcgttagttggttcgtcgggttgtggtaaatcgacggtagtacaattactagaacgtttttatgatccgctagcgggtacggtatttgtagattttggttttcaattattagatggtcaagaagcgaaaaaattaaatgttcaatggctacgagcgcaactaggtatagtatcgcaagaaccgatattatttgattgttcgatagcggaaaatatagcgtatggtgataattcgcgagtagtatcgcaagatgaaatagtatcggcggcgaaagcggcgaatatacatccgtttatagaaacgttaccgcataaatatgaaacgcgtgtaggtgataaaggtacgcaattatcgggtggtcaaaaacaacgaatagcgatagcgcgtgcgctaatacgacaaccgcaaatactattattagatgaagcgacgtcggcgttagatacggaatcggaaaaagtagtacaagaagcgttagataaagcgcgtgaaggtcgtacgtgtatagtaatagcgcatcgtctatcgacgatacaaaatgcggatttaatagtagtttttcaaaatggtcgagtaaaagaacatggtacgcatcaacaactattagcgcaaaaaggtatatatttttcgatggtatcggtacaagcgggtacgcaaaatcta

SEQ ID NO: 200249 - DNA, 3858 bp, Artificial Sequence
  derived and/or modified sequence
atggatttggaggctgcgaaaaacggtacagcttggcgaccaacctcggccgaaggagacttcgagctggggattagctcaaaacagaaaaggaaaaagaccaagaccgtaaaaatgattggcgtcctgactctgttccggtattcagactggcaggataagctgtttatgtctctcggtactatcatggctattgcgcacggctcagggctcccgctgatgatgatagtcttcggtgaaatgaccgacaaattcgtggacaccgccggcaacttctcctttccagtcaattttagtctgtctttactgaaccccggaaagattcttgaggaggaaatgacaagatacgcatactactactctgggctcggtgcaggcgtgttggtggccgcctatatccaggtatctttctggaccctggccgcaggtcggcagattaggaaaatccggcagaagttctttcacgccattctcagacaggagatcggttggtttgacatcaacgacaccaccgagctcaatacaaggctgacagacgatatctctaagatctccgagggtattggagataaggtaggtatgttcttccaggcagtcgcaacctttttcgcgggtttcattgtcggcttcatacgcgggtggaaactcacactggtaattatggctattagccctattctcggcctttcagctgccgtctgggccaaaattttgagcgcgttctcagacaaagagctggctgcctacgcaaaggcaggggcagttgcagaagaggctttgggagccatcaggactgtgatcgcttttgggggccagaacaaagagttggaaagatatcaaaaacatctcgaaaacgcaaaagagatcggcatcaagaaagccatctccgccaacataagtatgggaattgcctttctgctcatatatgcctcctacgctctggccttctggtatggcagcaccctcgtgattagcaaggagtatacaatcgggaatgccatgactgtctttttcagcatcctcatcggagcctttagcgtgggccaggctgcgccatgcatcgacgccttcgcaaacgccaggggggccgcctatgtgatttttgacataatcgataacaaccccaagatagattcattctctgaacgcggccacaaacctgattccattaaggggaaccttgagtttaacgacgtccacttctcgtacccttctagagctaacgtaaagatcctgaagggcctgaatttgaaagtacagagcggtcagaccgttgccctcgtggggtcctccggctgtggaaaaagtaccaccgtccagcttattcagagactgtacgacccggatgaaggcaccattaatatagatggacaggacattcggaattttaatgttaactacctgcgagagattattggggtggtgtctcaagaacctgtgttgttttcgaccaccattgccgagaacatctgctatgggaggggcaacgttaccatggacgaaatcaaaaaagccgtgaaggaggcaaacgcatatgagtttatcatgaaactgccacagaagttcgacacgctggtcggcgaaagaggcgcacagctgagcggaggccagaaacagcgcattgcaatagcaagagccttggtgcgaaaccccaagattctattgttggatgaagcgacgagtgccctggacactgaaagcgaagctgaggtgcaagccgccttagacaaagcgcgcgaggggagaactaccatcgtgatcgctcaccgactttccactgtcagaaatgccgacgtcatcgccggctttgaggacggggtaatagttgaacagggatcgcatagcgagctaatgaagaaggaaggagtgtactttaaactcgtcaatatgcagactagcggcagtcagatacagtcagaggagttcgagctaaatgatgaaaaagccgccacaaggatggcccctaatggatggaaaagcagattgtttagacattcaacccagaagaacctgaagaattctcagatgtgccagaagtccctggatgttgaaacggacggtctggaagctaatgtgccccctgtcagtttcctgaaggtgctcaagcttaacaagaccgaatggccctattttgttgtaggtactgtttgtgctatcgccaacggagggctgcagccagccttcagtgtaattttctcagagattatcgccatttttggccctggggatgatgccgttaaacaacaaaaatgcaatatcttcagtctgatattcttgttcctcggtattatatcctttttcaccttctttctacaaggctttacctttgggaaagcaggagaaatcctcacacgtcgtttacggtcaatggccttcaaagcaatgttgcgccaggacatgagctggttcgatgaccacaaaaacagtaccggcgcgttgagtacgcgcctggcgacagacgccgctcaggtgcagggtgctactgggaccaggctcgcccttattgcccagaatatcgccaatcttggaactggcattattatcagttttatctacggttggcagctgacactgttactacttgctgttgtcccgatcatcgccgtaagcggtattgtggagatgaagctactggcgggaaatgctaagagggacaaaaaggagctcgaggcagcaggaaaaattgcaacagaggcaattgagaatattcgtaccgtggtatcattaacccaggagcgcaagttcgagtccatgtatgtcgaaaagctttatggcccgtataggaacagcgtgcagaaggcccacatatatgggatcacctttagcatcagtcaggccttcatgtatttctcgtatgctgggtgttttcgctttggagcctaccttattgtgaacggccatatgaggttccgggatgtgatcctggtgttttctgccatcgtgtttggggccgtggctctgggtcatgcgagctcattcgcccctgattatgctaaggccaagctttccgctgcccacctgtttatgctgttcgagagacagccactgattgattcatactcagaggaggggctaaagcccgacaagtttgagggaaacatcacattcaatgaggttgtctttaactatccaactagggccaacgtcccagttctgcaaggactgagtcttgaggttaaaaagggccaaaccctcgccttagttggatctagcggctgcgggaagagtaccgtcgtccagctcctggaacggttttatgatccactagcagggacagtttttgttgatttcggttttcagcttctggacggccaagaagcaaaaaagttgaatgtccagtggctgagggctcagctaggaatcgtctctcaggagcccattctgttcgactgttctattgccgagaacatcgcttacggtgacaatagcagagtggtctcccaggatgaaatagtgtccgcagccaaagcagccaatattcacccatttatagagacactgccccacaaatatgagacccgtgtgggcgataaaggtacacagctcagtggcggtcaaaagcagcggatcgccattgctagggcgttgatcagacagccgcagatcctgttgctggacgaagctacgtccgcattggacactgaatcagagaaggtagttcaggaggctcttgacaaggctcgtgaaggacgcacatgtatcgttatcgctcacagattgtccacaatccaaaatgccgacctgatcgtggtgttccagaacggaagggtcaaggagcacgggacacatcagcagttgctggcacaaaaaggaatatatttctcaatggtctccgttcaggcgggcacacagaatctg

SEQ ID NO: 200250 - DNA, 3858 bp, Artificial Sequence
  derived and/or modified sequence
atggacctcgaagcagcgaagaacggaaccgcgtggcgcccgacctccgccgagggagactttgaattgggaatctcgtcaaaacagaaaagaaagaaaaccaaaaccgtgaaaatgataggagtgttgactttgttccggtactcggactggcaagacaagctgtttatgtcactgggtaccataatggctattgcccacgggtccgggctgccgctgatgatgatcgtctttggggagatgaccgacaagttcgtggatactgccggaaacttttccttcccggtcaacttttccctgtcactgctgaatccagggaagattttggaggaagagatgacgcggtacgcctactactactcaggcctcggagcgggagtgctggtcgctgcatacattcaagtgagcttttggactcttgccgccggccgccagatcaggaagatccggcagaagttcttccatgccatcttgcggcaagagatcggctggtttgatatcaacgatacgaccgagcttaatactaggctgactgatgacatttcaaagatcagcgaaggaatcggagacaaggtcggcatgttcttccaagccgtggccactttcttcgccggcttcatcgtcggtttcatacgcggatggaagctcaccctcgtgatcatggccatttcccccatccttggcctctcagccgccgtgtgggcaaaaatcctgtcggcttttagcgacaaggaactggccgcgtacgctaaggcaggcgctgtggccgaagaagcgctcggggcgattcggacggtgatcgcgtttggagggcagaacaaagagctggaaagataccagaagcatctggaaaatgccaaagaaatcggcatcaagaaggctatttccgctaacatctcgatgggcatcgccttcctgctgatctatgcatcatacgcgcttgcgttttggtacgggtccactcttgttatcagcaaagaatacactatagggaacgccatgactgtctttttctccattcttatcggagccttttccgtgggccaggctgcgccgtgcatcgacgccttcgcaaatgctcggggcgccgcctacgtgatcttcgacatcatcgacaacaaccctaagatcgattcgttctccgagaggggacacaagcctgacagcatcaagggcaacctcgagtttaacgatgtccatttcagctacccatcccgcgctaacgttaagatcctcaaaggactgaatctgaaggtccagagcggccaaactgtggccctggtgggttcaagcggctgcggaaagtcgaccaccgtgcagctgatccagcgactgtacgacccggatgagggaaccattaacatcgacggacaggacatcagaaacttcaatgtcaactacctgcgtgagatcatcggcgtggtgtcccaggagcctgtcctcttttccactaccatcgcggagaatatctgctacggacggggaaatgtcactatggacgagatcaagaaagccgtgaaggaagccaacgcgtacgagttcatcatgaaactgccgcagaaatttgataccctggtgggagaaagaggagctcagctctcgggcggacaaaagcagcgcattgcaatcgccagagcccttgtgcggaaccccaaaattctgctcctcgacgaagcaaccagcgccctggacaccgagtcggaagccgaggtgcaagcagctttggataaggctcgcgagggtcgcaccactatcgttattgcacatcggctgtcaacggtgcgcaacgccgacgtgatcgccggattcgaggacggagtgatcgtggagcaggggtcacactcagaacttatgaagaaagaaggagtgtacttcaaactcgttaacatgcaaacctcgggttcgcagatccaatcggaggaatttgaacttaatgatgaaaaggccgctacgaggatggcaccgaatggatggaagtcaagactgttcagacactccactcaaaagaatctcaagaattcccagatgtgtcagaagtcattggatgtcgaaaccgacggactggaagcaaacgtccctcccgtgtcctttctcaaggtcctgaagctgaataagactgagtggccatacttcgttgtcggaacggtctgcgccatcgcgaatggaggactgcagccggccttctcggtcatcttcagcgaaatcatcgcgatctttggtccaggagacgatgcagtgaaacagcagaagtgtaacatcttctccctgatcttcctgttcttgggaatcatctcctttttcactttctttctgcaagggtttactttcgggaaggcgggggaaattctgactcgccggctccggagcatggcgttcaaggccatgctgcgccaagacatgtcatggttcgatgatcacaaaaactccaccggtgccctgtccacgagactggcgacggacgcagctcaggttcaaggagccactggaactagactggcacttatagcacagaacatcgctaatcttggaactggaatcatcatatcgttcatctatggctggcagctgaccctgctgctgctcgcggtcgtgccgatcatcgcagtgtcggggatcgtcgagatgaagctgctcgcgggaaacgccaagcgggataagaaggaactggaggccgcgggaaagattgcgaccgaggccatcgagaacattcggactgtcgtctccctcacccaggagcgcaaattcgaaagcatgtacgtggaaaagctctacggtccgtaccgaaactcggtccagaaagcccacatttacggaatcaccttctcaattagccaggccttcatgtatttctcatacgcaggctgcttccggttcggagcgtatttgatcgtgaatggacacatgagattccgcgatgtgattcttgtgttctcagccatcgtgttcggggcggtggccctgggccatgcttcatcgttcgccccagactacgcaaaggctaagctgtcagcggcgcacttgttcatgctgtttgaacggcagccgctcatagacagctactcagaagaggggctcaagccggacaagtttgagggcaacatcaccttcaacgaagtggtgttcaattatcccaccagggcgaatgtgcctgtgctgcagggcctcagcttggaggtcaagaaaggtcaaactctggctctcgtgggatcttctggatgcggaaaatccacggtggtgcaactcctcgaacgcttctacgatccactcgcgggaactgttttcgtggactttggtttccagcttcttgacgggcaagaagccaagaagctcaacgtgcaatggctgagagcacaactgggtattgtgagccaagagccaatccttttcgactgttcgatcgctgagaacatcgcgtacggtgataattctcgcgtcgtgtcacaagatgaaattgtctcggccgcgaaagcagccaatatccacccgttcatcgaaaccctccctcacaaatacgagactcgcgtgggagacaagggcacccagctgtctggggggcaaaagcaaagaatcgccatcgcccgcgctctcatacgccagccacagattctgctgttggacgaagcgacctcagctctggatactgagtctgagaaagtggtccaggaagccctcgacaaggcccgggaaggacggacttgcatcgtcatcgcacatcgcctcagcactatccagaacgctgatcttatcgtggtgttccagaacggccgagtgaaagaacacggcacccatcaacagctgctggctcagaagggaatctacttctcgatggtttccgtgcaggccggaactcaaaatctg

SEQ ID NO: 200251 - DNA, 3858 bp, Artificial Sequence
  derived and/or modified sequence
atggatttggaggccgccaagaacgggaccgcctggaggcccacatccgccgagggcgactttgaactgggcatatctagtaaacagaaaagaaagaaaacaaagaccgtgaaaatgataggtgtcttgactctttttaggtactcagactggcaggacaagttatttatgagtctgggcacaattatggccatcgcgcatggcagcggcctccctttgatgatgatcgtgtttggcgagatgactgacaaattcgtggataccgccggtaacttttctttcccggtaaactttagtcttagcctgttgaaccccgggaagatcctggaggaagagatgacccggtatgcttattattattcgggcctgggagccggcgttctggttgccgcatatatccaggtgagtttttggacccttgctgctgggcggcagatccgcaagatacggcaaaagttcttccacgccatcctcagacaggaaattggctggttcgatattaatgacactacggaattgaataccagacttaccgacgatatttcaaagattagcgagggcatcggcgataaggtaggcatgttttttcaggccgtagccacatttttcgcgggatttattgtggggtttattcgaggatggaagctgacactggttattatggcgattagcccaattctggggctgtctgccgccgtttgggccaaaatactgtctgccttcagcgacaaggagctggctgcatatgctaaggcgggagctgtcgcagaggaggctctcggcgcaattagaaccgtgatagcttttggcggtcaaaataaagagctagagcgttaccagaagcatctagagaacgctaaggaaatagggataaagaaagcaatttctgctaacatatctatgggcattgcattcctgctgatctatgcttcttacgcccttgccttttggtacggcagtactcttgttatctccaaagagtacacaatcggcaatgctatgaccgtcttctttagcatcctgattggagcttttagtgtcgggcaggcagccccatgcattgatgcatttgcaaacgccaggggggccgcatatgttatcttcgacatcatcgataataaccctaagatcgattccttttctgagagaggccacaaaccggactctattaagggcaacttggagttcaatgatgttcatttcagctacccgtctcgcgccaatgtcaaaatcctgaaagggctaaaccttaaagttcagtcgggacagacagtggctctggttggttccagcgggtgcggtaagtccaccaccgtgcagctcattcagcggctgtacgatcccgatgagggcacaatcaacattgatggacaagatattcggaacttcaacgttaattacctgcgcgaaataattggtgtcgtgtctcaggagcctgtgctgttctcaaccacgatagcagaaaatatctgttacgggcgtggcaatgtaactatggatgagatcaagaaagcggtgaaggaggctaatgcctacgagtttataatgaagctgccccaaaagtttgatactttggtgggcgaaaggggagcccagttgtccggcgggcagaagcagagaattgctatcgcaagggcactggtgagaaatcctaagatactgctgctagatgaggctacctccgcactggacactgaatccgaggctgaggttcaggccgccttggataaggcaagggagggacggactactatcgtcatagcccaccgcttgtcgaccgtgagaaacgccgatgtgatcgccggctttgaagacggcgtgattgtcgagcagggtagccactcagagttaatgaagaaagagggcgtgtactttaaattagtgaacatgcagacatctggaagtcaaatccagtccgaagaattcgagctgaatgatgagaaagcagcaacccggatggcccctaatgggtggaaatcacgcctgtttcgccattccactcagaagaaccttaagaactctcagatgtgtcagaaatcactagacgtggagaccgatggtctggaagcgaacgttccccccgttagcttcttgaaagtgctgaaactgaataaaaccgaatggccctatttcgtggtgggcacagtctgcgcgatcgccaacggcggactccaacccgccttcagcgtgatttttagtgaaattatagctatctttgggccaggggacgatgcagttaagcaacaaaaatgtaatatttttagtctgatttttcttttcctgggtattatatcgtttttcacttttttcttgcagggattcacgttcggaaaggcgggtgagattctcactcgccggctccgctccatggctttcaaagccatgcttcggcaggacatgtcctggttcgacgaccacaagaacagtacgggtgcccttagcacacgtctggctacggatgcagctcaggttcagggagctaccggcacacggttggccttgatagctcaaaacatcgccaacctggggacaggcattattatatccttcatttatgggtggcagctaacacttctgctgttggcggtggtgcctattatcgctgtgagtggaatcgtggaaatgaaactgcttgcgggtaatgccaagagggacaaaaaggaattggaggcagctggcaagatcgctacggaggcgatcgagaacattcgcacagtcgtctccctgactcaagagcgcaagttcgaaagcatgtatgtggagaagctgtacgggccttaccgaaattcagtgcagaaggcccacatatacggaattactttctccatatctcaggcattcatgtacttcagttacgctgggtgcttccgtttcggtgcctacctcattgtgaacgggcacatgaggtttagagacgtgatactggtgttttcggcgatagttttcggtgctgtggccttgggccatgcaagcagctttgcgcccgactacgccaaggctaaactgtcagcggcccacttatttatgttgtttgagaggcagccgctaatcgactcctattctgaagagggcctcaagccagacaagtttgaagggaacattacctttaatgaggtggtcttcaactatccgactcgagcaaacgttcccgtcttgcaaggactgtcactcgaggttaagaagggacagaccctcgcgttggtaggatcctcaggatgtggcaaatctacagtggtgcagttgctggagaggttttatgacccattggccggaacagtgtttgtggacttcggctttcagctgctggacgggcaagaagctaagaagctgaacgttcagtggctgagagcccaattgggtatcgtgagtcaggagccaatcctgtttgattgtagcatcgccgagaatattgcatacggagacaacagcagagttgtaagccaggatgagattgtgagcgcggcgaaggcagccaatatacaccccttcatagaaaccctgcctcataaatatgagacccgagtaggggataaaggaacccagcttagtggagggcaaaagcaacgcattgcaatcgcgcgtgctcttattagacagcctcaaattctgctcttggacgaggccacttctgctctcgataccgagtccgaaaaggtagtgcaggaggcgcttgacaaagcacgagaggggaggacttgcatcgttatagctcatcgcctgagtactatccaaaacgcagatctgattgtggtgttccagaacgggcgggtgaaggaacatggaacccatcagcaactactcgcgcaaaagggcatctatttctccatggtgtcagtgcaggcaggcacgcaaaatctc

SEQ ID NO: 200252 - DNA, 3858 bp, Artificial Sequence
  derived and/or modified sequence
atggatctcgaagccgccaaaaatggcaccgcctggcgccctacttccgccgagggcgacttcgagttgggaatcagctcaaagcagaagagaaagaaaaccaaaacggtgaagatgatcggggtcctgacactcttccggtactcagactggcaggataaactgtttatgtccctcggcacaattatggccatcgcccacgggtccgggcttccgctgatgatgattgttttcggcgaaatgaccgataaattcgttgatactgccggcaatttcagctttcctgttaatttctcccttagtctgctgaatccaggaaaaatcctggaagaggagatgaccaggtatgcgtactattatagtggcctgggagctggggttctcgttgctgcctacatacaggtgtctttctggaccttggctgccggtagacaaatcaggaagattcgccagaaattctttcacgctatcctcaggcaggagatcggctggttcgacatcaacgacacaactgagctcaacacccgactcaccgacgacatatctaagatctccgaggggattggggacaaggtaggcatgttcttccaggcagtcgcaaccttttttgctgggttcattgttgggttcatccggggttggaagctgaccctggtgattatggccatctctccaatattggggttgtcagctgctgtttgggccaagattttgagtgcttttagcgacaaggagctggccgcttacgccaaggctggggccgtggctgaggaggccttgggagctattcgcaccgtgatcgccttcggaggtcaaaataaggaattggaaaggtaccagaaacacctggagaacgccaaggaaatcggaattaagaaagccatctcagccaatatctccatgggaatcgctttcctgctgatctacgccagttacgcactggccttttggtacggatctactttggttattagtaaggagtacactatcggtaatgctatgacggtgtttttctccattctgattggagccttcagcgtgggtcaggcggctccgtgcatcgacgcatttgccaacgctcggggcgctgcatatgtgatcttcgacatcatcgataacaacccaaaaattgacagtttctcagagaggggccacaagcccgattccattaagggaaatctcgaattcaacgatgtgcactttagttaccccagtagggccaatgtaaaaattctgaagggactcaatctcaaggtgcagtcaggccagacagttgcattggtggggtcctccggatgtggcaagtccaccactgttcagctgattcagcgcctttatgacccagatgagggcacgattaacattgatgggcaagatatacgcaattttaatgtgaattacctgcgggagatcatcggtgtggtgagccaggagcctgtcctgtttagtactacaatcgccgagaacatttgttacgggcgcggaaatgtcaccatggacgaaatcaagaaagccgttaaagaggctaatgcctacgaatttattatgaaattgccccaaaagtttgatacgttggttggtgagaggggagcccaactcagcggcgggcagaagcaacggatcgcgatagccagagccctcgtacgcaaccccaaaattcttctcctggatgaggccacgtctgcccttgacaccgagtcagaggctgaagttcaggccgcactggacaaggcccgggaaggaagaactaccatcgttatcgcccatagactgtctaccgtccgaaacgccgacgtgattgcgggcttcgaggatggcgtaatcgtggaacaagggagccacagtgagctcatgaagaaagagggtgtctattttaaacttgtgaacatgcagacatcaggcagccaaatccaatctgaggagtttgagcttaacgacgaaaaggcagctactcggatggcacctaatggctggaagagtaggctttttcgccattcaactcagaaaaacctgaagaacagccagatgtgccaaaagtccctggatgttgaaaccgatggcctcgaggcgaatgtgcctcccgtgtcattcctcaaggttctcaagctgaataagaccgagtggccttattttgtggtgggaaccgtctgcgctatcgcgaatggcggcctgcagcctgcattttccgtaattttcagcgagatcatcgctatcttcggcccgggagacgacgccgtgaagcagcagaaatgcaacatcttctccttgatctttctgttccttggaattatcagctttttcacatttttcctccaaggcttcacctttggaaaagccggagagattctcacccggaggttgcgatctatggctttcaaggctatgctcagacaggatatgagctggtttgacgatcacaagaactcaaccggcgccctctcaacgcggctggcaaccgatgcagcccaggttcaaggggccaccgggacccggctggccctgattgcacagaatatcgcaaatctggggacggggatcattatctcttttatctacggttggcagctgaccctcctgctgcttgccgtagttcccattatcgccgtcagcgggatcgtagaaatgaagctgctggccggcaacgccaagcgcgacaaaaaggagctggaagccgctggcaagatcgcaaccgaggccattgagaacattagaacagtagtttcactgacacaggagcggaaattcgagagcatgtatgtggaaaaactgtatggaccatatcgcaacagcgttcagaaggcacatatctacggcataactttcagcatcagccaggcttttatgtacttttcttatgccgggtgttttcgattcggcgcttacctgatcgtgaatggtcacatgcgctttagggacgtgatactcgttttctcagccatcgtcttcggggccgttgcgctgggacatgcctcctcttttgcccctgactatgccaaagcgaaattgtctgctgcgcatttgttcatgctgtttgagagacaacctctcattgactcctacagtgaagagggcctgaagcctgataagtttgagggcaatataacattcaatgaagttgtgttcaactatcccacccgggcaaatgtccccgtcttgcagggcctgtccctcgaggtgaaaaaaggccaaactcttgccctggtgggcagctccggttgtggcaagagcactgtggtgcagctgctggagcgcttttacgacccactcgcaggaactgtgttcgtggattttggctttcagctgctcgatggacaggaggccaagaagctcaatgtgcagtggctccgagcacaattggggattgtgagtcaagagcccatactcttcgactgctcaattgccgaaaacatcgcgtacggagacaatagccgggttgtgagccaagacgaaatcgtgagtgccgcaaaagccgcgaatattcacccctttatcgagacccttcctcacaagtacgagacaagagtgggagataaaggcacacaactctccggtggccaaaaacaacgaattgccatcgcccgagctctgatccggcagccccagatcctgctcctcgatgaagccacttcagccctggatactgaatcagagaaggtcgtgcaggaggctctcgacaaggctcgggagggtaggacatgtattgtgattgcgcacaggctgtccacgatacagaatgcagatctgatcgtggtgttccagaatggcagagttaaagaacatggcacccaccagcagcttcttgctcagaagggcatctacttcagcatggtcagtgtacaggccggaacgcagaacctg

SEQ ID NO: 200253 - DNA, 3858 bp, Artificial Sequence
  derived and/or modified sequence
atggatctggaggccgctaaaaacggtacagcttggcgtcccacctccgctgaaggggacttcgagctcggcataagttccaagcagaagaggaagaagacaaagacagtcaagatgatcggagtgctgaccttgttccgctactctgactggcaggataagttgttcatgtccctgggaactattatggccattgcccatggcagcggcctgccattaatgatgattgtgtttggggagatgaccgacaagtttgtggatactgcaggcaatttcagcttccctgtcaatttttccctctctctgctgaatcctggaaaaattctcgaagaagagatgactcggtatgcttattactactctggcctcggggccggcgtgctggtggccgcctatattcaggtctcgttttggacactggctgctgggagacagattcgaaaaatcagacagaagttcttccatgccatcctgcgacaggagatcgggtggttcgatattaatgacaccacggaactcaacacaagactgaccgacgatatctctaagatctctgaaggtatcggcgacaaggtaggtatgttctttcaggctgtcgctacctttttcgctggctttattgtcggattcatcagaggttggaaactcacgctcgtcatcatggctattagccccatcctcgggctgtctgctgccgtgtgggccaagattctcagtgccttcagcgataaggaattagcagcctacgcaaaagcaggggcggtcgccgaagaggcccttggcgctatccggacggtgatcgcttttgggggacagaataaagagctggagagataccagaagcatttggaaaacgccaaagaaataggtattaaaaaggctattagcgcaaacatatcaatgggaattgcctttcttcttatctacgctagttatgctcttgccttttggtacggatccactctggtcatttcaaaggagtacaccattggcaatgcgatgaccgttttcttctcaatcctgatcggtgcctttagcgtgggccaggccgcaccctgcatcgatgccttcgccaacgcgagaggtgccgcctacgtgatattcgacataatcgataacaatccaaagatcgacagcttctctgaaaggggtcacaagccagacagcatcaagggcaatctcgaattcaacgacgtgcactttagctatccaagccgggccaacgtcaagatccttaaggggcttaatctgaaggtccaatccgggcagacagtcgcactggtggggtcaagcggttgtggaaagtcgactaccgtccagctgatccagaggctatacgatcctgacgagggaaccatcaatatcgacggtcaagatatccgcaatttcaacgtcaactacctgcgtgagattatcggagttgtctctcaggagcccgttctgttttcgaccactattgcggagaacatatgttatggaaggggtaatgtgacaatggatgaaatcaaaaaagctgtaaaggaggccaacgcctatgagttcattatgaagctgcctcagaagttcgataccctggttggagaacgcggcgcccagctgtctgggggccagaagcagcgcatcgcaattgcgcgggcccttgtgagaaaccccaagatattattactggatgaggcaaccagtgcactggacaccgagtcagaagctgaggtccaggctgccttggataaagcacgggaaggcaggacaaccatcgtgatcgcccaccgattgagcaccgtacggaacgccgatgtaattgctggctttgaagatggagtgatcgtggagcaagggtcccatagcgaactcatgaagaaggagggcgtctacttcaagctggtgaacatgcaaacctctgggagccagatccagtctgaggaattcgagctgaacgacgagaaagcagcgactaggatggctccaaatgggtggaagagtcgtctgttccgacactcaacgcaaaaaaacctgaagaactcgcagatgtgtcagaagtcgctggatgtcgaaacggacggcttggaggctaacgtgcccccagtgtcgtttcttaaggtccttaaactaaacaaaactgagtggccatatttcgtggttgggactgtgtgcgccatcgcgaatggcgggctgcagcccgcttttagcgtgattttttctgaaataattgccatcttcggacccggcgatgatgctgttaaacagcaaaagtgcaatatttttagcctaatttttttgttcttaggcatcatcagcttttttaccttcttcctgcaagggttcaccttcggtaaagctggggagattcttacgagacgattgcgcagtatggcattcaaggccatgctccgtcaggacatgtcttggttcgacgatcataagaacagcactggcgctcttagtactcggctggctactgatgctgcccaggttcagggcgcaaccggcactcgtctggccttgatcgcccagaacatcgctaacctcggtactggaatcatcatctcttttatttacggatggcagctgaccctgctgcttctggccgtagttcctataattgccgtgtccgggattgtggagatgaagctcctcgctggcaacgcaaagagggacaagaaggagctcgaagccgctggaaagattgctactgaggcaatagagaatattcggactgtggtctctctcacccaggaacgtaagttcgagtccatgtatgtagagaagctgtacggaccttatcggaactctgttcaaaaagcacacatctacggcatcacgttcagtatcagccaggcttttatgtatttctcctacgcaggatgcttccgctttggagcatacctcattgtgaatgggcatatgcgttttagggacgtcatcctggtattttccgcaatcgtgttcggagccgtggcacttggccacgcctcctcttttgcgccggattatgccaaggccaaactgtccgccgcccacctctttatgctttttgagaggcagccgctgatagattcttattccgaggaaggcctgaagccagataagtttgaaggcaatatcactttcaacgaagtggttttcaattaccctacgcgggctaacgtgcccgtgctccagggactctcgctggaagtgaaaaaaggacagaccctagctctggtgggttcaagtgggtgcggaaaatccaccgtcgtccaacttctggagcggttttatgaccctctggccggcactgtctttgttgattttggttttcagcttctggatgggcaagaagccaaaaaacttaacgtgcagtggttaagggcacagttaggaatcgtgagtcaagagcctatactgttcgattgctccatcgctgagaatatcgcctacggcgataactctcgagtggtgtcacaggatgagatagtttctgctgccaaagctgccaatattcacccttttattgagaccctaccacacaagtacgagacgcgagtgggcgacaagggcactcaactctccgggggacagaagcagcgaatagccatcgctcgtgctttaattcgacagccccagatcctcttgctcgacgaggcaacaagtgcacttgatactgaatctgagaaggtggtacaggaagccttggataaagcacgcgaaggccgtacatgtattgtaatagcccaccgccttagtacaattcaaaatgccgacctgatagtggtgtttcagaatgggcgggtcaaagagcatggaacgcaccagcagcttctggcgcaaaaggggatatattttagcatggtctccgtgcaagctggaacgcaaaatctg

SEQ ID NO: 200254 - DNA, 3858 bp, Artificial Sequence
  derived and/or modified sequence
atggatcttgaggcggcaaagaatggaactgcatggcgcccaactagcgcagaaggagatttcgaactgggaatctcgtcaaagcagaaacgcaagaaaaccaaaactgtgaagatgattggtgtgcttactctcttcagatacagcgactggcaggataagttgtttatgtcccttggaactatcatggcaatagcacacgggagcggactcccactcatgatgatcgttttcggcgaaatgactgataagtttgtcgacactgccggcaacttctcgtttccagtcaacttttccttgtcattgctgaatcccggaaagattctcgaagaagaaatgactcgctatgcatactactacagcggccttggggcgggtgtgcttgtggcggcatacattcaagttagcttttggaccctcgcagcgggccggcaaattagaaaaatcagacagaagtttttccatgcaattctgcgacaagaaatcgggtggttcgacataaacgacaccacggaactgaacacccgcttgaccgatgatatctccaagatctcagaaggtattggagacaaggtggggatgttttttcaagcagtcgcaaccttttttgctggattcatagtcggattcataagaggctggaagctgactctcgtcatcatggcgatttcacctattctcgggctgtcagccgcggtgtgggccaaaatcctgtccgcctttagcgataaggagctggcggcttacgcgaaagccggagcagtggcagaagaggcgctgggtgcgattcgaaccgtgatcgcatttggcggccagaataaggaactggagagataccagaagcatcttgaaaatgccaaggaaattggaattaagaaagcaatttcggccaatatctccatgggcatagcgtttcttctgatatacgcatcctacgcacttgcgttttggtacggaagcacccttgtgatttcaaaggaatacacgattggaaacgcgatgactgtgttcttttccattcttattggcgcgttttcggtgggacaagcagcaccctgcattgatgcatttgccaacgcacggggagccgcttacgtgatttttgacattatcgacaacaatcctaagattgatagcttttcagaaagaggtcacaagccagattccattaagggtaatcttgagtttaacgatgtgcattttagctacccaagccgggcaaatgtgaagattctcaagggtcttaacctgaaagtgcaaagcggtcaaaccgtggcgctggtgggttcgtcaggatgtggtaaatcgaccactgtgcaactgatacaaagactctacgaccccgacgaaggtaccatcaatatcgatgggcaggatattcgcaacttcaatgtgaactacctgagagaaatcatcggtgtcgtgagtcaggagcccgtgcttttctcgaccaccatcgcagagaacatttgttacgggcgagggaatgtgactatggatgagatcaaaaaggcagtgaaggaagcaaacgcatacgaattcatcatgaaacttcctcagaaattcgacactctcgtgggagaacgtggtgcgcaactgtccggaggtcaaaagcaaaggatagccattgcgcgggcccttgtcaggaaccctaagatactgcttctggacgaggccactagtgcacttgacaccgaatccgaggccgaggtccaggcagcgttggacaaagctcgggaagggaggaccacgattgtcatcgcccatcgtctctcaaccgtgcgtaatgcagacgtgatagcaggatttgaggatggagttattgtggagcaaggatcccactccgaactcatgaagaaggagggagtctactttaagctggtgaatatgcaaaccagcggtagccaaattcagtccgaagaattcgagctgaacgacgagaaggcagccacccgaatggcgccaaatggatggaagtcgagactctttcggcattccacgcagaaaaacctgaagaatagccaaatgtgtcagaaatccctggatgtcgaaaccgatggactggaagcaaacgtccccccagtgtctttcctgaaagtgctgaaacttaacaaaaccgagtggccttatttcgtggtgggtactgtgtgtgcaatagctaacgggggactccaacctgcattcagcgtcatattcagcgagattatcgcaattttcggtccaggagatgatgcagtgaaacagcagaaatgcaacatcttttccttgatattcctgttccttgggattatctcctttttcaccttttttctgcaaggtttcacttttggtaaagcaggtgaaatccttaccagaaggctgcggtctatggcctttaaagcgatgctgaggcaggacatgagctggtttgatgaccataagaattcaactggcgcactctccacccgcctggcgactgacgccgcgcaggtgcaaggtgcaaccgggactcgcctggctcttatcgctcagaacatcgcaaatctcggaactgggattatcatttccttcatctacggctggcagctgaccctgcttcttcttgccgtggtgcctatcatcgcagtcagcggtattgtggaaatgaagctgctcgcagggaacgcgaagagagataagaaagaactggaggcagccggcaagatagctacggaagcaatagaaaacattcgtacggtcgttagcctcacccaggaacgcaagttcgaatcgatgtacgtggaaaagctctacggaccataccggaatagcgtgcaaaaggctcacatttacggtataaccttttcgatatcacaagcatttatgtacttctcctacgccggttgttttcgcttcggcgcctacttgatcgtcaatggtcatatgcgttttagagatgtcattcttgtgttttccgcgatagtgttcggcgcagtcgctctcggacatgcatcctcgtttgcgccagactacgcgaaggcaaagctgagcgccgcacaccttttcatgctctttgaaaggcaaccactgatcgattcatactcggaggaaggactgaagccagataagtttgagggcaacattacgtttaatgaagtggtgttcaactaccctactagggcaaacgtgcctgtgcttcagggcctctcactcgaagtgaagaagggtcaaactctggcactggtcggatcgagcggctgtggcaagtcaactgtggtgcagcttttggaacgtttttacgatcctctcgcgggaaccgtctttgtcgacttcggattccaactgctggacggccaagaagccaagaagctcaatgtgcaatggcttagagcacaacttggaattgtgtcccaagaacctattttgtttgactgctccatagcagagaatattgcatacggtgataatagcagggtggtcagccaagatgaaattgtgtcggcagcgaaggctgccaatattcaccctttcattgagactctcccgcacaagtacgaaacccgtgtgggggacaagggaacccaactgtcgggaggacaaaaacagcgcattgcaatagctcgtgcactcatccggcaacctcaaattcttctcctcgatgaagccacttccgccctcgatactgagagcgaaaaggtcgtccaagaagcgctcgacaaggcccgagaaggcagaacctgtattgtgatagcgcaccgcctttcgactattcagaatgcagatcttatcgtggtgttccaaaacggaagagtgaaggagcatggcactcatcagcagcttcttgcacaaaagggaatttactttagcatggtcagtgtgcaggccggtactcaaaacctg

SEQ ID NO: 200255 - DNA, 3858 bp, Artificial Sequence
  derived and/or modified sequence
atggacctcgaggcagcgaagaatggaaccgcatggcgaccgacctcagcagagggtgactttgaactcggaattagctcgaagcaaaagaggaagaaaactaagactgtgaagatgatcggtgtgctgactctttttcggtacagcgattggcaagataagctgttcatgtcactggggaccattatggcaatcgcccatggttcaggactgcctctcatgatgatagtgtttggagaaatgaccgataagttcgtggatactgcaggtaacttttcctttccagtgaatttctccctcagccttttgaatcctggcaaaatactggaggaggaaatgactaggtatgcctactactactcaggactgggcgcgggagtgcttgtcgccgcatacattcaggtgtcattttggactctggcagcaggtagacagattcggaagattagacaaaagtttttccacgcgatccttcgccaagaaatcgggtggtttgacattaatgacactactgaacttaacaccaggcttactgatgatattagcaagatcagtgaaggtatcggagataaagtgggtatgttttttcaggcagtggctacgttctttgcgggattcatagtgggatttatccgcggatggaagctgaccctggttatcatggccatttcgcccattctggggctttccgcagcggtgtgggcgaagatcttgtcagcctttagcgacaaggaattggcagcatacgcaaaagcaggggctgtggcagaagaagccctcggagcgattcgcactgtcattgccttcggaggacagaataaggaactggaaaggtatcagaagcatctggaaaacgcaaaagaaattggtattaagaaggctattagcgcaaacatcagcatgggaattgcatttctcctgatatatgcgtcctacgccctggcattttggtacggatccacccttgtcatctcgaaggagtacactatcgggaatgcaatgaccgtgtttttcagcattctgattggagcattttccgtggggcaggccgccccttgtattgatgcgttcgccaatgcaagaggtgcggcctacgtcatttttgatatcatcgataacaatccgaaaatagactcgttttccgaaagaggtcataagccggatagtataaagggaaacctggagtttaacgacgtgcatttctcataccctagcagagcaaacgtgaagatattgaagggtctgaatcttaaggtgcaaagcggccagactgtggcacttgttggctcgtccggatgtggcaagtccaccactgtccaactgatacagcggctgtacgacccggacgaaggaacgattaacattgatgggcaagacattcgcaactttaatgtcaactaccttcgggagataatcggcgtcgtatcgcaagaacccgtgctgtttagcactacgattgccgagaacatttgttacggtagaggtaacgtgacgatggacgagattaagaaagcagtgaaggaagcaaacgcatacgagtttatcatgaaacttcctcagaaatttgacaccttggtgggagaacgcggtgcacaactttcaggtggtcaaaagcaacgcattgctatcgcccgcgctctcgtcagaaatccaaagatacttcttttggatgaagcgaccagcgcactggatactgagtcggaagcagaagtgcaggcagcactggataaggcacgagagggaagaaccaccattgtgattgcacataggctctccactgtccgcaacgcagatgtgattgcaggctttgaggacggggtgattgtggaacaaggcagccattcggaacttatgaagaaagaaggagtgtactttaagttggtcaacatgcagacgtccggctcccagattcaatcggaagaatttgagctgaatgatgaaaaggcagcaaccagaatggctcctaatggttggaagtccagactcttccgccactcaactcaaaagaacctcaagaacagccaaatgtgccaaaagtcacttgacgtggaaactgacggactggaagcaaacgtgcccccagtctccttccttaaggtgctgaagctgaacaagactgaatggccctattttgtcgtcgggactgtctgtgcgattgccaatgggggactgcagccagcattttcagtgatcttttcagagataatagcaatctttggacctggcgacgatgcagtgaagcaacaaaaatgtaacatcttttcgctcatttttctttttctgggaattatctcgtttttcaccttttttcttcagggatttacttttggtaaagccggcgaaattctcacccgtagactgcgatcgatggccttcaaagcaatgctgcgacaggatatgagctggttcgatgatcacaaaaactcgaccggcgcactgtccacgaggctggcaaccgatgcagcacaagtgcagggcgccactggtactaggctggcccttatcgcacaaaacattgccaatctcggtactggaattatcattagcttcatctacggctggcagctgactcttctgctgcttgcagtggtgccgatcattgcagtctcaggaatcgttgagatgaaacttcttgcgggaaatgctaagcgcgacaaaaaagagctggaagcagcaggcaagatcgcaactgaggcaatcgaaaacatccggacggtggtgtcgcttacccaagagcgcaagtttgaatccatgtacgtggagaagctgtatgggccttaccgcaactcggtgcaaaaagcacatatctacgggattaccttttctatatcacaggccttcatgtactttagctacgcaggttgttttcgctttggcgcctacctgattgtgaatggtcatatgcgattcagagatgtgatacttgtgttcagcgcaattgtctttggagcggtggcacttggacatgcatcgtcattcgctcctgactacgcaaaggcaaagctgagcgcagcccatctgttcatgctgtttgaaagacagcctcttatagactcctactcggaggagggtctgaaacctgataagttcgaagggaatatcacctttaacgaggtggtgtttaactaccccaccagggcaaatgtccccgtgcttcaaggactgtcactcgaggtgaagaaaggacaaactctggcgcttgtggggagcagcggctgcggaaagtcaactgtcgtgcagcttctggaacggttttacgaccctcttgccggtactgtctttgtggactttggctttcagctgctcgatggacaagaagcaaaaaagctcaatgtccaatggctgcgtgctcaactgggtatagtctcccaggagccgatcctgtttgattgctcaattgcagaaaacatcgcgtacggcgataactcaagagtcgtgagccaagatgaaatcgtgtcggcagccaaggccgcaaacattcatccctttatagagactcttccacacaagtatgagacgcgggtgggcgataaggggactcagctttcgggaggccaaaagcaacggattgccattgccagagcattgattagacaacctcagatacttctgctcgatgaagcaacttcggcactggacaccgagtccgagaaggtggtgcaagaggcactcgacaaggcaagagaaggcagaacttgtatcgtcatcgcacatagacttagcaccattcaaaacgctgatctgatagtggtgttccagaatggtagagtcaaggagcacggtacccatcagcaactgctggcccagaagggtatatacttttccatggtgtctgtgcaggcgggcacccaaaatctc

SEQ ID NO: 200256 - DNA, 3858 bp, Artificial Sequence
  derived and/or modified sequence
atggatcttgaagctgcaaagaatggcacagcttggagacccacctcggctgaaggtgatttcgaactcggcatttcaagcaaacagaaacgaaaaaaaactaaaacagtcaagatgattggagtgcttacgctttttaggtacagcgactggcaggataagttgtttatgtctctgggcacaattatggcgattgctcacggaagtggcttaccccttatgatgattgtctttggagagatgacggacaaatttgttgacacagctggaaactttagcttcccggttaacttcagcctttcacttcttaatcctggaaaaattttagaggaagagatgacaagatatgcttactattattcaggattgggcgcaggagtcttggtcgccgcctatatccaagttagcttttggacgctcgcggctggtcgccagatcaggaaaatccggcaaaaattttttcatgctatcttgcgtcaggaaattggctggtttgacattaacgatacgacagagttaaacactcgtttgactgatgatatttcaaaaatttcagaaggtattggcgataaggtgggaatgttctttcaagcagttgcaacgttttttgccggattcattgtagggtttatacgcgggtggaagttaaccttggtgattatggcaatctcacccattctgggactgagcgctgcggtgtgggccaaaattctttctgccttctcggataaagaactcgccgcctatgcgaaagcaggcgcagttgcggaagaagctttaggcgcaatccgtacggtaattgcctttggtggtcagaataaggagttggaacgatatcaaaaacatcttgaaaatgctaaagaaattggtatcaagaaagctatctctgcaaatattagcatggggatcgcgttcttattaatttatgcgagttacgctctggcgttttggtacggcagtacacttgtcatctcaaaagagtacacgatcggaaacgctatgactgtatttttctctattcttattggcgcgttctctgtggggcaagctgccccttgcatcgatgcgtttgcgaacgcgagaggagctgcctatgtcatctttgacattatcgacaacaacccgaaaattgacagctttagtgaacggggacataaacctgattcaattaagggaaatttggagtttaatgacgtacattttagctacccttctcgcgctaatgtcaagatactaaaagggttaaacttgaaagtacagagcgggcaaacagttgctcttgtaggctcgtctggatgcggaaaatctaccacggtgcaacttattcagcgtctgtacgatccggatgagggaacaattaatattgatggacaagacattcggaattttaatgtgaactatcttcgcgaaattatcggtgtggtttctcaagaaccagttttattctccacgaccatagcagaaaatatttgttatggacggggcaacgtgacaatggacgaaattaaaaaagcggttaaagaagcgaatgcctacgagtttatcatgaaactgccacagaaattcgacacgctggtaggcgaacgaggtgctcaattatctggaggccagaagcagagaatcgctatcgccagagcgttagttaggaaccctaagatcttactgcttgatgaagcgacaagcgcgttagatacagaaagtgaagcggaggttcaagcggctctggataaggcgcgggaaggaagaacgaccatcgtaatagcacatagattgtctactgtcagaaacgctgatgttattgcgggattcgaagacggggtcattgtcgaacaaggaagccattctgaattgatgaagaaagaaggagtctattttaagctagtgaacatgcagacttcaggctcccagatacagtctgaggaatttgaacttaacgacgaaaaagccgcgacgagaatggcaccaaacggttggaaatctagattgtttcgccacagcacccagaaaaatttaaaaaattctcagatgtgtcagaaatcgttagatgtcgaaaccgatggcctcgaagcgaacgtcccaccggtttcattcttaaaagttctgaagttaaacaaaactgagtggccatattttgttgtaggaaccgtttgcgcgattgctaatggtgggttacaaccggctttcagcgtgattttctcggaaataattgccatcttcggaccgggtgatgacgccgtaaaacaacagaaatgcaacattttttcacttatttttttatttttaggcattattagctttttcacattttttcttcagggatttacatttggcaaggcgggagagatcttaactcgtagactcagatcaatggcattcaaagctatgttacgccaggacatgagttggtttgatgatcataaaaattcaacaggtgcgttgagcacacggttagccacagacgcggcgcaagttcaaggagccacaggcacgcgcctagcactcatcgcacaaaatattgcaaatctggggacgggaattatcatcagttttatttacgggtggcaattgacgctcctgttgcttgcagttgtcccgattatcgctgtgtcaggcattgtggagatgaaattacttgctgggaatgccaaaagagataagaaggaattagaagcggctggaaaaattgcgacggaagcaattgagaatattagaacagttgtgagccttacgcaggagagaaaattcgagtctatgtatgttgagaaattatatggaccgtatcggaattctgttcagaaagctcatatctacgggatcacattcagcatttcgcaagcctttatgtatttttcttatgcgggctgtttccggtttggtgcatacctgattgtcaatggccatatgcgtttcagggacgttatccttgtcttttcagcaattgtcttcggggctgtagctctgggccacgctagctcttttgctccggattatgcgaaggcaaaactctcagctgcacatcttttcatgctcttcgaaagacaaccacttattgactcatatagtgaagagggcctcaaaccggataaattcgaaggaaacataacgtttaatgaagtcgtgtttaattatcctacgagagctaatgtaccggtcctgcagggactatccctcgaggtgaaaaaagggcaaactctggcgcttgttgggtctagcgggtgcggtaaatcaacagttgtgcagcttttggaacgtttttatgacccacttgcaggcacagtctttgttgactttggttttcaacttctggatggacaagaagctaaaaaactgaatgttcaatggcttagagcgcaacttgggattgtttcacaagaaccgatattgtttgattgtagtattgcagaaaacatcgcttacggcgataattctcgggttgtcagccaggacgaaatcgtgtctgcagcgaaggctgctaatatacacccgttcatagaaacactgccgcataagtatgagacaagagtaggagacaaaggaacgcaactctctgggggccaaaagcaaagaattgcaatagcaagagccctgatccgccaaccgcagatccttctcttggatgaagcgacctccgcgctcgataccgaatccgaaaaagtggtccaagaagcgctggataaggcacgggagggacgcacgtgcattgtgatagctcaccgtttatcaacgattcagaatgcggatttaatcgtggtatttcagaacggtagggttaaagaacacggcacacatcagcaacttttggcacaaaaaggaatctacttttcgatggtcagtgttcaggcgggaactcaaaacctt

SEQ ID NO: 200257 - DNA, 3858 bp, Artificial Sequence
  derived and/or modified sequence
atggacctcgaggccgcgaagaacggaaccgcctggcggcccacttctgccgagggagatttcgagcttggtatttcctcaaagcagaaaagaaagaaaaccaaaaccgtaaagatgattggagtcctgaccctgttccgatactccgattggcaggacaagttgtttatgagcctcggaactatcatggccatcgcccacggctcaggactacctcttatgatgatagtgtttggggaaatgactgacaaattcgttgatacagcgggtaatttcagttttcccgttaattttagtctttcactgcttaacccaggaaaaatacttgaggaggagatgacaaggtacgcttattattactcaggactcggagcaggtgttctcgtggctgcatatatccaggtctctttttggactctggctgcagggcgccagatacgcaaaatcagacagaaattctttcacgcaattctgcgccaggagatcggttggttcgatatcaacgataccactgagttgaatacccgtctcaccgatgacattagcaagatctccgaaggcattggagacaaagtcgggatgtttttccaagccgtcgccaccttctttgccgggttcatcgtgggcttcatccggggctggaaactgaccttagtgatcatggctatctccccaattttgggccttagcgcggctgtctgggctaagatactgtcagctttttctgacaaggaactcgcagcatatgccaaggcaggagctgtcgctgaggaggccttgggggcaatcaggactgtgattgcatttggtggccagaacaaggagttggagcgctatcaaaagcaccttgaaaatgcaaaggaaatcgggattaagaaggccataagcgctaacatcagtatgggcattgccttcctgctgatttacgcttcctatgctctggccttctggtacggctctactctggttatcagcaaggaatacactataggtaatgccatgacggtattcttcagcatcctgatcggagctttttcagtcggtcaggctgcaccctgtatagacgcctttgcgaatgcccgaggcgccgcctatgttattttcgatataatcgacaacaaccctaagatcgactctttttcagagcggggccacaagccggactccattaagggcaatcttgaatttaacgacgtgcattttagttacccatcacgcgcgaatgtaaagatcctgaagggtctgaatctgaaggtccagtcaggccagacagtcgccctcgtaggcagcagcggatgtggtaaatccaccaccgttcaattaattcagagactatatgaccccgatgagggtactattaacatcgatgggcaggacatcaggaactttaacgtgaattacctaagggaaattatcggagtggtttcacaggagccggttctgttttcgaccacaatcgccgaaaacatctgttacggcagaggcaatgtcaccatggacgaaataaagaaagctgtgaaggaggcaaatgcatacgagtttatcatgaaactccctcaaaagtttgacaccttagtcggcgaaaggggggcccagttaagcggtggccaaaaacagcggattgcaattgccagggccctggtgcgaaaccccaaaatcctccttttggatgaagccacgtcagccttggacacagaatccgaagcagaggtccaggccgccctggacaaagctcgggaaggccgaaccactattgtgatcgcacatcggctcagcaccgttaggaacgctgatgtgattgcgggatttgaggatggcgtgattgttgaacaggggtcacactctgaacttatgaaaaaagaaggcgtctatttcaagttggtcaacatgcaaaccagcggaagccagatccaaagcgaggagttcgagctcaatgacgaaaaagccgcgacgaggatggcccctaatgggtggaagtcacgcctctttcggcatagcacacagaagaacttgaaaaactctcaaatgtgtcagaagtccctggacgttgagactgacgggttggaagccaacgtgcccccggtttctttcctaaaggttctaaaactaaataaaactgagtggccgtattttgttgttggaactgtctgtgccattgccaacggcggcctccagccggctttctccgtgatattctccgaaattatcgcaatttttggcccgggcgatgacgccgttaaacagcagaagtgcaatatcttctcactcattttcctcttcttgggtattattagcttttttactttctttctccagggctttacttttgggaaagcaggcgagattctaacgagaaggttaagatccatggcctttaaggccatgctccgccaggacatgagctggtttgacgatcacaagaattcaaccggcgccctgtcaacccggttggcgactgacgcggcccaggtgcagggagcaacaggaactaggctagcattgatcgcacagaacatcgccaatcttgggactggcataataattagcttcatctatggctggcagctcactttgcttttgctggctgtggtgcctatcatcgctgtgtcgggtatcgtcgagatgaagctgctcgcgggcaacgccaaacgcgacaagaaagagctggaagccgccgggaagattgctaccgaagccattgagaatattaggactgtggtaagcctgactcaagagagaaaattcgagtctatgtacgtggagaagttgtatggtccatatcgaaactccgtacagaaggcgcacatatacggaatcactttcagtatctcccaggccttcatgtacttctcctatgcggggtgcttccgctttggcgcgtacctgattgtgaacggacatatgagattcagagacgttatcttggttttctcggctatcgtgttcggcgccgtggcattagggcatgcttcttccttcgcacccgactacgctaaagcaaagctcagtgccgcacacctgttcatgctgtttgaaagacaacccttaattgactcttattccgaagaaggattgaagccagataagtttgaggggaatataactttcaatgaggtagtctttaactacccgactagggccaacgttccagtcctccaggggctctcactcgaagtgaaaaaagggcaaactctggcactagtggggtcttccggatgtggcaagagcactgtagtgcagctcctggaacgtttctatgacccattggccggcacagtttttgtggattttggtttccaactgctggatggtcaggaagcaaagaagctgaatgtccagtggttgcgcgcacaactgggaattgtctcccaagaacctattctgtttgattgtagtatagctgaaaatattgcatacggcgacaactcacgagtagtgagccaagatgagattgttagcgctgctaaggctgccaatattcatccctttatcgaaactctacctcataagtacgagacccgggtgggagataagggtacgcagctgtcagggggacagaaacagagaattgcaattgcccgggcactcatccgacagccacagattttgctattggacgaagctacctccgctctggacacagagtctgagaaagtggtgcaggaggcactggacaaggcccgagagggccgcacttgcatcgttatcgcccatcggttatctaccatccagaacgctgatcttattgtggtttttcagaacggacgagtcaaagaacacgggacccaccagcagctgttggcacagaagggaatctatttttccatggttagtgtgcaagccgggacccagaacctg

SEQ ID NO: 200258 - DNA, 3858 bp, Artificial Sequence
  derived and/or modified sequence
atggatttggaggctgccaaaaatggtacagcctggagacccactagcgcagagggagatttcgagctgggcattagtagcaagcagaaaagaaagaagactaagactgtcaaaatgatcggtgtcttaacactcttccggtactccgattggcaagacaagttatttatgtcactggggacaataatggctatcgcacacggctcaggactccctcttatgatgatcgtgttcggggagatgacagacaagttcgttgatactgctgggaacttcagcttccccgtgaacttctccctgtcacttctgaatccagggaaaatcctcgaagaagagatgacgagatacgcctattattattccggcttgggggccggtgtgcttgtggccgcatacatacaagtatctttttggactctggcggcgggccgtcagattcggaaaatcaggcagaaattcttccacgctatacttcgtcaggagatcggctggtttgatattaatgacactactgagcttaacacccggctgacagacgatatttcgaaaatttcagagggcatcggcgacaaagtgggcatgttctttcaggctgtggctacctttttcgccggctttatcgtcggctttatacgcggctggaaattaacgcttgtaatcatggcgatttccccgatcctaggactgtccgccgctgtgtgggccaaaatcctgagcgctttttctgacaaggagttagcggcgtacgctaaggcaggagccgtggccgaggaggcactgggggctattcgaacggtcatcgccttcggcggccagaataaggagctcgaacgctaccagaagcacctagaaaacgccaaggagatcgggattaaaaaagctataagcgctaacatcagcatggggatcgcttttctcctgatctacgcttcttacgcgttagctttttggtacggttccactcttgttatctcaaaggagtacacgatcggcaatgcaatgacagtgtttttttcaatcctcatcggcgcattctccgtcggtcaggctgccccttgtatcgacgcctttgctaatgcccgaggcgctgcttatgttatctttgacatcattgacaacaatcccaaaatagactcatttagcgagcggggccacaagccagactcaattaaaggaaatcttgagttcaacgacgtgcatttttcttacccttccagagctaacgtgaagatcctgaaaggattaaatctcaaggttcagtctgggcaaaccgtggccttggttggctctagtgggtgcggcaagtctaccaccgtccagctcattcagaggctgtacgaccccgacgaaggcaccatcaatattgacgggcaggatattagaaattttaatgtaaattacctgagagaaataatcggggtggtgtctcaagaaccggtgcttttctcaacaacaattgccgagaatatttgctatggtaggggtaatgtcactatggacgaaatcaagaaggcagtcaaagaagcaaatgcctatgaattcatcatgaaactgccccagaaatttgataccctcgttggcgaacggggagcgcagctcagcggagggcaaaaacagaggatagccattgcaagggccttggttcgcaatccaaagatcctactcctagatgaggctacttccgctctcgacactgagtctgaagccgaagtccaagccgccctcgacaaagctagggagggtcgtactacgatcgtgatcgcacaccggttgtcaactgtgcgcaatgccgatgttattgctgggtttgaggacggagtcattgtggagcagggttcccactccgaacttatgaaaaaggagggtgtttactttaaactggtgaatatgcagacatctggcagccagatacagtctgaggagttcgaactgaacgatgaaaaagccgccacacggatggcaccgaatggttggaagtcacgtctctttaggcatagcacccagaagaatcttaaaaatagccaaatgtgtcagaagtctctggatgttgagacggacgggctggaagccaacgtgcccccggtgagttttcttaaagttctcaaacttaacaagaccgagtggccatattttgtagtcggaaccgtgtgcgctatcgcaaatggggggctgcaaccagccttctcggttatattcagtgagatcatcgcaatttttggcccaggtgacgacgctgtaaagcagcagaaatgtaacattttctctctgatctttttgtttttaggcatcatctcatttttcacattttttctgcagggctttacttttggcaaagccggagaaatcttgaccagaagattaaggtctatggcctttaaggctatgttacgacaggatatgtcttggtttgatgatcataagaactcgaccggtgccttgagtacccggctggcgactgacgctgcccaggtgcaaggagcaacgggcacacgactggctcttattgctcagaatatcgccaatctcggtactggcatcatcattagttttatctacggttggcagcttaccctactcctgctcgccgtggtacccattattgccgtgtctggtatagtcgaaatgaagctcctggccgggaacgcaaaaagagataagaaggagctcgaggcagcgggcaaaatcgcaacagaagcaattgaaaacattcggactgtggtgagcctaacccaggagcgtaagttcgaatcaatgtacgtggaaaagctgtacggcccctacaggaactccgtccagaaagcacacatctatggtatcacattttccatttcgcaggcttttatgtactttagctacgccggatgctttcgcttcggtgcttatctgattgtaaatggccacatgcgctttcgggatgtgatcctggtgttctctgctatagtgtttggggccgtggctctgggtcacgcctcttcttttgcgccagactacgccaaggccaagctgtcagcggcccacctcttcatgctctttgaacggcagccactcattgatagttacagcgaagaaggactaaaacccgataagttcgaagggaacataaccttcaatgaagtcgtgtttaactaccccacccgtgccaacgttcctgtgctgcagggtctcagtctagaggtgaaaaaaggccagacactggctcttgttggatccagcggatgtggaaaatccactgttgtccagctgttagaacgcttttacgatcccctcgccggcacggtgttcgttgattttggcttccaattgctggatggacaggaagcgaagaaactgaatgtccaatggctaagagctcagctgggaattgtaagtcaggagccaattctgttcgattgctctatcgctgagaacatcgcctatggcgataactcacgggttgttagtcaggatgagatcgtaagtgcagctaaggccgctaatatccaccccttcatcgagacccttccgcacaagtacgaaacacgcgtcggggacaaaggcactcagctgtccggagggcagaagcaaagaattgcgatcgcccgcgctctgattcgtcagcctcagattctgctcctggacgaagctacttccgcgctagatacagaatccgagaaagtggtgcaggaagcccttgataaggcgagagagggcagaacttgcatagtgattgcccatcggctctcaaccattcaaaatgccgatcttatcgttgttttccagaacggtcgggtcaaggaacacggcactcaccaacagctgctcgctcaaaagggaatttacttttctatggttagcgtgcaggccgggactcagaatctc

SEQ ID NO: 200259 - DNA, 3858 bp, Artificial Sequence
  derived and/or modified sequence
atggacctggaagctgctaaaaacggaacagcatggcggccaacttcagccgaaggagactttgaactaggcatttcatcgaaacaaaaacgtaagaagactaagacagtcaaaatgattggagtactaacacttttccgctatagtgactggcaagacaaattgtttatgagtttgggaaccattatggccatagctcatgggtcaggactcccattaatgatgatagtttttggggaaatgactgataagttcgtcgatactgcgggaaatttctcatttcccgttaatttttccctttcactcctgaatcctggaaagatactcgaagaagaaatgacgagatatgcctattattacagcggactcggagctggagtcttagtggcagcatatattcaagtttcattttggacactcgcggcgggaagacaaattcgtaagattcgtcagaagttttttcacgcgatactccgacaggaaatcggatggtttgacataaacgatactacagagttgaacacgagattgacggatgatattagcaaaatttcagaaggcattggggataaggtaggcatgttttttcaggcagtcgctacgttcttcgctgggtttatagttggatttattagaggttggaagttaacgttggtcatcatggctatctcgcctatcttaggattgagtgcagctgtgtgggctaagatccttagcgcattctctgacaaggaacttgcggcatatgcaaaagcaggggctgttgctgaagaggcccttggagctatccggacagtgattgcattcggaggacaaaataaagagctggaaagataccaaaagcatctcgaaaatgcgaaagaaattggaatcaagaaagctatctctgctaacatttctatgggcattgctttcttgctcatttatgcttcctatgcgcttgcattctggtatggatccacgcttgttatttctaaagaatatacgattggaaacgcaatgaccgtcttcttcagtatccttattggagcgttttcggtaggtcaggcggccccatgcatagatgctttcgctaacgcacgtggagcagcatatgttatatttgatataattgataacaatccaaagattgactcattttcagaaagaggacataaaccagattcaatcaagggaaatttggagtttaatgatgtgcatttctcgtatccatcaagagctaatgtaaaaatcctgaagggattgaatctgaaagtgcaatcgggtcaaacggtggctttagttggttcttccggttgcggtaaatcgactaccgtacaattgatccaacgtctgtacgatcccgacgaaggtaccatcaatattgacggacaagacatcagaaacttcaacgtcaactatcttcgtgaaattataggagttgtgtctcaggaaccagtgctgttctccactacaatcgctgaaaatatttgctatggaaggggcaacgttacaatggatgagatcaaaaaagccgttaaggaagccaatgcttatgaattcatcatgaaactccctcaaaagttcgatacgttggtgggtgaaagaggagctcaactttctggaggacaaaaacaaagaattgctattgcaagagctctcgtgaggaacccgaaaatcctgctgcttgatgaagcaacttcagctttagacactgaatccgaggcagaggtccaagcagcattggataaggctagagaaggacggactaccatagtcatcgcacaccgactcagtaccgttcgtaatgcagacgttatcgcgggttttgaggacggtgttattgtcgaacaaggatcccattcagaattgatgaaaaaagagggcgtgtacttcaagctcgtaaatatgcaaacgtctggatcgcaaattcaatctgaagaattcgagctcaatgatgagaaggcagcgacgcgaatggcaccaaacggatggaaatcacgtctgttccgacactctactcaaaagaatctcaaaaactcacaaatgtgtcaaaagtcattagatgtggaaactgacggtttggaagcaaacgttccacctgttagtttcttgaaagttttaaaattaaataagactgaatggccgtactttgttgtcgggacagtgtgtgcgattgctaacggaggactacaaccagcattttcagttattttcagcgagattattgctattttcggacctggagatgatgctgttaaacagcaaaagtgtaacatcttctcactgattttcctttttttgggaattatctcgtttttcactttcttcctccaaggattcactttcggaaaagctggcgaaatactgactcgacgattacgttcgatggcgttcaaagctatgcttcgacaggatatgtcttggtttgatgaccacaagaacagtacaggtgctctgtcaaccagactagcaacagacgcggcacaggtccaaggcgccacaggaacacgattggccttgatcgcccaaaacatcgcaaacttgggaactggaattattataagttttatttacggatggcaacttacacttcttctcttagctgtggtccccataattgcggtctcgggtatcgtggaaatgaaactgttggccggaaacgccaaaagggataagaaagaactggaagctgctggaaagattgcaactgaagcaattgagaacattagaacggtcgttagcctcacccaagaacggaaattcgaatctatgtatgtagaaaagctctatggtccgtaccggaactcagttcagaaggcacacatttatggaataacgttttctattagtcaggcctttatgtacttctcttacgcagggtgtttcagatttggagcctaccttattgttaatggtcatatgcggtttagagatgtcatcttggtgttttccgcaatagtgtttggagcagttgcgctaggacatgcatcgtcctttgcaccagattatgctaaagctaagctctcagctgctcatctgtttatgttgttcgaacgacagccattgatagatagttactcagaagaagggctcaagccggacaaattcgaaggaaatattacttttaatgaggttgtattcaattacccgacgcgcgcaaacgtcccagttctccaaggattgtcgttagaagttaagaagggtcaaacattggctctcgtcggttcaagcggatgtggaaagtcaaccgttgttcagctgttggagcgtttttatgatccgctcgcaggaacggtcttcgttgactttggatttcagcttctggatggacaagaagctaaaaagcttaacgttcaatggttgagagcccaactcggaatcgtctcccaggaaccaattcttttcgactgctcgattgctgaaaatattgcctacggagacaattcgcgcgtcgttagtcaggacgaaatagtctcggcggcgaaagctgccaatatccatccctttatcgaaactcttccacacaaatacgaaacgcgggtaggcgataagggcactcagcttagtggaggacaaaaacaaagaattgccattgctcgagctctaattcgtcaacctcagatactcttgcttgatgaggctacttcagctttagacacagaatccgagaaggtagttcaagaagctttggacaaagcaagagaaggtagaacttgcatcgttatcgcccatcgactctctacaattcaaaacgcagatttgattgtagttttccaaaacggaagagttaaagagcatggcactcaccaacagcttcttgctcagaaaggaatatacttttcaatggtttcggttcaagctggaacccaaaacctg

SEQ ID NO: 200260 - DNA, 3858 bp, Artificial Sequence
  derived and/or modified sequence
atggaccttgaggccgctaaaaacggcacggcatggaggccaacgtcagcagaaggtgactttgaacttggcatctcctcaaagcagaaaagaaagaagaccaagacagttaagatgatcggcgtccttacattgttcaggtattccgactggcaggacaaactttttatgtcactggggactatcatggccattgctcacggttctggtttgcctttgatgatgatagtgtttggagagatgacggataagttcgtggacaccgctgggaacttcagctttccagtcaacttctcactctccttgcttaacccgggtaagatcctagaggaggaaatgacacgctatgcttattattattccggacttggcgctggcgttcttgtggcggcatatatccaggtctcgttctggactcttgctgctggccgccaaattcgcaagatccgacaaaagttctttcacgctattctacgccaggaaataggctggtttgacatcaacgatacaactgagttgaacactaggcttactgacgacatctccaagatctcagaaggaatcggtgacaaggttggcatgttcttccaggcggttgccactttctttgcaggcttcatcgtcggattcatccgtggatggaaattgactctagtgattatggccatcagtccaatccttgggttatcggcggccgtctgggcaaaaattctgtctgccttctcggacaaggaattagctgcatacgcgaaggcgggtgcagtggccgaagaagctcttggggcaatccgtacggtgattgcatttggtggccagaataaagagcttgaacggtaccagaaacaccttgaaaatgcaaaggagatcggaatcaagaaggccatctccgctaacatctcaatgggcattgctttcctcctcatctatgcaagttacgcgttagctttctggtacggatctacactagttatcagcaaggaatacacgatcggtaacgctatgaccgtcttcttctctatcttgatcggagcgttttccgtcgggcaggcggccccttgcatcgatgccttcgcgaatgcgcgaggcgctgcgtatgttattttcgatatcatcgacaacaatcctaagatcgactctttttccgagcgtggccacaagcctgatagtattaagggtaatttggaattcaatgacgtccatttctcatacccctctcgggctaatgttaagatcctcaagggattaaatttgaaagtccagagcggacagaccgtggctctcgtcggctcctctggttgcggtaagagcacgacagtgcagcttattcagcgattgtacgaccccgatgagggaacgatcaacatcgacgggcaggatataaggaatttcaatgtcaactacctccgagagatcatcggggtcgtttctcaagaaccagtcttgtttagtaccacgatcgcggagaatatttgttatggacgtggcaatgtgacgatggatgagataaagaaggcggtcaaggaagctaatgcatatgaattcattatgaagctcccacaaaagtttgatacattggtcggcgagcgcggggctcaattgagtgggggacagaagcaacgtattgcaatagcaagggcgctggttcgtaaccccaagattttgcttctggatgaggcgacgtccgccctagacactgagtctgaggctgaggtgcaagctgccctggacaaagcacgggaaggtcggacgacgatcgtaatagcgcaccggttaagtaccgtaaggaatgccgatgttattgcaggatttgaagacggtgtcatagtcgaacaaggctcgcacagtgagctcatgaagaaagaaggtgtctatttcaaattggtaaacatgcagacgtcaggaagtcagatacaatcagaagagtttgagttaaacgacgagaaagctgcgacgcgtatggctccaaatggatggaaaagtcgtctgtttcgacattccacccagaaaaacctaaagaactcgcaaatgtgtcagaaatcacttgacgtggagacagatggcttagaggccaacgtaccgccggtctcgtttcttaaagtgctcaaactaaacaaaaccgaatggccatacttcgtcgtagggaccgtctgcgctattgctaacggtgggttgcagccagcattttcggttatattttcggagataattgcgatttttggtccgggtgatgatgccgtgaagcagcaaaagtgtaacatcttctcccttatttttctcttcctcggcataataagctttttcacattcttccttcaaggttttacattcgggaaagccggcgagattttgacccgacgcctgcgctcaatggcctttaaggcaatgctccgccaggatatgtcttggttcgacgaccataagaacagcacgggtgcattgagcacaagactggcgactgacgccgcgcaggttcagggagcaactggaacacgtctcgctctcatcgcgcagaatatcgcaaatctcggaaccgggatcataatttccttcatttacggttggcaactgaccttgctcttgctcgccgttgttcctattattgctgtctcaggaatagtcgaaatgaaactgttggccggtaatgctaaacgtgataagaaggagttggaggcagctgggaagatcgcgaccgaagccatagaaaatatccggacggttgtgtccttgacgcaagagcgcaagttcgagtcgatgtatgtagaaaagttatatggaccgtatcgaaactctgtccagaaggcacatatttatggtatcaccttcagtatatcacaggcgttcatgtatttctcttatgctggttgctttcgattcggagcttacttaatagtcaacggccatatgcgatttcgcgacgttatcctcgtgttctcggctattgtctttggtgcagtcgcgctcggccatgcttcgtccttcgcgccagactatgccaaggccaagctttcggccgctcacttatttatgctgtttgagcgtcagccgctgattgactcatactccgaagaagggctcaaacccgataagtttgagggtaatattacatttaacgaggttgtcttcaactacccaaccagggccaatgtcccggtgttgcaagggttgtcgcttgaggttaagaagggccaaaccctggccctcgtgggtagtagcggatgtggaaagtcaactgtagtacaactactggaaaggttttatgacccactggccggtactgtctttgtcgactttggtttccaactgctggacggacaggaggctaagaagcttaatgtacaatggttgcgagctcagcttggaatcgtttcgcaggagccgattctcttcgattgctccattgctgaaaatattgcgtacggagataacagccgcgtggtctcgcaggacgagatcgtgtcggcagcgaaggctgctaatatccatccatttatcgaaaccttaccccacaaatatgagactagggtcggggataaaggtacacagttgtccggcggtcagaaacaacgcatcgcgattgcccgtgcgttaatcagacaaccccagatcctgctgctcgatgaggcaaccagcgctcttgacactgaatcggagaaggtcgttcaagaagcgttggacaaagcacgtgaggggcgtacctgcattgtcattgcacatagactctcaacgatccagaacgctgatctgatcgttgtctttcagaatggacgcgtcaaggaacatggcacgcatcagcaattactagcacagaagggaatttacttctcaatggtctctgtgcaggcgggcacacagaacctt

SEQ ID NO: 200261 - DNA, 3858 bp, Artificial Sequence
  derived and/or modified sequence
atggacctggaagcagctaagaacggtaccgcctggcggccgacctccgccgaaggtgacttcgaactgggtattagctcaaagcagaagcgtaagaaaaccaaaaccgtgaagatgattggggtcctgactctgttccgctactcggactggcaggacaagctcttcatgtcactcgggactattatggccatcgcacatgggagcggcctgccgctcatgatgatcgttttcggtgagatgaccgacaagttcgtggatactgcaggcaactttagttttcctgtgaacttttctctgtcgctgctgaaccccggaaagatacttgaagaagaaatgacccggtatgcctactactacagcggactcggagcgggtgtgctggttgctgcctacattcaggtatcattctggaccctggccgccggccggcagattcgtaaaatccggcaaaagttcttccatgccatccttagacaagagatcggatggttcgatatcaatgatactactgagctcaacacccggctgactgacgatatctcgaagatctcagaagggatcggcgataaagtgggaatgttttttcaggcggtggccacttttttcgctggattcatcgtggggttcattaggggatggaaactgacgctggttatcatggcgatctccccaattctgggcctctcagccgcagtttgggccaagatcctctcagccttcagcgataaagaactcgccgcctacgccaaggcgggcgccgtcgcggaggaagcgttgggagccatccggacggtgatcgcttttggaggccaaaacaaagaacttgagcgctaccagaagcacctcgagaacgccaaagaaatcggtatcaagaaggcgatctcagcaaatatctcaatggggatcgcgttcctgttgatctacgcatcctacgccctggctttttggtatggatctaccctggtgatcagcaaggagtacactatcggaaatgccatgactgttttcttcagcatcctgattggagccttctcggtggggcaggcggcaccgtgtatcgacgcgttcgcgaatgccagaggagctgcgtacgtgatcttcgatatcatcgacaataatcctaagattgactcgttctcagaacgggggcataagcctgatagcattaagggcaatctcgagtttaacgacgtccatttctcctacccgtcccgagctaatgtcaaaatcctcaagggcttgaatctcaaggtgcagtccggacaaacggttgccctggtaggttcaagcgggtgtggaaagtcgaccacggtccagctcatccaacgcctctatgacccagatgagggaaccattaacatcgacggacaggatatcaggaactttaacgtgaactacctcagggagatcatcggcgtggtgtcacaagaaccggtgctgttctcgactacgatcgctgagaacatctgctacggtcgcggcaacgtgaccatggatgaaatcaaaaaggccgtgaaggaggcgaacgcatacgaattcatcatgaagctgccacagaagttcgacactctggtgggcgagcggggagcccagttgtcgggaggacagaagcaaaggatcgcaattgcccgcgctcttgtccgcaatcccaaaatcctgctcctggacgaggccaccagcgcgctcgacaccgaatctgaggcagaagtacaagctgccctggataaggcgcgcgaaggccgcaccacgatcgtcatcgcacaccgcctgtcaaccgtccgtaacgcggacgtcatcgcaggcttcgaggatggagtgatcgtggaacaaggctcgcatagcgagcttatgaaaaaggagggcgtgtacttcaaactggtgaacatgcagacttccggctctcagatccagtcggaagaatttgaactgaatgatgaaaaggcagcgacccgcatggcaccgaatggatggaagagccgccttttcagacacagtacccagaaaaacttgaagaattcgcagatgtgccaaaagtcgctcgacgtcgaaactgacggtctggaagcaaacgtcccgcctgtctcgttcctcaaagtgctgaagctcaataagactgagtggccttacttcgtggtcggtactgtgtgcgcaatcgctaatgggggcctgcagccggcattctcagtcatcttctccgagattatcgctatcttcggaccgggcgatgacgcagttaaacaacagaagtgcaacatcttctccctgatcttcctttttctgggcattatctcgttctttactttcttcctccaaggattcactttcggtaaagccggagagatcttgacgcggcgcctgcggtccatggccttcaaagcgatgttgcgacaagatatgtcctggttcgacgatcacaagaactccaccggagcactctcgacgcgcctcgccaccgatgccgcgcaagtgcaaggcgctactggcacgcggctcgccctcatcgcccagaatatagccaacctgggcaccggaattatcatctcgttcatctacggatggcagctcactctgttgctcctcgccgtggtgccgattatcgcagtgtccggaatcgtagagatgaagctgctggccggcaatgcaaagcgggacaagaaagagcttgaggccgccggcaagatcgcgaccgaagcaatcgagaatattcgcaccgtggtttcgctcacccaggaacgcaaatttgagtcaatgtacgtcgaaaaactgtacggaccgtacaggaactcggtccaaaaggctcacatctacggaatcactttctcgatttcccaggcgtttatgtacttttcatacgccgggtgcttccggtttggcgcttatttgatcgtgaacggacatatgcggttccgcgatgtgatcctggtgttcagcgccatcgtgtttggagccgtggcccttggccacgccagctcgttcgcaccggattacgcgaaggctaagttgtccgctgcgcacctcttcatgctttttgagagacaaccattgatagactcgtactcagaggaaggactgaagccagacaaattcgaaggaaacattactttcaacgaggtcgtgttcaattaccctacccgcgctaacgtcccagtgctccagggcctgtccttggaagtgaagaaaggtcaaactctggcactggtcggaagcagcggctgtggaaagagcaccgtggttcagctgctggaacgcttttacgacccgttggccggtacggtctttgtggacttcggatttcagcttctggacggacaagaagccaagaagctgaacgtgcagtggctgcgggcgcagctgggtatcgtcagccaggaaccaatcctgttcgattgctcaatcgcggagaatatcgcgtacggcgataactcgcgggtggtgtcccaggacgaaattgtttccgctgcgaaggccgccaacatccacccctttattgaaactctcccacataagtacgagactagagtcggagacaagggcacccagctcagcggaggacaaaagcagcggatagccattgcacgtgctctgatccgccagccccaaatcctgttgcttgacgaggccacttcggccctcgacactgagtcagaaaaagtggtgcaagaagcgcttgacaaggcacgcgaaggaagaacctgcatcgtgattgctcaccgactctccactatccaaaacgccgacttgattgtcgtgtttcagaacggccgggtcaaagaacacggaacccaccaacagttgttggcgcagaagggtatctacttctcgatggtcagcgtgcaagctgggacccagaatctg

SEQ ID NO: 200262 - DNA, 3858 bp, Artificial Sequence
  derived and/or modified sequence
atggatctcgaagccgcaaagaacggaaccgcatggcgacccaccagcgcagaaggagattttgaactgggaatctcgagtaagcaaaagcggaaaaagactaagaccgttaagatgatcggggtgcttactttgtttcggtactccgattggcaagataagctgttcatgtcgctgggtactataatggctattgcacacggcagcgggctccctcttatgatgatcgtgtttggagaaatgactgacaaatttgtggatactgcggggaatttctcattccccgtgaacttttcacttagccttctgaatcctgggaagattctcgaagaagaaatgacccgttatgcatactactattcgggactgggggcaggagtgctggttgccgcttacatacaagtgtccttttggactttggccgcgggacggcaaattcggaagattaggcagaaattctttcatgccattttgcggcaggaaatcggttggtttgacattaatgataccactgaactgaacacccggcttaccgacgatatctcgaagatttcagaaggaatcggagataaggtgggaatgttttttcaagcagtggccacgttctttgcaggtttcatcgtgggattcattcgaggctggaagctcactcttgtcattatggcgatttccccgattctgggccttagcgcagcagtgtgggcaaagatactgtccgcattctccgataaggaactggcagcatatgccaaggcaggggctgtggccgaggaagcgctgggagcgataaggaccgtcattgcatttggaggacagaataaggaacttgagagataccaaaagcacctcgaaaatgcaaaggagattggtattaagaaagccatttcggcaaacataagtatggggattgccttcctgcttatctacgcgagctacgccctggcgttttggtacggcagcactcttgtaatatcaaaggaatacaccatcggaaacgcgatgacggtgttcttttcgattctcattggtgcattctcagtgggtcaagctgctccttgcatcgatgcctttgccaacgcacgcggcgcagcctacgtgatcttcgacattattgataacaatcccaaaattgattccttctccgaacgcggtcataaaccggacagcataaagggtaatcttgagtttaacgacgtccacttttcgtacccctcaagggcaaacgtgaagatactgaagggtctgaatcttaaggtgcagtctgggcagaccgtggcgctcgtcggtagctccgggtgcggaaaatccacgactgtacagctgatacaacgcttgtacgatccagatgaaggcactattaacattgacggacaagacattagaaatttcaatgtgaattacctgagggaaatcataggagtagtctcccaagaacctgtccttttttcaaccacgattgccgaaaacatttgctacggtagaggtaatgtaaccatggatgaaatcaaaaaggccgtcaaggaagcaaacgcatacgagtttatcatgaaacttccgcagaagttcgataccctggtgggagagcgcggcgcacagctgtccggtggccagaagcagcgtatagcaattgcacgcgcacttgttcggaacccaaaaatcttgctgctggacgaggctacttctgcactggatactgagagcgaagcagaggtccaagccgcacttgataaggcgagagaaggccgtaccaccattgtcattgcacatcgtctgtccaccgtgagaaatgcggacgttattgcaggatttgaagatggcgttattgtggagcaaggatctcactctgaattgatgaagaaagagggggtgtatttcaaactcgtgaatatgcagacttcaggatctcagattcagtcggaggaattcgagctgaacgatgaaaaggcagcaacgagaatggcccccaacggctggaagagcaggctgtttcgacactcaactcagaaaaaccttaagaactcccaaatgtgtcagaagagcctggacgtggagacggatggtcttgaggctaacgtgccacctgtgtcgttcctgaaggtgctgaaactgaacaaaactgagtggccgtactttgtggtgggtaccgtgtgtgcaattgcaaatggtggactgcaacccgcgttcagcgtgatcttttccgaaatcatagccatctttggcccaggagatgacgcggtcaagcagcaaaagtgcaacatctttagcctgatatttcttttcctcggaattatctcgttctttaccttctttctccaggggtttactttcgggaaagcaggtgagatcctcactcgacgtttgagatccatggcatttaaggcaatgctcagacaagatatgagctggtttgatgaccacaagaattcgaccggagcactctcaaccaggcttgctaccgacgcagcacaagtgcaaggcgcaacgggcactcgactcgcactgattgcacaaaacatcgccaatcttggtaccggaattatcatttcctttatctacggttggcagttgactctgctcctcctggcggtggtgccaatcatcgcagtctcgggtatcgtggaaatgaaactgcttgctggtaatgcaaagagagataagaaggaactcgaggcggcaggaaagatcgcaactgaggcaattgagaacatcagaactgtggtcagtctcactcaggaacgcaaatttgaatccatgtacgtcgaaaagttgtacggaccttaccgcaacagcgtgcaaaaggcccatatctacggcatcacctttagtatctcgcaggcctttatgtacttctcgtacgcaggatgttttcgttttggtgcctaccttatcgtcaatggacatatgagatttcgcgatgtgatacttgtgttcagcgctatagtctttggagcggtggcactggggcatgcctccagcttcgcacctgattacgcaaaggcgaaacttagcgccgcacatctgttcatgctttttgaacgccagcctctgatcgatagctactccgaggagggacttaagccagacaaatttgaaggaaacatcacttttaacgaagtggtgttcaactacccaaccagggcaaacgtcccagtccttcaggggctctccctcgaagtcaagaaaggtcaaaccctcgcactggtgggatcgtccggatgcggtaagtcgactgtcgtccaactccttgaacgattttacgaccctttggcaggaaccgtgtttgtggacttcgggtttcaactgcttgatggccaagaagccaaaaagctgaatgtccaatggctccgagcacaactcggtatcgtgtcccaagagccaattctgttcgactgttccattgctgaaaacatcgcttacggggataacagccgcgtcgtcagtcaagacgagatcgttagcgctgcaaaagctgcgaacatccatccattcatagaaacccttcctcataagtacgagactagagtgggtgataaaggtactcaactgagcggaggacagaaacagcgcattgcgatcgcccgcgccctgattcggcagcctcagattctgctgttggacgaagcgaccagcgcacttgacactgaatcagaaaaggtggtccaggaggcgctcgacaaagcaagagaaggtagaacctgtattgttattgcacacagactgtccaccatacaaaacgcagatcttatagtggtgtttcaaaatggcagggttaaggagcatggcacccatcaacaacttctggcccaaaagggaatatacttttccatggtgagcgtccaggccggaactcagaacctt

SEQ ID NO: 200263 - DNA, 3858 bp, Artificial Sequence
  derived and/or modified sequence
atggaccttgaagccgcaaagaatggaaccgcttggcgccccacttccgctgaaggagacttcgaactggggatctccagcaagcaaaaacggaagaaaactaaaactgtcaagatgatcggagtgctgactctcttcaggtactcggactggcaagataaactcttcatgtcgctggggaccataatggcgatcgcacacggttccggactgcctcttatgatgatcgtctttggcgagatgaccgacaagtttgtggacaccgcggggaatttctcattcccagtgaacttcagcctttctctcttgaatccaggaaagattctggaagaggagatgacgcgatacgcatattactactccgggctgggagcgggagtgctggtggcagcatatatccaggtgtcattctggactttggcggccggacggcaaatcaggaaaatccggcagaaattcttccatgccatcctccggcaggaaatcggctggttcgacatcaacgacaccactgagctgaacacgcgcctgaccgacgatatcagcaagatcagcgaagggatcggagataaagtcggaatgttcttccaggcagtggccaccttctttgcgggcttcatcgtgggattcatccgcggctggaagctcacgctcgtgataatggccatttcgccgatcctgggcctgagcgcggccgtgtgggctaagatcctctcagccttcagcgacaaagagctggcagcctacgcaaaggccggagcggtggcggaagaggcgctgggtgctattagaaccgtcattgcattcggaggacagaataaagagctcgaaaggtaccagaagcacctcgagaacgccaaggagatcggaatcaaaaaggcgatctcggccaacatttccatgggtattgcgttcctcttgatttacgccagctacgcactcgccttctggtacggatccaccttggtaatctcgaaggaatacactatcggaaatgccatgaccgtgttcttcagcattcttatcggcgccttctccgtgggacaagccgccccgtgtatcgacgcgttcgcaaatgcccgcggcgcggcttacgtgatcttcgatatcatcgacaacaatccaaagatcgacagcttcagcgaaagaggacataaacctgattcgattaagggaaacctggaattcaacgatgtccacttctcgtacccatcccgggccaacgtgaaaatcttgaagggtctgaacctgaaggtgcagtcgggccagactgtggcgctggtcggatcgtcagggtgcggcaagtccactaccgtgcagttgattcaacggctttatgacccggacgagggcactatcaacattgacggccaggacatccgcaacttcaatgtgaactacctgcgggagatcattggcgtggtcagtcaagagccggtgctgttctccaccactatcgcggaaaacatctgctacggcaggggaaatgtcactatggacgagatcaagaaggcggtcaaagaggcaaatgcctacgaattcatcatgaagctccctcagaaattcgataccctggtgggtgaacgcggagcacaactgtccggaggacaaaagcaacgcatcgccattgcgagagcgctggtcaggaacccaaagattctgctcctggacgaagccacctcagcacttgataccgagtccgaagcggaagtccaagccgccttggacaaagccagggaggggagaaccactattgtgatcgcccatcgcctttccactgtgcgcaacgccgacgtgatcgccggattcgaagatggcgtgatcgtcgagcagggatcacactcagaacttatgaagaaagaaggagtgtacttcaaactcgtgaacatgcaaacgtctggctcgcaaatccagtccgaggagtttgaactgaacgacgaaaaggccgccacccgaatggcccctaacggatggaagagcagactgttccgccattcgacccagaagaacctgaagaactcgcagatgtgtcaaaaatcactcgatgtggaaaccgatggtctggaagcaaacgtgccgccagtgtcatttctgaaggtccttaagctcaacaagactgagtggccttacttcgtcgtgggtaccgtgtgtgcgattgcgaacgggggcctgcagccggcgttcagcgttatcttctcggaaatcatcgccatcttcggcccgggagatgatgcggtgaagcaacaaaaatgtaatatcttctccctgatcttcctcttcctcggaatcatctcattcttcaccttttttctgcagggtttcaccttcggaaaggccggagaaatcctgacgaggcgcctgaggtcgatggctttcaaggctatgctccgccaggacatgtcgtggtttgacgaccacaagaatagcaccggtgcactgagcacccggctggctactgacgcggcccaggtccaaggcgccactggaacccgcctcgcactcatcgcgcaaaacatcgccaacctcggaaccggcatcatcatcagctttatctacgggtggcagctgactctgctgcttctcgctgtcgtgcctatcatcgcggtgtccggaattgtggagatgaagctgctggcgggcaatgcgaaacgggacaaaaaggaactcgaagcggcggggaaaattgccactgaggcaatcgaaaacatccggactgtcgtcagcctcacccaggaacggaaattcgaaagcatgtacgttgagaaactgtatggaccgtaccggaactcggtgcagaaggcacacatttacggaatcaccttcagcatttcccaggccttcatgtacttcagctacgcaggatgcttccgattcggggcctacctgatcgtgaacgggcatatgcgcttcagggacgtcatcctggtgttcagcgccatcgtgttcggggccgtggccctggggcacgcttcctcattcgcaccggactacgccaaagcaaagctgtcggcggcgcacctcttcatgctgttcgagcgccagcccctcatcgactcctactcggaagaaggcctgaagccggataagttcgaaggtaacataaccttcaacgaggtcgtgttcaattacccgactagagccaacgtcccggtgctccagggactttccctcgaagtcaagaaaggacagaccttggcactcgtgggatcaagcggatgcgggaaatccactgtggtgcagctgctggaacgcttttacgacccgctggccggaactgtgttcgtagatttcggatttcaactccttgatggtcaggaagccaagaagctgaacgtccagtggctccgcgcccagctgggaatcgtgtcgcaggaaccaatactgttcgactgctccatcgctgagaacatcgcctacggggataattcccgggtggtgtcacaagacgaaatcgtgtccgcagccaaagctgctaacatccaccctttcatcgaaaccctcccccacaaatacgaaactcgggtcggagacaagggaacgcaactctctgggggacagaaacagcggattgctatcgctagagcacttatccggcagccgcaaatccttttgctggacgaggctactagcgcgcttgacaccgaatccgagaaagtggtccaagaggctctggacaaagcaagagaagggcggacctgcatcgtcatcgcacatcgactgtcgacgatccagaacgcagacctgattgtggttttccaaaacggacgggtgaaggagcacggtacgcaccaacagctgcttgcgcaaaagggtatctacttttcgatggtgagcgtgcaggcaggaactcaaaacctg

SEQ ID NO: 200264 - DNA, 3858 bp, Artificial Sequence
  derived and/or modified sequence
atggacctggaggcagccaaaaacggcacagcctggaggcctacgtccgccgagggagatttcgaactgggaatatcaagcaaacagaagagaaaaaagacgaaaactgtcaagatgatcggcgtacttaccctgttccggtactccgactggcaggataagctgtttatgagcctcggcactattatggcaatcgcccatgggtcaggcctgcccctcatgatgatagtctttggagaaatgacggacaaattcgtggacacagccggcaatttttcttttcctgtaaacttcagcctctcactcttgaatcctggaaagattttggaagaggaaatgacccgctacgcatactactactcagggctcggagcgggagtgctggtcgctgcttatatacaggtttccttctggacgctcgccgcaggaaggcagattagaaagatacggcagaagttcttccacgccatcctcaggcaggagatcggatggttcgatatcaacgataccactgagctcaacactcgccttacggacgacatcagtaaaatatcagagggcatcggggataaggtggggatgttctttcaagctgtggctacgttcttcgctgggttcattgtaggatttattaggggatggaagctgacactcgtcataatggctatctctccgattctgggcctgtctgctgctgtgtgggccaagattctgtccgcctttagcgacaaagaactcgccgcctacgcgaaagccggggctgtcgcggaggaagccctgggtgcaattcgcacagttattgctttcggagggcaaaataaagaactcgaaagatatcagaaacacctggagaacgcaaaagaaattggaatcaagaaagctatttccgcaaacatcagtatgggcatcgcatttcttcttatttatgcttcctatgctctcgcgttctggtacgggagtacacttgtgattagcaaggagtatactattggtaatgccatgacagtgttcttctccattctgattggcgccttcagcgttggccaggctgcaccttgcatagacgccttcgccaacgcacgaggcgctgcctacgtgatattcgacatcatcgataataatcccaaaatcgacagtttctccgagcggggccataaaccagacagcatcaagggcaatttggaatttaatgatgtgcactttagctatccctcccgagccaatgtgaagatactcaaagggctcaacttgaaggtgcaaagcgggcaaacggtggccctcgtggggagttcaggatgtggcaagagtaccactgtacagctcatccagcggctgtatgacccagatgaagggacaatcaatatcgatggccaggacattaggaacttcaatgtgaattatctgcgagagatcatcggggtggtgagccaggaacccgtcctgttctccactaccatcgccgagaacatatgctatggaagagggaacgtcaccatggacgaaattaaaaaagcagtgaaagaggcaaacgcgtatgaattcatcatgaagctgccacaaaagttcgacaccctggtgggggagcggggcgcccagctgtccggcggacagaagcagcgaattgctatcgcgcgggctctggtacggaaccccaaaatcctgttgctggatgaagctacatccgccctcgatacagaatctgaggctgaggtgcaggccgctctcgacaaagcaagagaggggcgaacaaccatagtgatcgcacacagactttccacggttaggaacgccgatgtcatagctggcttcgaagatggcgtgatagtggaacagggcagtcactccgaacttatgaagaaagagggggtttactttaagctcgtgaacatgcagacaagcggctctcagattcagagtgaggaattcgagctcaacgatgagaaagcagccacgcggatggcacccaacggttggaagtcccggctctttaggcattctactcaaaaaaatctcaagaattcccagatgtgccagaagtccttggatgtggagacagatggactggaggccaatgtgccaccggtgtcattcctgaaggtgctcaagttgaataaaacagagtggccatacttcgtggtgggcacagtatgcgctatagcgaacggaggcctgcagcctgccttttctgtgatattcagtgagataattgccattttcggacccggcgatgatgccgttaagcagcagaaatgcaacatcttttctctcatcttcttgtttctcggaattatttcttttttcacttttttcctgcaaggttttacgttcgggaaagccggcgagattctgacacggcgactgcggagcatggctttcaaagccatgctgaggcaggatatgagctggttcgatgatcacaagaattctaccggtgctttgtctacccggcttgcaaccgatgccgcgcaggtccagggagcaaccggtactaggctcgctctcattgcccagaacattgccaacctcggaaccggcattattatctccttcatctacggatggcagctgactttgttgttgttggccgtggtgccaatcatcgctgtctcaggcatcgtagagatgaaactgctcgctgggaatgcgaaaagggataagaaagaactcgaagcggccgggaagatagctacagaggctatcgagaacatccggaccgtcgtcagtctgacccaggaacgaaagtttgaatcaatgtatgtggagaaactttacggaccctacagaaatagtgtgcagaaggcccatatttacgggattactttcagcatctcacaggcattcatgtatttctcttacgctggctgttttcgctttggtgcatacctgatagtgaacggacatatgagattccgggatgtgatattggtcttctctgccatagtgttcggagctgtggctctggggcatgcgtcttcattcgcacctgattacgctaaagcaaagctcagcgctgcccacctgttcatgttgtttgaacgccagccgctgatcgattcctattccgaagagggtttgaagcctgataagttcgaggggaatatcacgtttaacgaagttgtgttcaactaccctacaagagcgaatgttccagtgctgcaggggctgtccctcgaggtgaaaaaaggacagacgctggcccttgtcggaagcagtgggtgtggaaagtcaacagtggttcaactcctcgagcgcttctatgacccattggctggaacagtgtttgtcgattttgggtttcagctcctggacgggcaggaagccaagaagttgaatgtgcagtggctgcgagcccagcttgggattgtttctcaggagccaatcttgttcgactgctctattgctgaaaacatcgcgtatggagacaattccagggtcgtgtcacaggacgagattgtgtccgcagctaaagcagcaaacattcacccattcattgagacgctgcctcacaagtatgagactagggtgggggataaaggaacgcagctgtccggggggcagaagcagaggatagccattgcccgcgctcttatacgccagcctcaaatcctgctgctggatgaggccaccagtgctctggatactgaatccgaaaaggtggtgcaggaggcgctcgataaggctcgcgaagggagaacttgtatcgttatcgcccaccgactcagtaccattcagaacgccgatctgatcgtggtcttccagaatggccgagtgaaagagcacggcacccaccagcagctgctggcccaaaaagggatctacttttcaatggtgtcagttcaagctgggacccagaacttg

SEQ ID NO: 200265 - DNA, 3858 bp, Artificial Sequence
  derived and/or modified sequence
atggacctggaggcagctaagaacggcaccgcttggcggcctacctctgctgaaggagacttcgaactgggaatctcgtccaaacagaagcggaaaaagactaagactgtcaaaatgatcggtgtactgactctgttccgctacagcgattggcaagacaagctctttatgtcgctgggaaccattatggcaatcgcacacgggtcagggctgcccctcatgatgatcgtctttggagagatgactgataagttcgtggacactgcaggaaactttagcttccctgtcaacttcagcctttcattgctgaaccctggaaagatccttgaagaagaaatgacgcggtacgcctactactactctgggctcggggcaggcgtgcttgtggcggcgtacatccaggtgtccttctggactctggccgcgggcagacagatcaggaagattcggcagaaattctttcacgcgattctgcggcaggaaatcggatggtttgacatcaacgacaccaccgaattgaatacccgcctgactgacgacatctccaagatatcggaggggattggagacaaggtcgggatgttcttccaggcggtcgccaccttttttgccgggttcatcgtgggattcatccgcggctggaagctgactttggtcattatggctatctcgccgatcctgggtctgtccgccgccgtgtgggcaaagatcctcagcgcgttcagtgataaggagctggctgcctacgccaaagctggagccgtggccgaggaagcgctcggtgcgatcagaacggtgatcgctttcggagggcagaataaagaactggaacgataccaaaaacatttggaaaatgcaaaagagatcggaatcaaaaaagctatcagcgcgaacatttcgatgggaatcgccttcctcctgatctatgctagctatgccttggccttctggtacggatcaactctcgtgatctcaaaggagtacactatcggcaacgcaatgaccgtctttttcagcattctcatcggagccttctccgtcggccaggccgcaccgtgtatcgacgcgtttgcgaacgcccggggcgcggcatacgtgatcttcgacatcattgacaacaaccccaaaattgattccttcagtgagcgcggacacaagccagattctatcaaaggcaatctggagtttaatgacgtgcacttctcctacccttctcgggccaacgtgaaaatcctcaagggcctcaacctgaaggtgcaatctggacaaactgtcgcgctcgtgggttcgtccggatgtggaaaatcgaccaccgttcagctcatacagcggctgtacgacccagatgaaggaaccatcaacatcgatggtcaggatatccggaatttcaacgtcaattaccttagagaaatcatcggagtcgtgtcgcaagaacccgtgctcttctctacgaccatagcggaaaacatttgctacggacgcggaaacgtgaccatggacgaaatcaagaaggctgttaaggaggccaacgcctacgaattcatcatgaaactcccacagaagtttgacactctggtgggagaaagaggagctcaactgtcaggcggccaaaagcagcggatcgccatcgcacgggctctcgtccgcaatccgaaaatcctgcttcttgatgaagcgacgagtgctctggacactgagtccgaagccgaagtgcaggccgctttggataaagcaagagagggccgaaccacgatcgtcatcgcacatagactctctactgtgcgaaatgccgatgtcatagcaggattcgaggacggcgtcatcgtggaacaaggctcgcacagtgagctcatgaagaaggagggagtgtacttcaagctggtgaatatgcagaccagcggcagccagatccagtccgaggagtttgaacttaacgacgaaaaggccgctacccgcatggcgccaaacggctggaaaagccggttgttcagacactccacccagaagaacctgaagaacagccagatgtgccagaagagcctggatgtggagactgatggactggaggccaacgtcccgccggtgtcctttctgaaagtgctgaagctgaacaagacggaatggccgtactttgtggtgggaaccgtttgcgctattgctaacggaggtctgcaaccggccttctcagtgatcttttcggaaatcatcgcgattttcggaccaggtgatgacgcggtcaaacagcagaaatgtaatatcttctccttgatcttcctttttcttggcattatctcgttcttcaccttctttctccagggattcaccttcgggaaggctggagagatcctcactaggcggctcagatccatggcattcaaggctatgctgcgccaggacatgagctggttcgacgaccataagaattcaactggggcgctcagcactcgcctggcaaccgacgcagcccaggtgcagggggcgactggaacccgtctggccctgatcgcgcaaaacatcgccaatctcggcacggggatcatcatttcgttcatttacgggtggcaacttacccttcttcttctcgccgtggtgccgatcatcgctgtctccggaatcgtcgaaatgaaattgctggcaggtaacgccaagcgcgataagaaagagttggaggcggccggaaagatcgctactgaggcgattgagaacatacgcaccgttgtgtccctgacgcaagagaggaagttcgaatccatgtacgtggaaaagttgtacggcccgtaccgcaacagcgtccaaaaggcccacatttacggtattaccttctccatcagccaagcattcatgtacttctcatacgcaggatgctttcgcttcggcgcgtaccttatcgtgaacggccacatgaggttccgcgacgtgatcctcgtgttcagcgcaatcgtgttcggagcggtggcactgggccatgcttcatcattcgccccggactacgcaaaggccaaactgtcggcagcacaccttttcatgctcttcgagagacagccattgatcgattcatattcggaggagggactgaagccggacaagttcgaagggaacattactttcaacgaagtggtgttcaattatccgaccagagcaaatgtgcccgtgctccagggcttgtccctggaagtgaagaagggacaaacccttgccctcgtcggtagctcgggatgcggaaaatcaacggtcgtgcaactgctggaacgcttttacgatccgctcgcgggcactgtgtttgtggacttcgggtttcaactcctggacggtcaggaagccaagaagctcaatgtccaatggctgcgcgcccaactcggtatcgtgagtcaggaaccaatcctctttgattgctcgatcgccgagaatatcgcgtacggtgacaattcgagggtggtatctcaagacgagattgtttctgccgcaaaagcggcgaacatccatcccttcatcgaaaccctcccacacaagtacgagacgagagtcggagataaaggtactcaactgtcgggcgggcagaagcagcgcattgcgatcgcccgcgccctgatccgccagcctcaaatcttgctcctcgacgaggcaacctccgcccttgatactgaatcagagaaggtggtgcaggaagctctggataaggcacgcgaaggaaggacttgcatcgttatcgcccataggctctcgaccattcagaatgcagatctgatcgtggtgtttcagaatggccgggttaaggaacacggcacccatcagcagctgttggcccaaaagggaatatacttctcaatggtttccgtgcaagccggaacccagaacctg

SEQ ID NO: 200266 - DNA, 3858 bp, Artificial Sequence
  derived and/or modified sequence
atggacctggaggctgcgaaaaacggcaccgcttggcggcccacttcagccgaaggagatttcgaactcggtatcagctccaaacagaagcgaaaaaagacaaaaaccgtgaaaatgatcggcgtcttgaccctgttccgctattcagattggcaggataaactttttatgagccttggcactatcatggccatcgcccatggcagcggtctgccactgatgatgattgtcttcggtgaaatgactgataagtttgtggacactgctggaaacttttcttttccggttaatttctccctgtcgctacttaatccaggcaagatactcgaagaggaaatgaccaggtatgcatattattactctgggttgggggcaggcgttttagttgccgcatacatccaagtgtccttctggacgctagcggccgggaggcagattcgcaaaattcgacagaagtttttccacgcaatcctgcgacaagaaatcggttggttcgatataaatgacacgaccgagcttaacaccaggcttaccgacgacatctctaaaatttctgagggtattggggataaagtcgggatgttctttcaggctgttgccacttttttcgcgggatttatcgtaggattcatcagggggtggaaactcaccctagtcattatggccatctctccgattctgggtttgtctgctgcagtctgggctaagatcctgtctgccttttccgataaagagctggccgcctacgccaaggctggcgctgttgccgaagaggctctaggcgcaattcgcacagttatcgccttcggaggacagaacaaggagctggagcgctaccagaaacatctggagaatgcaaaggagatcggaattaagaaggcgatatccgctaatataagcatgggcattgcattcctgctgatctacgcttcttacgccctcgcgttctggtatgggagcacacttgtgattagcaaagaatacacaattggcaacgccatgactgtgttctttagcatcctgattggtgcattcagtgtaggccaagctgccccttgcattgatgccttcgccaacgcccggggggccgcatatgttatcttcgacattatagacaacaaccccaagatagatagctttagtgagagggggcacaagcccgactctataaagggtaatctggagtttaacgacgtgcatttttcttatccttccagagccaatgtgaagatcctcaagggactgaatctcaaagtgcagtctggacagacagtggctcttgtgggtagctcaggctgcggtaagtcaactaccgtgcaactgatccagcgtctgtacgaccctgatgagggcaccatcaacattgatggccaagacattcggaacttcaatgtcaactacttacgcgaaatcatcggggttgttagccaggaacccgtcctctttagtaccaccatagcagaaaacatctgttacggtcgggggaatgtcacaatggatgaaattaagaaggctgtaaaagaggcgaacgcgtacgagtttataatgaaactgccccagaaattcgataccttagtgggcgagagaggggcccagctctcaggggggcagaagcaacggatagccattgctagggcactggtccggaacccaaaaatattgctgcttgacgaagcgaccagtgctctcgacacggagagtgaggctgaagttcaggccgctctggacaaggctcgcgagggccgaactaccatcgtaatcgcacaccgcctttccacggtgagaaacgccgatgtgatcgctggttttgaagacggggttatcgtcgagcaaggcagccactctgagctgatgaagaaggaaggtgtctacttcaagttagtgaacatgcagacttctggatcacagattcaaagtgaagagtttgagctcaacgatgaaaaagccgccacacggatggctcccaatgggtggaaaagtcgactttttagacatagcacacagaagaacctaaaaaacagccagatgtgtcagaaatctctggatgtggagactgatggacttgaggcaaatgtgcctcctgtcagttttttgaaggtcctcaaactgaacaagaccgaatggccatatttcgtcgtgggcacagtatgcgccattgccaacggagggctccagcctgcgttttctgtcatattctctgagatcatcgctattttcgggcccggcgacgatgccgttaagcagcagaaatgcaatatcttctcccttatttttttatttctggggatcattagcttcttcaccttctttctgcagggcttcacattcggtaaggctggggagattctgactaggaggcttcgctccatggccttcaaggcaatgctgcggcaagacatgagttggtttgatgatcacaagaattccaccggcgctctaagtaccagactggctactgacgcagcacaagtgcaaggggctaccggcacccggttggccttgattgcgcagaacattgctaatcttggaaccgggatcattatcagcttcatctatggctggcagttgacactgctgctgcttgctgtcgtccctattattgcagtctcggggatcgtggagatgaagctgcttgccggcaacgcaaagcgggacaagaaagagttggaagctgccgggaagatcgccaccgaagcaatagaaaatattcggactgtggtgagcctcacccaggaaagaaaattcgagtccatgtatgtagaaaagctctatggaccgtaccgcaactcggtgcagaaagctcacatttatggcattaccttttccatttctcaggcatttatgtacttttcatatgcaggctgctttcgatttggcgcctatctgatagtcaatgggcatatgcgtttcagggatgtgattttagtcttctcagccatagtcttcggggccgtagcccttggccatgcctccagttttgcccctgactacgccaaggcaaaactaagcgcagcgcacctatttatgctctttgagaggcagccactcatcgattcatattcagaggaaggcttgaagcccgataagtttgaaggaaatataacctttaatgaagtggtgttcaattatcccacacgagctaatgttccggtgctgcagggtctgtccctggaggttaagaagggccaaactttggccctcgttggatcatctggctgcggaaaatctaccgtcgttcaactccttgagagattctacgacccacttgcgggcaccgtatttgtggatttcggttttcagttgcttgatggccaagaagctaaaaagttgaatgttcagtggcttcgggcacagctcggtatcgtctcgcaggagcccattctgttcgactgttcaatcgcggaaaacattgcctatggcgataacagccgcgtggtcagtcaggatgagatcgtctccgcagccaaagccgcaaacatccacccctttatagaaacgttgcctcacaagtacgaaacaagagtgggtgataaggggacccagctgagtggcggccagaaacaaaggattgccatcgctagagcgttaatacgccagccccagattctattgttggatgaagctacctccgccctagacacagaatctgagaaggtcgtccaggaagcactggataaggccagggagggccggacttgcattgtgattgcccacagattatcaacaattcagaatgctgatctcatcgtggtcttccagaacggaagagtaaaggaacacgggacacatcagcagcttctggctcagaagggcatctatttctcaatggttagtgtgcaggctggaacacagaatctc

SEQ ID NO: 200267 - DNA, 3858 bp, Artificial Sequence
  derived and/or modified sequence
atggatctcgaggccgcaaaaaacgggactgcctggaggccgacttcagcagagggagattttgaactcggcatcagcagcaagcagaaacgcaaaaagactaaaaccgtcaagatgattggagtcctgactctgttccgatacagcgattggcaagacaagctcttcatgtcactgggaactatcatggccattgcccacggatcaggactgccactgatgatgattgtgttcggagagatgactgacaagttcgtggacaccgcggggaacttctcattcccggtgaacttttcgctgtccctgctgaatcctggaaagatcctggaggaggagatgactaggtacgcctactactactcgggactgggcgcgggggtgctggtggcggcgtacattcaagtttccttctggaccctggcagctggacgtcagatcaggaagatcagacagaagttctttcacgcaattctgcgccaggaaatcggctggttcgacatcaacgatactactgagcttaacacgagactgactgacgacatttcgaagatcagcgaaggaatcggagacaaagtggggatgtttttccaagcagtggcaactttcttcgcagggttcattgtgggctttatccgaggatggaagctgactctggtcatcatggccatcagccctatcctcgggctgtcggccgccgtgtgggcgaaaatcctgtcagccttctccgataaagagctggccgcgtacgccaaggctggcgctgtggccgaagaagccctcggtgcgatcagaaccgtgatcgccttcggcggccagaacaaggagctcgagcggtaccaaaagcacctggagaatgcgaaggagatcggtatcaaaaaggcgatctccgcaaatatctcgatgggtatcgcgttcctcctgatatacgcttcatacgctctggcgttctggtacgggtcgaccttggtgatatccaaggaatataccatcggaaatgccatgaccgtgttcttcagcatccttattggagcattctcggtcggccaagcggccccttgcatcgatgccttcgcgaacgctagaggagctgcctacgtgatctttgatatcatcgacaataacccaaagattgactcattctctgaacgcgggcataagcctgactctatcaagggaaacctggagttcaatgacgtgcatttctcgtacccgtcaagagctaacgtcaagatccttaaaggcttgaatctgaaagtccaatctggccaaactgtggccctcgtgggttcgtcaggatgcggaaagtcgaccaccgtgcagctcatccaacgcctgtacgatcccgatgagggaaccatcaacatcgatggacaggacatccggaacttcaacgtgaactacctgcgggaaatcattggtgtcgtgtcacaagaaccggtgctcttctcgacgaccatcgctgaaaacatctgctacggacgcggcaacgtcaccatggacgagatcaagaaagctgtgaaggaagcaaatgcctacgaattcatcatgaagctgccgcagaaatttgacacgctggtgggggaacgaggcgcccagctgtcaggcggacaaaagcagcgcatcgccatcgcccgggccctggtacggaatccaaaaatcttgctgttggacgaagccacttcagctctcgacaccgagtcagaagctgaggtgcaggccgctctcgacaaggcccgggaagggaggaccacgattgtcatcgcccatcggctgtcgactgtccggaacgctgacgtgatcgccggatttgaggacggagtgatcgtggaacaaggatctcactcggagctgatgaaaaaagagggggtgtacttcaaacttgtgaatatgcagacttccggatcgcagatccagtccgaggagttcgaacttaacgacgagaaggcggcgacccgcatggctccgaacggctggaaatcgaggctgttccggcattcaactcagaagaacctgaagaattcccagatgtgtcagaaaagcctggacgtcgaaaccgacggattggaggccaacgtcccgcctgtgagctttctcaaggtcctgaagctgaacaaaactgagtggccatactttgtggtgggaacggtgtgtgccattgccaatggcggactgcaaccagccttttccgtgatcttctccgaaatcatcgctatctttggacccggagacgacgccgtgaagcagcaaaagtgtaacatcttcagcctcatctttctgttcctgggtatcatctcattcttcactttcttcctgcagggcttcaccttcggaaaagctggagaaatcctgactcgccgcttgagatccatggccttcaaagcgatgttgcggcaagacatgtcgtggtttgacgatcacaagaactcgaccggagccctgtccacccgcctggccaccgacgccgcccaagtgcagggtgccaccggaactagactggcgctgattgcccagaacattgcgaacctcggaactggcatcatcatctccttcatatacggatggcagctgactctgctgctgctggctgtggtgcccattattgccgtgagcggaatcgtggaaatgaagctcctggccggcaatgcgaagcgggataagaaagagctggaggcagcgggtaagatcgcgactgaggccatcgagaacatccgcactgtggtgagcctgactcaggaacggaagtttgaatcaatgtacgtggagaagctctatggtccataccggaactcagtccagaaggcacatatctacggcattactttttcaatttcgcaagcgttcatgtacttctcatacgccggatgctttcgcttcggagcatacctgatcgtcaacgggcacatgcggtttcgggatgtgatcttggtgttttctgctatcgtctttggagcggtggcattgggacacgcgagtagcttcgcacctgactacgcaaaagcaaagctcagcgcggcccacctgttcatgctgttcgaacgccagccgcttatcgatagctattcggaagagggcctgaagccggacaaattcgagggcaatatcactttcaacgaagtggtgttcaactacccgacccgcgccaatgtgccagtgctgcaaggtctttcactggaggtgaagaagggacagaccttggcactggtgggatcctcaggatgcggcaagtctaccgtggtgcagctcctggaaaggttctacgatcctcttgcgggcaccgtgttcgtcgactttggcttccagctgcttgacggacaagaagccaagaagttgaacgtgcagtggctgagagcgcaactcggaatcgtgtcacaggagcctatcctgtttgactgctcaatcgcagaaaacatcgcgtacggagacaattcccgcgtcgtctcacaggacgagatcgtgtcagcagccaaggccgccaatatccatcccttcattgaaactttgccacataagtacgagactagagtgggtgacaagggtactcagctgtccggaggacagaagcagcggatcgcaatcgcgcgcgccctcatccgccagccacagattctcctcttggacgaagcaaccagcgccctggacactgaatcggagaaagtcgtccaggaagccctcgataaggccagagagggacgcacgtgcatcgtcatcgcacacaggctcagcactattcaaaacgcagatctgatcgtggtgtttcaaaacggccgggtgaaggaacacggaacccaccagcagctgctcgcgcagaagggtatctacttttcaatggtgtcagtgcaggcaggcacccagaacttg

SEQ ID NO: 200268 - DNA, 3858 bp, Artificial Sequence
  derived and/or modified sequence
atggacctggaagcagcaaagaatggaaccgcgtggcggccgacaagcgcggaaggtgacttcgaactgggaatctcctctaagcagaagcggaaaaagacaaagaccgtgaagatgattggagttctcaccctgttccggtactcggattggcaggataagctgtttatgtcgcttggcaccataatggccattgcccatggctccggcctgccactgatgatgatcgtgtttggtgagatgacggataagttcgtcgacaccgcgggtaacttctcgtttccagtgaacttttcattgtctctgctcaatcccgggaagatcttagaggaagagatgacccggtatgcctattactacagcggtctaggtgcaggggtcctggtggctgcctatatccaggtgtccttctggaccctggctgctgggagacaaatacggaaaataaggcagaagtttttccacgccatactccgtcaggaaatcgggtggtttgacattaacgataccactgaactgaatactcgcttgacagatgacatctcgaaaatcagcgaaggcataggggacaaggtgggaatgttctttcaggccgttgctacattctttgccggcttcattgtcggattcattcggggatggaagctgacacttgtaatcatggccatcagccctattctagggttgtcagcagccgtctgggccaagatcctgtccgcgttcagcgataaggagttggccgcatatgccaaggcaggagccgtggccgaggaggcactgggagctatccgaacggtgatcgcgttcggtggccagaataaagagttagaaagataccagaagcacttggaaaatgccaaggaaattggcataaagaaggccatctctgcgaatatcagcatgggaattgcgttcctgctgatctacgcctcttacgcccttgctttctggtatggcagtacacttgtgatctccaaggaatacacaatcggaaacgcaatgaccgtgtttttctccatccttatcggagccttctccgtgggacaggccgctccgtgcattgacgcttttgcgaatgcaaggggagctgcctacgtcatctttgatattatagataataatccaaagatcgattcatttagtgagcggggccataagcctgatagcatcaagggtaacctggaatttaacgacgtccacttttcatatccatccagggcaaatgtgaagatactcaaggggttaaacctgaaagtacagtcgggacagacagtcgctcttgtaggcagctccgggtgtgggaagtccacaacagtgcagctgatccaacggctctatgacccagatgagggcacgatcaatatagacgggcaggatatccggaatttcaatgtgaattatctcagagagatcatcggcgtcgtcagccaggaaccagtacttttctcaactacaatagccgagaatatttgctacggccgggggaacgtgaccatggacgagatcaagaaggcagtaaaggaggccaacgcttatgaattcatcatgaaactccctcagaagtttgatacactcgttggggagcgaggtgcacaactgtccggaggccagaaacaacgaattgctatcgccagagcccttgtccgcaatccaaagatccttttactcgatgaggcaacgtctgctctcgataccgaatcagaagcagaagtgcaggcagccctagataaagctcgcgagggtcgcacgactatcgtgatcgcacataggttatctacagtaagaaacgcagatgtgattgccggcttcgaagacggtgtgatcgtggagcaggggagtcattcagagctcatgaaaaaggagggtgtgtactttaagctggtaaatatgcagacttctgggtcgcagatacaatccgaggagttcgagctgaacgacgagaaagccgccacgcggatggctcccaacggatggaagtctcgcctttttcgtcattccacgcagaaaaatctgaagaattcccagatgtgtcagaaatctcttgacgttgagacagacggtctcgaggctaacgtacctccggtgagctttcttaaggttctgaagctcaacaagaccgaatggccatatttcgtcgtcggcaccgtctgtgcaatcgcgaacggcgggctgcagcccgcgttcagcgtaatcttttctgaaatcattgccatctttggtcctggcgacgatgccgttaaacagcagaagtgcaacattttcagtctgatattcctgttcctcggaattatctcatttttcacgtttttccttcagggattcactttcgggaaggcgggcgaaatactgacccggaggttaaggagcatggctttcaaggccatgctgcgccaggatatgtcatggttcgacgaccataagaatagcactggcgccctgagcaccaggctggccaccgacgcggcccaggtccagggggccacgggaacacggctggcgcttatagcccagaatatcgccaacctgggaaccggtatcataatttcttttatctatggctggcagctcacactgctactcctggccgtggttccaataatcgccgtctcgggcatcgtggaaatgaagttgttagcgggcaacgccaagcgagacaagaaagagttagaggccgctggcaagattgccactgaagctatcgaaaacatccggaccgtcgtatccctcacacaggaacgtaaatttgaaagcatgtatgtcgagaagctttatggaccctaccgcaattcggtgcagaaggcccacatttacggtatcactttttcaatctctcaggcctttatgtatttttcttatgctgggtgcttcagattcggagcatatttgatcgttaacggtcacatgaggtttcgggatgtgattttagtgttctctgccatagttttcggtgccgtcgctctcggtcacgcgagcagcttcgcacctgattacgccaaggccaaactctcagccgcccacttattcatgctgtttgagcgacagcccctgattgatagctattccgaggaggggttaaagcccgataaattcgaaggcaacataacctttaacgaagtcgtgttcaattatcctacacgcgccaatgtgcctgtcctgcagggtctgtcactagaggttaagaagggacagacccttgctttggttggatcatccgggtgcggaaagtccaccgtggtccaactgttggagaggttctacgatcctttggccggcacagtgtttgttgattttggattccagttactggatggacaagaagctaaaaagctcaatgtgcagtggctgcgcgcacagctgggcatcgtctcccaggagcctatactgtttgactgctcaatcgctgagaatatcgcgtatggcgataactccagggtcgtgagccaggatgagatagtgtcggctgcaaaggcggccaacattcatcctttcatagagaccctgccccacaagtacgagactagagtgggtgacaaagggactcaactgagcgggggacagaaacagaggatcgcaatcgcgagggccctcatcaggcagcctcagatccttttgttggacgaggccacctccgccttggataccgagtctgaaaaagtagtgcaggaggcactggataaggctcgggaggggcgcacatgcatcgtcatcgcccatcggctcagtacgatccaaaatgccgacctgattgtggtctttcagaatgggagggtgaaggagcacggcactcatcagcagctgcttgctcaaaaggggatttatttttcaatggtgtctgtccaggccggcacccagaacctg

SEQ ID NO: 200269 - DNA, 3858 bp, Artificial Sequence
  derived and/or modified sequence
atggatcttgaagcggcgaagaatggcaccgcgtggaggccgacctcggctgaaggcgacttcgaactgggaatctcgtccaagcaaaaacggaagaaaactaagacggtcaaaatgatcggagtgctcactttgtttaggtactccgattggcaagacaagctcttcatgtccctgggaactatcatggccattgctcacgggtccggcctgccactgatgatgatcgttttcggagagatgactgataagttcgtggataccgcgggcaatttctctttcccggtgaatttctccttgtcgcttctcaacccaggaaaaatcctcgaggaggagatgacgagatacgcctactactactcgggactgggagccggcgtgctcgtcgcggcgtacattcaggtgtccttttggactctggcagctggacggcaaatccggaagatccgccagaagtttttccatgctatcctccgacaagaaatcggttggttcgacataaacgataccacggagctgaacacgcgactgaccgatgacatctcgaagatctcggagggtatcggagataaggtcggaatgtttttccaggcggtggcgactttcttcgcaggcttcatcgtgggattcatccgaggctggaagttgacgctggtgatcatggcgatctcaccgatcttgggactctccgccgcggtgtgggccaagatcctgtcggccttttcggacaaggaacttgccgcctacgccaaggccggagcagtggctgaggaagccctgggggcgatccgcaccgtcattgcgttcggcggacagaacaaagaacttgagagataccagaagcacctggaaaacgcgaaggaaatcgggatcaagaaagctataagcgctaatatctcgatgggcatcgctttcctgctgatctacgcatcgtacgccctcgcattctggtacggatcgactcttgtgatcagcaaggagtacactatcggaaatgctatgaccgtctttttctccatcctcatcggagcgttctccgtgggccaggcagcgccgtgcattgacgccttcgcaaacgcgcggggcgccgcctatgttatcttcgacatcattgacaacaatcccaagattgattctttctcggaacgcggccacaaaccggacagcatcaaggggaatctggagtttaacgacgtgcatttctcatacccgtcgcgcgcaaacgtgaagatactcaaaggtctgaatctgaaggtgcagagcggccaaaccgtggctctggttggatccagcggctgcggaaagagcaccaccgtccagctcatccagaggctttacgacccggatgagggaactatcaatatcgatggacaagatatccgcaacttcaatgtgaactacctgcgcgaaatcatcggcgtggtgagccaggagccagtcctcttttcaactactattgccgagaacatttgctacggacgcggcaatgtcacgatggatgaaatcaagaaggcggttaaagaagcgaacgcgtacgagtttatcatgaagctgcctcaaaagtttgatactctggtcggagaacggggagcccagctctccggcgggcagaagcaacggatcgccattgcccgagccctcgtgcgcaaccccaaaatcctcctcctcgatgaggcaacgtcggctctggacaccgaatccgaagccgaagtccaagcggccctcgacaaggctagagagggcaggaccaccatcgtgatcgctcaccggctttccactgtgcgcaatgccgatgtgattgccggattcgaagatggcgtgatcgtggaacagggatcacactcagagttgatgaaaaaggagggtgtgtactttaaactcgtcaatatgcaaacttccggatcgcaaatccagtccgaagaattcgaactgaacgatgagaaggccgccacccggatggcacccaatggatggaaaagccggttgttccgccatagcactcaaaagaatctgaagaacagtcagatgtgtcaaaagagcctggatgtggagacggatgggctggaggcaaatgtgccgccggtgtccttcctcaaagtgctgaagctcaataagacggaatggccctacttcgtcgtgggtactgtgtgtgcaatcgcgaatggaggtttgcagccggcattcagcgtgatcttttcagaaatcatcgctatctttggaccgggcgatgacgcggtcaagcagcaaaagtgcaatatcttctccctgatcttccttttcctgggcatcatctccttctttacctttttcctgcagggattcaccttcggcaaggcgggagagattttgacccggagattgcggtcgatggccttcaaggcgatgcttcgccaggatatgtcctggttcgatgatcacaagaattccactggggcactgagcacccgcctcgcgaccgacgcggcgcaagtgcagggggccactggtacgcgcctggcattgatcgctcagaacattgcaaacctgggaactggaatcatcatctcgttcatctacggctggcagctcactctgctcctgctggccgtggtgccgattatcgcggtgtcgggaatcgtggaaatgaagctcctcgccggaaatgccaagcgggacaagaaggaactcgaggctgccgggaagattgccacggaggctatcgaaaacatccggaccgtcgtctccctgacccaggaacggaagttcgaatctatgtacgtggaaaaactttacggaccgtaccggaactcagtgcaaaaggcgcatatctatggcatcacgttctcaatctcccaggcattcatgtatttctcgtacgccggatgtttccggttcggggcctaccttatcgtgaacggacatatgcggttccgcgatgtgatcctcgtgttttcggctatcgtgttcggcgccgtcgccctgggacatgcctctagcttcgcacctgattacgcgaaggccaagctgtcagcggcccatctcttcatgctcttcgaacgccagcccttgatcgattcgtattcagaggagggactcaagcccgacaagtttgagggaaacatcaccttcaatgaagtcgtgttcaattacccgactcgcgcgaacgttccagtgctccagggccttagcttggaggtgaagaaaggacagaccctcgcattggtcggctcgtcgggatgcggaaagtcgaccgtggtgcagctgcttgagcgcttctacgaccccctggctggaaccgttttcgttgattttggattccagctcctggatggacaggaagcgaagaaactgaacgtgcaatggctgcgcgctcagctgggaatcgtgtcccaggaacctatcctgttcgactgctcgatcgctgaaaacatcgcatacggcgacaatagccgcgtcgtgagccaggatgagatcgtgtcagccgccaaagccgcgaatatccacccattcatcgaaactctcccacataagtacgagactcgggtgggtgacaaggggacccagctgtcaggaggacaaaaacaacggattgccatcgcccgggctctgatccggcagccgcagatcctgctcctggacgaagcaacctcggcactggacactgaaagcgaaaaggtcgtccaagaagccctggataaagctcgagaaggtcggacctgcattgtcatcgcacatagactgtcgaccatccagaacgcggacctgatcgtcgtattccagaacgggcgcgtcaaagaacacgggactcatcaacaacttttggcacaaaaaggaatttacttctcaatggtgtcagtgcaggctggtactcaaaacctg

SEQ ID NO: 200270 - DNA, 3858 bp, Artificial Sequence
  derived and/or modified sequence
atggatcttgaagcagccaaaaatgggactgcatggaggcctacctcagcggaaggagattttgagctcggaataagctcgaagcaaaagcgtaagaaaactaagaccgtgaagatgattggtgtactgaccttgttccggtacagcgattggcaggataagctgtttatgtcgcttggtactattatggctattgcacatggaagcggcctgcctttgatgatgatagtgtttggtgaaatgaccgacaagtttgtggatacggccggcaatttctcatttccagtcaacttttccctttcgttgctcaatccgggcaagattcttgaagaagaaatgaccagatacgcatattactatagcggtcttggtgccggtgtgttggtcgcagcctacatccaggtcagcttttggactctcgctgcgggtagacaaattagaaaaatcagacaaaagttttttcatgccattcttcggcaagagattggttggtttgacataaacgatactaccgaactgaacactcggctcactgacgatatctccaagatttcggaaggcatcggggataaagtgggaatgttctttcaagcagtggctaccttttttgccggatttatcgtcgggttcatccgcggttggaagctcaccttggtgatcatggcaataagccctatcctgggtctttccgcggcggtctgggcgaagattctgtcggctttctccgataaggagttggcggcatacgctaaagcaggagcggtggcagaggaggcactgggagcaatacggacggttattgccttcggaggccagaacaaagaactcgaacgataccagaaacacctcgaaaacgcaaaggagataggaataaagaaagcgatatccgcgaacatctccatggggatcgcttttctcttgatttacgcatcctacgcgctcgcattttggtacggatctactctcgtcatttcgaaggaatacactattgggaacgctatgactgtctttttctcaattctcattggtgcgttttcagtcgggcaagccgctccttgcattgatgcttttgcaaacgcaagaggcgcagcatacgtgatctttgacatcatcgataacaatccaaagatagactcgttttcggaacgaggacataaacctgactcgatcaaagggaacctggagtttaacgatgtgcatttttcgtacccatcgcgggcaaatgtcaagattctcaaaggcctgaacctgaaagtgcaaagcggtcaaaccgtcgcgctggtgggttcgtccggatgtgggaaatccaccactgtgcaactcattcagcggctgtacgatcctgatgagggaaccattaacatagacgggcaagatatccggaactttaacgtcaactaccttcgcgagatcatcggtgtcgtctcccaagagccggtgcttttttcaaccactattgcggaaaacatttgttatggacggggcaatgtgactatggacgaaatcaagaaagcggtcaaggaggcaaatgcgtacgagttcattatgaaacttcctcaaaagtttgataccttggtgggagagaggggagctcaactgtcgggtggacagaagcagagaattgcaatcgcccgcgccctggtcagaaatccgaagatccttctccttgatgaagccacttccgccctggatactgagtcggaggctgaagtccaagccgcactggacaaggcaagagagggtcggaccaccattgtgatagcacaccgcctctcaactgtgagaaatgctgatgtgattgcgggtttcgaagatggtgtgatagtggaacaaggatcccactcggagctgatgaagaaagaaggcgtttactttaagctggtgaatatgcaaacttcgggatcgcaaatccagtctgaagagttcgagctcaacgacgaaaaggcagctactcggatggcaccaaacggatggaaatctcgtctgttcagacatagcacgcaaaagaaccttaagaactcgcagatgtgtcagaagtcacttgacgtggaaaccgacggactcgaagcgaacgtgcctcccgtttcctttcttaaggtgctgaagctgaacaaaactgaatggccctactttgtggtgggaaccgtgtgcgcgatcgcaaacggtggacttcaacccgcatttagcgtaatcttctccgaaatcatcgcaattttcgggcctggggatgatgccgtgaagcagcaaaaatgtaatatctttagcctgatctttctctttctcggcatcatttcatttttcaccttttttctccagggttttacgttcggaaaagccggtgaaatccttacgcgacggctgcgaagtatggctttcaaggccatgctgcggcaggacatgtcatggtttgatgatcataagaactcgacgggcgcactgagcacccgacttgcgaccgatgcggcacaggtgcaaggtgcgaccggaacgcgtcttgcactgatagcgcagaacatagcgaatctgggaaccgggattatcatttcctttatctacggatggcaacttactcttttgcttcttgcggttgtgcccatcattgccgtgagcggtattgtcgaaatgaagctgctggcaggaaatgccaagagagacaagaaggagctggaagcggcaggtaaaatcgctactgaagccatcgaaaacatcaggactgtcgtgtcgcttacccaggaaaggaagtttgaaagcatgtacgttgagaagctgtacgggccataccgcaattcagtgcagaaagctcacatatatggaataactttttcaatttcgcaagcattcatgtacttctcgtacgccggatgctttaggttcggagcgtaccttattgtgaatggacatatgcggttcagggatgttatacttgtgttcagcgcaattgtgttcggtgcggtggcattgggacacgcctcttcgttcgcacctgattacgccaaagcgaaactgagcgccgcccaccttttcatgctttttgaacgccaaccacttatagattcttacagcgaggagggacttaagccagataagttcgaaggtaacatcacctttaacgaagttgtgttcaactaccctaccagagccaatgtccctgtgctccaaggactctccctcgaagtgaaaaagggacaaacgctggccctggtcggatctagcggctgcggaaaaagcacggtggtgcaacttctggagcgtttttacgatccacttgccggtaccgtctttgtggacttcgggttccaacttctcgacggtcaggaagcaaagaaactgaacgtccagtggctgagggcgcaattgggaattgtgtcccaggaaccaatacttttcgactgttcgattgcagagaatatcgcatatggtgacaattcccgcgtggtgtcccaggatgagattgtgtctgccgcaaaggctgccaatattcatccgtttatagaaactcttcctcataagtacgaaactcgcgtcggagataagggaactcagctttctggaggccaaaagcaaagaatcgcaattgcgcgcgccctcatacgccagccacagattctgctgctggacgaagcaacgtctgcactcgataccgaatcggagaaggtggtccaggaagcactcgacaaggcacgagaaggtcgcacctgtattgtgattgcacacagactgagcaccattcaaaacgcagacctgattgttgtttttcaaaatggcagagtgaaggaacatggcacccatcagcagctgctcgcacaaaagggcatttacttttcgatggtttccgtacaggccggcactcagaacctc

SEQ ID NO: 200271 - DNA, 3858 bp, Artificial Sequence
  derived and/or modified sequence
atggacctcgaggccgctaagaacggcaccgcctggcgaccaactagtgccgagggcgacttcgaattaggcatttcgtcaaaacagaagcggaagaaaacaaagactgttaagatgatcggggtgttgacccttttcaggtactctgactggcaggacaagctgttcatgagcctcggcacaatcatggccattgcgcacgggtcaggcctaccgttaatgatgatagtattcggtgaaatgactgataaatttgtggacacggccgggaacttctccttcccagtgaacttctccctatctctcctcaatcccggtaagatcctggaggaagaaatgacccgatatgcgtactattacagcggcctgggagccggagtgctggtggccgcgtacatccaggtctccttctggactctggctgctggccgacagattcgaaagatcaggcagaaattcttccacgccatcctgcgacaggagatcgggtggtttgatattaacgatactaccgagctcaacaccagactaaccgacgacatttctaagatcagcgaaggaatcggggacaaagtgggtatgttttttcaggcggttgctactttcttcgctgggtttatcgtcggctttatcaggggatggaaactgacacttgtgatcatggctatttcaccgatacttgggctaagcgccgctgtttgggccaaaatcctcagtgcattttccgacaaagaattggcggcctacgctaaggcaggcgcagtcgccgaggaagcactcggcgccattaggactgtgatcgcatttggaggacagaataaggagctggaacgctaccagaagcacctggaaaatgccaaagaaatcggcatcaaaaaagctattagcgcaaacattagcatgggcatcgccttcctgcttatctacgctagctatgctttagctttctggtacggctcaactctggttatcagcaaggagtacactattggaaatgccatgacggtgttcttctcaatcctgatcggggccttctccgttggccaagcagcaccatgcatcgatgcgttcgccaacgcaaggggcgcagcttacgttatcttcgacatcatcgacaataaccccaagatcgattccttctctgaaagagggcataaacccgacagcatcaaggggaaccttgagttcaacgatgtacatttctcttatcccagccgcgctaatgtaaagatactaaaaggcttaaatctgaaagttcagtcaggccagaccgttgcgctcgtaggttcttcgggttgcggtaaaagtaccacggtccaacttatccagagactctatgatccagacgaaggcacaataaatattgacggccaagatattagaaactttaatgtcaattacttaagggagattatcggagtggtctcacaggagccggtgctattctccactacaatcgcagagaacatctgctacggacgaggcaacgtcactatggatgaaattaagaaagccgtgaaggaagccaacgcatatgagttcatcatgaaattaccccaaaaattcgataccttagtcggcgagaggggcgctcaactttccggtggccaaaagcaaagaattgccatcgcaagagcactcgtccggaacccgaaaatccttctgctggatgaagccacgagcgccctggacaccgaaagcgaggcagaggttcaagcggcactcgataaagctcgagagggtaggactactatcgtcattgctcacaggctcagcacagttcgaaacgctgatgtcatcgctggcttcgaagacggcgttatcgtggaacagggcagccactcagagctcatgaagaaagaaggcgtttactttaaactggtgaacatgcagacttctggctcccaaattcagtccgaagagttcgagctgaatgatgagaaagctgcgaccaggatggcacccaatgggtggaagagcaggctttttcgccactctactcagaagaacctaaagaactcgcagatgtgtcagaaaagtctggatgtggaaactgacggcctagaagccaatgttcccccagtgagttttttgaaagtgctgaagctgaataagactgagtggccatacttcgtggtgggaaccgtctgcgctatagctaatggcgggctccagcccgcctttagcgtgatcttttccgaaattatcgccatcttcggacccggagatgatgcagtgaagcagcagaaatgtaacatcttctccttgatcttcttattccttggaatcatcagttttttcaccttcttcctacaggggttcacatttggcaaagcaggggaaatcctgaccaggaggctcaggtcgatggccttcaaagctatgctgaggcaggatatgtcatggtttgatgatcacaagaactcgaccggcgcactgtccaccaggttggcaacagatgctgcacaggtgcagggcgccactggtacgcgactcgcactcattgcccagaacatcgctaatctggggactggtatcataattagctttatctatgggtggcagctgacactgctgctactagccgtggtgcctattattgctgtctctgggatcgtggaaatgaagctattagccggcaatgccaagagggacaaaaaggagcttgaagcggccggtaagatcgcgactgaagccattgaaaatatcaggactgtggtgagcctgacccaggagagaaaattcgaaagtatgtacgtagagaagctctacgggccttatagaaactccgtgcagaaggcacatatctacggaattacattctcaattagccaggcttttatgtatttcagctacgcaggttgcttcagattcggcgcttacctgatcgtgaatggccatatgagattcagagatgtgatcctggtgttttcggctatcgtgtttggtgcggtggccctgggccacgcatcaagtttcgctccagactacgcgaaagctaaactctctgcagcccatctgtttatgttgtttgaaaggcaacctctgatagatagctacagcgaggaaggtctcaaacccgacaagtttgagggaaacatcaccttcaacgaggttgtctttaactacccaaccagagcaaacgtgcccgtgctgcagggcctgagcttggaggtgaagaagggacaaaccctggcactcgtcggctcctccggatgcgggaagtcaaccgtcgttcagctgttggagcgcttctacgacccgctggccggcactgtctttgtggacttcggcttccagctactcgatggccaggaggctaaaaaactgaacgtgcagtggcttcgagcgcagctcggcattgtgagtcaggagcccattttattcgactgttctatcgcagagaatatagcctacggagacaattcgagggtggtgagtcaggacgaaatcgtttcagccgcaaaagccgccaatattcacccattcattgaaacattgccccataagtacgaaactcgagtaggtgacaaggggactcagctgtccggaggacagaagcaacgaattgctatagcaagagctctgattcgccagccgcagatcctgctgctcgatgaggcaacaagcgcgctggatacagagtccgaaaaagttgtgcaagaagctttagacaaggccagggaagggcgaacatgcatagtaattgcacacaggctgtcaacaatccagaatgctgatctgatcgtggtgtttcagaacgggcgtgtcaaagagcacgggacacaccagcagctcctcgcccagaaaggcatctacttctcgatggtatcagtccaggcaggaacgcaaaacctg

SEQ ID NO: 200272 - DNA, 3858 bp, Artificial Sequence
  derived and/or modified sequence
atggacttggaagcggctaaaaatggaactgcatggaggcctacatcagccgaaggagacttcgagctcggaatttcctccaagcagaaacgcaagaagactaagacggtgaagatgattggagttttgactctgtttaggtactctgattggcaggacaaacttttcatgtccttgggcacgatcatggcaatcgcacatggttcaggcctgcctttgatgatgattgtgttcggtgagatgactgacaagtttgttgataccgctggtaactttagttttccagtcaattttagcctgtcccttctgaatcctggtaagatccttgaagaagaaatgacacgctacgcatattactattcaggtctcggcgctggagtcctcgtcgctgcttatatacaagtgtctttttggaccctggcagcaggcagacagattaggaaaattcgccagaaattcttccatgcaatcctcaggcaggagataggttggttcgacatcaacgacaccaccgaattgaataccaggctgacagacgacatctcaaagatctccgagggtattggagataaagtgggtatgtttttccaggctgtggctactttcttcgcgggttttattgtgggcttcatccgcggttggaagttgacactggtcattatggcaattagccccatcctgggcttgagtgctgctgtgtgggcaaagatactgagtgccttctccgacaaggaactcgctgcttacgccaaggcgggagccgtggcggaagaggcattgggtgccatcaggaccgtcatcgcttttggcggccagaataaagagctggaacgctaccagaaacatctggagaacgccaaggaaattggcattaaaaaagccattagcgcaaacatttctatgggtatcgcttttttgctcatctatgccagctacgctctggcattctggtacggtagcactttggtaatctccaaggaatacactataggaaatgctatgaccgtattcttttctattcttatcggcgctttttctgtgggccaagccgcgccgtgcattgacgcctttgccaatgcgcgcggcgcggcgtatgtgattttcgacataatcgataacaacccaaaaatcgacagcttcagcgaacgcggacataaacccgactcaatcaagggcaacctcgagttcaatgacgtgcacttctcttacccgagccgcgcgaatgtcaaaattctcaagggactgaatctcaaggtacagagcggtcaaactgttgccttggtgggcagctctggttgtggcaaatccacaaccgtgcagctcatccagagactgtatgatcccgacgagggaactattaatatcgacggacaggatattaggaacttcaacgtcaactacctgcgcgagattatcggtgtggtatctcaggaacccgtgctgttctccaccacaatagcagaaaatatatgttacggccgcggaaacgtgacaatggacgagattaagaaagccgtcaaggaagccaacgcatatgaattcatcatgaagcttccccagaaatttgacaccctcgtgggagaaagaggagcacaactgtctggaggtcagaagcaaagaattgcgattgcaagagctctcgtgcgcaacccgaagattctcttgctcgatgaagccacttctgccctggataccgaaagcgaggcggaagttcaggccgcactggataaggctcgcgagggacgcaccaccattgtcatagcccacaggctctccaccgtgaggaacgctgatgtgatcgctggattcgaggacggcgttatcgtcgagcagggctcacacagcgaactgatgaagaaagagggagtgtatttcaagttggtgaacatgcagacgtccggtagccagattcagagtgaagagtttgaattgaatgatgagaaggctgccactcgcatggctcctaacggctggaagtccaggcttttcagacactccacccaaaagaacctcaaaaacagccagatgtgccagaaatccctcgatgtcgaaactgacggtctggaggcgaacgtgccaccagtgagtttcctcaaggtgctcaaactcaacaagacagaatggccttatttcgttgttggaactgtctgtgctattgcgaatggtggcttgcaacccgcgttcagtgtaatcttcagcgagatcatagctatcttcggtccaggtgacgacgcagtaaaacagcaaaagtgtaacattttcagtctgattttcttgttcctgggcatcatcagcttcttcactttcttcctgcaaggtttcacattcggtaaggcaggtgagatattgaccagacgcctgcgcagtatggccttcaaagccatgctgcgccaggatatgagttggttcgacgaccataagaatagcactggagcgttgtccacgaggctcgctaccgacgcggctcaggtgcagggtgctactggaaccaggcttgctctcattgcccaaaacattgctaacctgggcactggcatcatcatctcctttatttacggttggcaactcacccttcttttgctcgctgtcgtccctatcatcgccgtgtccggaattgtcgaaatgaaattgctggcgggaaacgctaaaagggacaaaaaggaattggaagcagccggtaagattgcaaccgaagcaatcgaaaacattagaaccgtagtgtccctcacccaagaaaggaagtttgaatccatgtacgtggagaaattgtatggcccgtatcgcaactctgtgcagaaggctcacatttacggtatcaccttctccatctcacaagcttttatgtacttctcctacgccggttgcttcaggtttggtgcatacctgatcgtgaatggccacatgaggtttagagacgtcattctggtatttagtgcgattgtcttcggcgcggtggctctcggccacgcatctagcttcgccccagattatgctaaggctaagctgtcagcggcccaccttttcatgttgtttgagcgccagccgctgatcgattcttacagcgaagagggcctcaagccggataagttcgagggtaatattacattcaacgaggtggtctttaattaccctacaagagctaacgttcctgtcctccagggtctctcactcgaggtcaaaaagggccagaccctcgctctggtgggtagtagtggatgcggtaaaagcaccgtcgtccagctgctcgaacgcttttacgaccccttggcgggaactgtgttcgttgattttggtttccagctgctggatggtcaggaagccaagaaactcaatgttcaatggctgagggcccaactgggaatcgttagccaagagcctattctgtttgattgcagcatcgctgagaacatagcttatggtgacaattctcgcgtcgtatctcaggatgaaatcgttagcgccgccaaggcggctaacatccacccttttattgagactttgccgcataaatatgagacgagagtgggagataagggaacccagctctctggaggccagaagcaaagaatcgcaatagcgcgcgccctcatcagacaacctcaaatactcctcctggacgaggctacttctgccctcgacactgaatctgagaaggtcgtccaagaggctttggataaagcgcgcgagggtcgcacctgcatcgtcattgctcaccgcctgtcaaccatccagaacgcagatctgattgtcgtgttccagaacggaagagtgaaggaacacggtacccatcaacaactgctggcacagaaaggaatctacttcagcatggtatcagttcaggccggtacacaaaacctc

SEQ ID NO: 200273 - DNA, 3858 bp, Artificial Sequence
  derived and/or modified sequence
atggatctcgaggctgctaagaacggaaccgcgtggaggccgactagcgccgagggagacttcgagctcggcatctcgtccaagcagaaacggaaaaagaccaagactgtcaagatgatcggagtgctcaccttgttcagatactcggactggcaggacaagctcttcatgtcccttggcaccattatggcaatcgcccacggatccggactgcctctcatgatgatcgtgttcggggaaatgactgacaagttcgtcgatactgcaggaaacttttccttcccggtgaacttttcactgagcctccttaatccgggcaagatactggaggaagagatgacgcggtatgcgtactactactcgggcctcggcgccggtgtgctggtcgctgcatacatccaagtgtctttctggactttggcggcgggtcgccagatccgtaagatcagacagaagtttttccatgccattctgaggcaggaaatcggctggttcgacatcaatgatactaccgagctgaataccagactcactgatgacatctcgaagatctccgagggcatcggcgacaaggtgggcatgttcttccaagccgtcgcaaccttcttcgccgggttcatcgtgggttttatcagaggatggaagctgaccctggtcatcatggctatctcccctattctgggcctgtcggccgccgtgtgggccaagatcctcagcgcgttctccgacaaggagttggcagcctacgcgaaggccggagccgtggccgaggaagccctgggagcaattaggaccgtgatagcatttggaggtcagaataaagagttggaacgctaccaaaagcaccttgaaaacgctaaggagattggtataaagaaggccatctcggccaacatatccatgggaattgcatttttgttgatctacgcttcctacgctcttgccttctggtacggaagcaccctggtgatcagcaaggagtacaccattggaaacgctatgactgtgttcttttcgatcctcatcggagccttcagcgtgggccaggcggcaccatgcatcgacgcgttcgcgaatgcaagaggggcagcctacgtgatcttcgatatcatcgacaataacccgaagatcgattccttcagcgagagaggacataaaccggactcaattaagggaaatctcgagttcaacgacgtccactttagctacccgagcagagccaacgtcaaaatcctcaagggcctgaacctcaaggtgcagtcggggcagactgtggcactggtgggctccagcggatgtggaaagtctaccacggtgcagctgatacaacgcctgtacgacccggacgaaggaacgattaacattgacggacaggacatccggaatttcaacgtgaattacctccgggaaatcattggagtcgtcagccaagaaccggtgctctttagcactactatcgctgagaacatatgctacggacggggcaacgtgactatggatgagatcaagaaggcagtgaaggaagccaacgcgtacgaattcatcatgaagctcccccagaagtttgacactctggtgggggagaggggagctcagctctcgggtgggcaaaaacaacgcatcgcaatcgcacgggcgcttgtgcgcaacccaaaaatcctcctccttgatgaagctacgtcggccctggataccgaaagcgaagccgaggtccaggcggctctggacaaagctcgggaaggaagaaccaccatcgttatcgctcaccggttgtcgaccgtccgaaatgcggatgtgattgccggatttgaagatggggtgatcgtggaacaaggatcacactcggagctgatgaagaaggaaggagtctacttcaagctggtgaacatgcaaacgtcgggcagccagatccagtcagaagaattcgagctcaatgacgaaaaggccgccactcggatggcgccaaacggatggaagagtcgcttgtttcggcactccacccagaagaacttgaaaaactcacagatgtgccagaagagtctggatgtggagactgacggacttgaagcgaatgtgccgccggtgtccttcttgaaggtcctcaaactcaataagactgagtggccgtacttcgtggtcggaactgtgtgcgccatcgccaatggtggactgcaaccggcgttcagcgtgatcttctcggaaatcatagccatctttggacctggcgatgacgccgtgaaacaacaaaaatgtaacattttctcactgatcttcctctttctgggaataatcagctttttcacgtttttcttgcaggggttcactttcgggaaagccggagaaatcctgaccagaaggctgcgcagcatggcattcaaagccatgctgcggcaggacatgtcgtggttcgacgatcataagaattcaaccggagccctgtcgacccggctcgcaaccgacgccgctcaagtgcagggcgccacgggcacccgcctggctctgatcgcccagaatatcgccaatcttggcactggcattatcatctcgtttatctatggatggcagctcacccttctgctgctggctgtggtcccaataatcgcagtcagcggtatcgtcgaaatgaagctgctggcgggaaacgcgaaacgagacaagaaggaactggaagcggctggaaagattgccactgaagccatcgagaatatccggaccgtggtttcgctgacccaagaacggaagtttgagagcatgtatgtcgagaaactttacggcccctacagaaactcggtgcaaaaggcgcacatctatggaatcacctttagcatctcccaggcattcatgtacttctcctacgctggatgcttccgcttcggagcgtacctgatcgtgaacggtcacatgaggttccgggacgtcatcctggtgttctcagcaattgtgttcggagcggtcgcgttgggacatgcctcgtcattcgcgccagattacgccaaagcgaaattgtcggcagcacacctgttcatgctcttcgaacgccagccactcatcgattcatactcagaagaaggtctgaagcccgataagttcgaaggcaacatcacttttaacgaagttgtctttaactacccgacgagggcaaatgtgcctgtgctccagggtctgtcgcttgaggtgaaaaagggccagactttggcgctggtggggagctcggggtgcggaaagtccactgtggtgcagctgctggagcgcttctacgatcccctggctggaaccgtgtttgtcgacttcggtttccagctgctggacggtcaagaggctaagaaactgaacgtgcaatggctgcgcgcccaactgggtatcgtgtcacaagagccgatactgttcgattgctcaattgccgaaaacattgcatatggagacaattcccgcgtagtgtcccaagatgaaatcgtttccgcagccaaggccgctaacatccacccgttcatcgagactctgccacataagtacgagactcgggtgggggacaaaggaactcagctctccggaggacagaagcaacggattgccattgcgagagccctgattcgccagccgcagatcctgctcttggatgaagccacttccgctctggacaccgaaagcgagaaagtcgtgcaggaagctctggataaagccagagagggtaggacctgtatcgtgatcgcacatcgcctgtccaccatccagaacgcggacctgatcgtggtgttccaaaatggccgcgtgaaggaacatggcactcatcagcaactgctggcccagaagggaatctacttctcgatggtgtccgtgcaggcagggacccaaaatctg

SEQ ID NO: 200274 - DNA, 3858 bp, Artificial Sequence
  derived and/or modified sequence
atggacctggaggctgctaaaaatggaactgcatggcggccgacatcagccgaaggtgacttcgagttaggaatttcaagcaaacagaagcggaagaagacgaagacagtgaagatgatcggagtcctgacccttttccggtactccgattggcaggataaactttttatgtccctgggaactataatggccatcgctcatgggtcgggcctccctctgatgatgatcgttttcggggagatgacagataagttcgtggatacagctggaaacttctccttccctgtcaatttcagcctatccctgctcaaccccggtaagatccttgaagaggaaatgaccagatatgcctattattattcagggctgggggctggggtgttggtcgcggcttatattcaggtgtccttctggacccttgccgcagggaggcagataaggaaaatcagacagaagttctttcacgccatcttgcggcaggagatcggatggtttgatataaacgataccaccgagctgaatacgaggctgacagacgacattagtaagatcagcgaggggattggagataaggtaggtatgttcttccaggctgtggctacttttttcgcaggctttatagttgggttcatcagagggtggaaactaacgctagtcattatggctatcagccctatcctaggactgagcgctgccgtgtgggctaaaatcttgtcggcgttctctgataaagaattggccgcgtatgcgaaggccggagcggtagctgaggaggctctgggagctattagaacagtaatcgcctttggcggccagaacaaggaactggagcggtaccagaagcaccttgagaacgcaaaggagataggcattaagaaggcgatttctgcaaacatttccatggggatagcatttctcttgatctacgcttcttatgctctggcgttctggtacgggagcactctggtgatatcaaaagaatacacaatcggaaatgcaatgacagtgttttttagcatcctcatcggggctttcagcgtcgggcaggcagccccgtgcatagacgcctttgctaacgcccggggcgcggcctatgtgatttttgacatcatcgataataacccaaaaattgacagcttctctgaacggggacacaaaccagacagcatcaaaggcaacctggaattcaatgacgttcacttttcttaccctagcagggcaaatgtgaagattctgaaagggctcaacttgaaagttcaatcagggcagactgttgccctggttgggtcatcagggtgcgggaagtccaccactgtacagctgatacaaagattgtatgaccctgacgagggtaccatcaacatcgacggccaggatattagaaattttaacgtgaactacctgcgtgaaatcatcggggtggtgtcccaagaacccgtcctgttttctacaactatcgctgaaaatatttgttacggccgtggcaatgtcacaatggacgaaattaaaaaggctgtgaaagaagcaaacgcctatgagtttattatgaaactcccacagaagttcgacactctggttggcgagcgaggggctcagttgagcggcgggcaaaagcagaggatagcaatcgcccgcgccttggtgcggaaccctaagatactattactggacgaggctacctctgcactcgacaccgaaagcgaggccgaagttcaggctgctctcgataaagccagggagggacggacaaccatcgttatcgcccaccggctctccactgtcaggaacgccgacgtcatagccggatttgaggatggtgtgattgtcgagcaagggtcacactccgagttgatgaaaaaagagggcgtttattttaagctagtgaacatgcagacgtcaggttcgcagattcagtctgaggaatttgagctgaatgatgagaaagccgctacgcgtatggcgccaaacggttggaagagccgactcttccggcattcaacccagaagaatctcaaaaactcacagatgtgccaaaaatcactagacgttgagactgatggactggaggcaaacgtgccaccggtatcattcctcaaggttctgaagttgaacaagacagaatggccttattttgtcgtcggcaccgtctgcgctatagccaatggagggctgcagcccgccttcagcgtgatttttagtgaaataattgctatcttcggccctggggatgatgccgtaaagcagcaaaagtgcaatatcttttctcttatcttcctgttcttaggcatcatttcctttttcacattcttcctgcaagggtttacctttggtaaagccggcgagatactgacccggaggctgaggtcgatggcattcaaggcaatgctgcgtcaggacatgtcttggtttgacgatcacaagaacagtactggagctctgtccactcggttagcgacagacgctgctcaagtacagggggccacgggaacgagattggcccttattgcccagaacattgctaacctcggaacaggcattatcatctcatttatttatgggtggcagctaacattgctgctgctcgccgttgtgcctatcatcgctgtgtccggcatagtcgaaatgaaactgctggcaggcaatgcaaaacgggacaagaaggagcttgaggccgctgggaaaattgctaccgaggccatcgagaatattagaacggtcgtttccctgacccaggagcgtaaattcgagtctatgtacgtggagaagctgtacggaccgtatcgaaacagtgttcaaaaggcccacatttatggaatcactttttccatcagccaggccttcatgtatttcagttacgcaggatgtttcagattcggtgcctaccttattgtgaatggtcatatgcggttccgggatgttatcctggtgttctcagccatcgtcttcggggctgttgcgttgggacacgcatccagttttgcacccgattatgctaaggccaagctgtcagccgctcatctgtttatgctgttcgaacggcagcccctcattgactcctactcagaggagggcctcaaacctgacaagttcgaaggcaacataacttttaacgaggtggtgttcaattatcctacaagagccaatgtgccagtcctccaaggactttctttggaagtcaagaaggggcagactcttgccctggtgggatcctcagggtgcggcaaaagcaccgtggtgcagttactggaacgcttctatgacccactcgcggggaccgtctttgtcgatttcgggtttcagctcctggacggtcaggaggctaagaaattgaatgttcagtggctgcgagcccaacttggaattgtttctcaggagccaattcttttcgattgtagtattgccgagaacattgcgtacggcgacaattctcgcgtagtctcacaggatgagatcgtgtcagctgcgaaagctgctaacattcacccatttatcgagactctgccgcacaagtacgagactagagtgggtgataaggggacacagctgtctggcggtcaaaagcaaaggattgcgattgctcgcgcattgattagacagccccagatcctactccttgacgaggctacaagcgcacttgacaccgagtcagagaaggtggtacaggaagcgctggacaaggcaagggaagggcgaacctgcattgtcattgctcatcgactatccacaattcagaatgccgacctcatcgtcgtgttccagaatggcagagtaaaagaacatggaacccaccaacagctgttggcccagaagggaatctactttagtatggtgtcagtccaagccgggacccagaatctg

SEQ ID NO: 200275 - DNA, 3858 bp, Artificial Sequence
  derived and/or modified sequence
atggatctggaagcagcaaagaacggcaccgcatggcgcccaacgtctgccgagggtgattttgagctcggcatttcgtccaagcaaaagcgaaagaaaaccaagaccgtgaagatgatcggtgtgctgaccctgtttagatactcggactggcaagacaaactcttcatgtcactgggaacgattatggcgatcgcacatggtagcggcctgcctctcatgatgattgtgtttggggaaatgactgataagttcgtcgacactgcaggaaatttctcattcccagtgaacttctccctctcactgcttaatccaggtaagatccttgaagaagagatgactcggtatgcatactactactcgggactcggagcaggagtcctggtcgcggcttacattcaggtttcattctggacccttgcagcaggaaggcaaatccgaaagatccgccaaaagttctttcatgcaatcctccgtcaagaaattggctggtttgatatcaacgacaccactgagcttaatactagacttactgatgatatatcgaagatttcggaaggaattggggataaagtgggaatgttcttccaggccgtggccacctttttcgcaggattcatcgtcggtttcatccggggctggaagttgactctcgtgatcatggcaatctccccaattctgggactctcagccgcagtgtgggcaaagattctgagcgcgttttccgacaaggagttggcagcgtacgcaaaggccggagcggtggcagaggaggcgctgggagcaattagaaccgtcatagcatttggcggtcagaacaaagaactggaaaggtaccagaaacatctggaaaatgcaaaggagattggaattaagaaagcaatttcggctaacatatccatgggtattgcattccttttgatctacgcgtcatacgcacttgctttttggtacggttccacccttgtcatttcaaaagaatacactattggaaatgcaatgaccgtctttttctcgatcctgataggagccttttcggtggggcaggccgcaccgtgcattgatgcattcgcaaacgcccggggagcagcctacgtgatttttgacatcatagataacaacccaaagatagattcatttagcgaaagaggtcataagcctgacagcattaagggaaacctggagtttaatgacgtccacttcagctatccttcccgggccaacgtgaagatccttaagggtcttaatcttaaagttcagtcaggccagactgttgcgctggttgggtcgtcgggctgcggtaaaagcaccaccgtccagcttattcagcgactttacgatcctgatgaaggaaccattaacattgacgggcaagatattcggaatttcaatgttaactacctccgagaaatcataggggtggtgtcacaagaaccagtgctcttttcaaccacgattgcagaaaacatctgttatggccgcgggaacgtgactatggatgagattaagaaagccgtgaaggaggcaaacgcatacgaattcatcatgaagctccctcaaaagtttgacacgcttgtgggggagagaggagcacaactgtcaggaggccaaaaacagcgaatcgcaatcgcccgagccctggtccgtaacccgaagattcttctcctggatgaggccacttccgcccttgacactgaatccgaagcagaggtccaggcagccctggacaaggcacgcgagggccgcaccactatcgtgatcgcccatcggctttccaccgtccggaatgcagatgtgatcgccggtttcgaagatggtgtcattgtggagcaagggtcacattccgaacttatgaagaaggaaggggtctacttcaagttggtgaatatgcaaacctcgggtagccagatccaatcagaagaattcgaactcaacgatgaaaaggccgcaactagaatggcacccaacgggtggaagtcgagattgttccgacattcgacccaaaagaatctgaagaattcccaaatgtgtcagaagtcactggatgtcgagactgatggacttgaggccaacgtgcctcctgtcagctttctgaaggtcctgaagctcaacaaaactgagtggccttactttgtggtcggcaccgtgtgtgctatcgcaaacggcggactccaaccagcgttttccgtgatcttttccgagattattgcgatattcggacctggagacgatgcggtgaaacaacagaagtgcaacatcttttctctgatttttctttttctgggtataatctcgtttttcacttttttccttcaaggtttcacttttgggaaggcgggagagattctgacccggcgccttcgttccatggcctttaaagcaatgctccggcaggacatgtcatggtttgatgatcataagaactcgactggagcactcagcaccagactcgccacggatgcagctcaggtccaaggggctaccggcactcgcctggcactcattgcacagaacattgccaatctgggtactgggattatcatctcgttcatctacggatggcagctgacccttttgctgctggccgtggtccccattatagccgtttcaggtattgtggagatgaagctcctggcaggtaacgcaaaacgggacaagaaagaacttgaggccgccgggaagatcgccaccgaagcaattgagaacatccgcactgtcgtgtcactgacgcaggaacggaaattcgaatccatgtacgtcgaaaagttgtacggaccctacagaaactccgtgcagaaggcgcacatctacgggataactttctcgatttcccaggcttttatgtacttctcatacgcgggctgctttcgctttggagcatacctgatagtgaatgggcatatgcgctttagagacgtgattctggtgttctccgccattgtgtttggcgcagtcgcactcggtcacgcatcgtccttcgcaccagactacgcgaaagcaaagctctcagcagcacatctcttcatgctgtttgaacggcagccccttatcgatagctacagcgaagaaggtctgaagcccgataagtttgaagggaatatcacctttaatgaggtggtctttaactaccctacccgtgcaaatgtgcctgtgcttcagggactcagcctcgaggtgaagaaggggcaaaccctggcactggtcggttcgtcagggtgcggtaaatcgactgtcgtgcaactgcttgagcggttctatgatcctctcgcaggaactgtgtttgtggactttggatttcagctgttggatgggcaagaggcaaagaagctgaatgtgcaatggttgagagcacagcttggtattgtcagccaggaaccaatcctctttgattgttcaatcgcagagaacatcgcctacggagataactcccgcgttgtctcgcaggatgagatagttagcgccgccaaggcagcaaacattcaccctttcatcgaaaccctgcctcataagtacgaaactagggtgggtgacaaaggtactcaactctccggaggacagaagcaaaggattgcaatcgctagagcgttgatccgccaaccccagatcctgcttcttgatgaggcaacctccgcactggacactgaatcagaaaaggtcgtgcaagaagcattggataaggcgagagagggacgcacttgtattgtgattgcacacagactgtccactattcaaaacgcggatctgatcgtggtctttcaaaatggtcgcgtgaaggaacatggtacccatcagcagctgctcgcgcagaagggcatctacttttcaatggtcagcgtgcaggcaggaactcagaacctg

SEQ ID NO: 200276 - DNA, 3858 bp, Artificial Sequence
  derived and/or modified sequence
atggatctagaggcagccaagaacggcaccgcttggcgccccacctccgcagaaggggattttgaactgggaatcagtagcaaacagaaaaggaagaagaccaagactgtgaaaatgataggggttttaacgctttttagatattccgattggcaggacaaattattcatgtcacttgggactattatggccatcgcccacgggtccggtctgcctcttatgatgatcgtctttggagagatgaccgacaagtttgtcgataccgcaggaaatttcagctttcccgtgaatttttctctgagcttactgaatccaggcaagattctggaagaagagatgactcgctatgcgtattattatagcggcttgggcgctggggtgctggtggccgcatatatccaggtatccttctggaccctggccgccgggcgacagataaggaagatcagacagaaatttttccatgccattttacgacaggagattgggtggttcgatatcaacgatactacagaattgaatacacgtctgacagatgatatttcgaagatctccgagggtataggcgataaagttggcatgttctttcaggctgtggctacgttttttgccgggtttattgtaggattcatccgaggatggaagcttacccttgtgatcatggccatctctcctatcctgggactgagcgccgcagtatgggcaaaaatactctcagccttttcagataaggagctggccgcttacgccaaggccggggccgtggccgaagaagctctgggtgccattcggaccgtgattgccttcgggggccagaataaggaactagagcggtatcagaaacatctggaaaacgcgaaggagattggaatcaagaaggccattagcgccaacatctcgatgggaattgcgtttttattgatctatgccagctatgctctggccttctggtacggctcgaccctggtgatctccaaggagtacactattggcaatgcaatgacggtgttcttcagtattctgataggcgcatttagcgtgggtcaagcggccccctgcatcgatgccttcgccaacgcgcgcggcgcagcctatgtgatcttcgacattattgataacaatcccaaaattgatagcttcagtgaacggggacacaagcctgactcaattaaggggaatttggaattcaatgacgtgcatttctcataccccagtcgggccaatgtgaaaatacttaagggcctgaatctgaaagtccagtctggacagaccgtggctcttgtcggcagtagcggatgcgggaaatctacaacagtacaattaatccagagattatatgatcctgacgaaggcaccattaatatcgatggccaggacatcagaaactttaacgtgaactacctgcgcgagattatcggagtggtgagccaagagcccgttctgttttcgaccacaatcgccgagaacatctgctacggtcgagggaatgtgaccatggacgagattaaaaaggcagtgaaagaggccaacgcgtacgagttcattatgaagctgcctcagaaattcgacactcttgtcggcgaaaggggcgcccaactttctggcggacagaagcagcggatcgctatagcccgggccttggtgcgaaatcctaagatccttttgttagacgaagccacatccgctttggacacggaatcagaggcggaggtccaagctgcactggataaggctcgagaggggcggacgaccatcgtaattgctcatagattgagcacagtgcgcaatgcagatgttatcgcagggtttgaggatggtgtgattgtcgagcaggggagccatagcgagttgatgaaaaaggaaggcgtttacttcaagctggtgaatatgcagactagtgggtcgcaaattcaaagcgaggagttcgaactcaatgatgaaaaagctgctactcgcatggcccccaacggctggaagagccgactgtttagacattccacgcaaaagaatctgaaaaattcacaaatgtgtcagaaatcactcgatgtcgagactgatggattagaagctaacgttcctccggttagtttcctgaaagtactcaagctgaataagaccgaatggccctattttgtggtgggcacggtgtgcgctatcgctaacgggggcttacaaccagcgttttccgttatcttctctgagattattgccatcttcgggcccggggacgacgctgtgaaacagcagaaatgcaatattttctccctgattttcctgttcctgggaattatctcctttttcacctttttcctgcagggattcacattcggaaaagctggggagatcttaacacgccggctgagatcgatggcctttaaggctatgctcagacaggacatgagctggttcgatgaccacaaaaattccacaggggccctgagtactcgcctggccaccgacgctgcccaggtgcagggggctacaggaacaagactcgcactcatcgctcagaacattgcgaatcttggaaccggcattattatctctttcatttacggatggcaacttactctgctgctcctcgctgttgtacccattatagcagttagcggcattgtggaaatgaagctgttggcagggaacgcaaaaagggataagaaggagctagaagctgccggcaagatagcaacagaagccatagagaacattcggacagtggtgagcttgacacaggagaggaagtttgagagtatgtacgtggagaaactgtatggcccatatcgcaactccgtccagaaagcacacatctacggtattactttctccattagtcaggcctttatgtacttcagctatgctggctgcttcagatttggcgcctacctcattgtgaacggtcatatgcggttccgtgacgttattctggttttctctgctattgtcttcggtgcggtcgccctgggccacgctagcagctttgctcctgattatgccaaggcaaagctcagcgccgctcacctgttcatgctgttcgagagacaacccctcatcgattcatatagcgaagaaggtctcaaacctgacaagttcgagggaaatattacctttaatgaagtggtgttcaactatccaacccgggcgaacgtaccagtgctgcagggattgtcgctcgaagtgaaaaaaggtcagaccctggccctggtcggctcttctggctgtggtaagtccactgtggtgcagctgttggaaaggttttacgatcccttggccggtacagtgttcgtggatttcggattccagctacttgacggacaggaggcgaagaaactcaatgtccagtggctgagggctcagctgggcatcgtgagccaggaacccatcctttttgactgttctatcgccgagaatatcgcatacggagacaactcacgagttgtgtctcaggatgaaatcgtctcagcggcaaaagccgccaacatccatccttttattgagacacttcctcataaatacgagaccagagttggcgataaaggaacccagctcagcggggggcagaagcaacggattgccatagctagggcccttatacggcaaccccagatcctgttgctggatgaggccacatctgccctggacacagagtctgaaaaggtggtgcaggaagccctcgacaaggcacgcgaaggccgtacgtgcatcgtcatagcacaccggctgagcaccatacagaacgccgatctgattgtcgtgttccaaaatggacgcgtgaaggagcacgggacccaccagcagttgttggcacaaaaaggcatctattttagcatggttagcgtacaggcaggcacgcaaaatctt

SEQ ID NO: 200277 - DNA, 3858 bp, Artificial Sequence
  derived and/or modified sequence
atggacctcgaggccgccaagaacggaacggcatggcgtccgacctcggctgaaggtgactttgagctcggaatctcgtccaaacagaagcggaagaaaactaagacggtgaaaatgatcggtgtattgaccctgttccggtactcagattggcaagacaaactcttcatgtcgcttggaactattatggccatcgcccacggctcagggcttcccttgatgatgattgtgttcggcgagatgaccgacaagttcgttgacaccgcaggtaacttttcctttccagtcaacttctccctgagcctgctgaacccggggaagattttggaagaggaaatgactcggtacgcctactactactccgggcttggagccggagtgttggtggctgcatacatccaggtgtccttctggaccctcgcggcaggccgccaaatccggaagatcaggcaaaagtttttccatgcgatcctgcgccaagagatcggttggtttgatatcaatgacaccactgaactgaataccagactgacggatgacatctcgaagatcagcgaaggcatcggagataaagtcggaatgttcttccaggcagtggccaccttcttcgcgggattcatcgtgggcttcattcggggatggaagctgaccctggtgatcatggcaatctcgccgatcctgggcctcagcgccgcggtctgggcgaagatcttgtctgcattctccgacaaggagctcgccgcctacgccaaagcgggagcagtcgcagaggaagcgctcggcgcaattcggactgtgatcgcgttcggagggcagaacaaggaactggagagataccagaagcacctcgagaacgccaaggaaatcggcatcaagaaagccatcagtgccaatatctccatgggaatcgcgttcctgctgatttacgcgtcatacgcgctggctttttggtacggctcgaccttggtcatctccaaagaatacaccattggaaatgctatgactgttttcttctccatcctgatcggagcattctccgtaggacaagcagcaccgtgtatcgacgcctttgcgaacgcccggggagctgcctacgtgattttcgacattattgacaacaaccctaagatcgactcattctcagagcgcggacacaagcctgatagcatcaaggggaacctggagtttaacgatgtgcacttctcgtacccttcgcgcgcaaacgttaagatcctgaaaggactcaacctgaaggtgcaatcggggcaaactgtcgccctggtgggaagcagtgggtgcggtaagagcaccaccgtgcaactgatccagagactgtacgatccggacgagggtactatcaatatcgacgggcaggatatccgaaactttaacgtcaattacctgagagagatcatcggtgtcgtgtcccaggagccagtcctgttttcaaccaccattgctgaaaacatttgttacgggcgtggaaacgtgacgatggacgaaatcaaaaaggccgtcaaggaagcaaatgcgtacgaattcatcatgaagctgccgcagaaatttgacaccttggtgggagaacgcggggcccaactgagcggtggtcagaaacaacggatcgctatcgcaagagccctggtccgcaatccgaaaatcctgctcctggatgaggctaccagcgcattggataccgaatccgaagctgaagtgcaggccgcactcgataaggcacgcgaaggaaggactaccatcgtgattgcccatcggctctcaactgtgcgcaatgccgacgtcatcgccggtttcgaggacggagtgatagtggagcaaggatctcatagcgagctcatgaagaaggaaggtgtgtacttcaaactggtgaacatgcaaactagcggatctcagatccaaagcgaggaatttgagctgaacgacgaaaaggcagccacgcggatggcgccaaacggatggaaatccaggctgttcagacacagtactcagaagaatttgaaaaactcccagatgtgccaaaaatcactggatgtggaaactgatggactggaggcgaacgtgccaccagtgtcattcctgaaggtcctcaaactgaacaaaacggagtggccatatttcgtcgtcggcactgtgtgtgctatcgctaacgggggactgcagcctgcgttctccgtgatcttctcggagatcatcgctatcttcggccccggagacgacgccgtgaaacagcagaagtgtaacatcttttctctgatctttctgttccttggcatcatctcgtttttcacttttttcttgcaaggattcaccttcggaaaggccggcgaaattctcactagacggctgaggtcgatggcatttaaggccatgctgcggcaggacatgtcatggtttgacgaccataagaactctactggggctttgtccaccaggctggccaccgacgcggcgcaggtgcagggcgctaccggcactcgactggcgctcatcgcgcaaaacattgcaaatctgggaactgggatcatcatcagcttcatctacggatggcagctgaccctgctcctgctcgccgtggtgcccatcatcgccgtcagcgggatcgtggaaatgaagctcctggccggaaacgcgaaacgcgacaaaaaggaacttgaggccgcagggaagatagccactgaagccattgagaatatccgcaccgtcgtgtcgcttacccaggagcgcaagttcgaaagtatgtatgttgaaaagctgtatggcccgtaccgcaacagcgtacagaaggcgcacatatacggaatcaccttctcgatctcacaggcttttatgtacttcagctacgccggttgcttccggtttggagcctacctcattgtcaatgggcacatgcgatttagagatgtcattctcgtgtttagcgccatcgtgttcggagcggtggccctgggacatgcctcctccttcgccccggattacgctaaggccaagctgtctgccgcgcacctgttcatgctgttcgagcgccagcccctgatcgattcctactcggaagagggcttgaagcctgacaagttcgaaggcaacatcaccttcaatgaagtggtgttcaactacccgacccgcgcaaatgtgccggtcctgcaagggctctcgctggaagtgaagaagggacagactctggccttggtcggctcgtcagggtgcggaaagtcaactgtagtgcagcttctcgagcgcttctacgacccgctggccggaaccgtgttcgtcgactttggattccaacttctggatggacaggaagccaagaagctcaatgtccagtggttgagggcgcagcttggcattgtgtcacaggagcctatcctcttcgactgcagcatcgccgagaacatagcctatggggataattcgcgcgtggtttcgcaggacgagatcgtgtccgccgcgaaggcggcaaatatccacccattcatcgaaaccctcccacacaaatacgaaactcgggtcggcgacaaaggaacccagctctcaggaggccagaagcaacggattgccatcgcacgtgctctcatccggcagccgcaaattctccttctcgatgaagctacctcggctctggacacggagagcgaaaaggttgtgcaggaagccttggataaggcgcgcgagggtaggacgtgcatcgtgatcgcacaccggttgtccactatccagaacgccgatctgattgtggtgttccaaaatggccgcgtgaaggaacatggtacgcatcagcagctccttgcgcaaaaaggaatctacttctcgatggtgtccgtacaagctggcacgcagaacctg

SEQ ID NO: 200278 - DNA, 3858 bp, Artificial Sequence
  derived and/or modified sequence
atggatctggaggccgcaaaaaacggaactgcatggaggcctacgtccgccgaaggtgacttcgaactcggaatctcgagcaaacagaaacggaaaaagactaaaacggtgaagatgattggagtgctcactctgttccgctactcggactggcaggataaactgttcatgtccttgggaaccatcatggcaatcgcccatgggagcggactcccccttatgatgattgtattcggcgagatgaccgataagttcgtcgataccgccggaaatttctctttccctgtcaatttctccctttcactgctgaacccgggaaagatccttgaagaagaaatgactcgctatgcatactactacagcggattgggggccggcgtgttggtcgccgcgtacatccaagtgagcttctggaccctggcggccggacggcagatcagaaaaatccgccagaagttctttcacgccatacttcgccaggagattggatggttcgacatcaatgatactaccgaactgaacactcggcttaccgacgatatctcaaagatctcggagggaatcggagacaaagtcggtatgttcttccaggccgtggcgactttcttcgccggattcatcgtggggttcatccgaggctggaagttgaccctcgtgatcatggcaatttcccctattctgggtctgagcgcggccgtgtgggctaagatcctgtccgccttctcggataaggaactcgcggcctacgccaaggctggggctgtggccgaagaagccctgggcgccatccgcaccgtaattgcatttggaggccagaacaaagaattggaaaggtaccagaaacatctggagaatgcaaaggagatcggcatcaagaaagccatctcggcgaacatttcgatgggtatcgcctttttgctcatctacgcgtcgtacgctctggccttctggtacggcagcacccttgtgatctccaaggagtacaccatcggaaacgccatgaccgtgttcttttcaatccttatcggggcgtttagcgtgggacaggcggccccgtgcatcgacgctttcgcaaacgcccgcggcgccgcttacgtcatattcgacataattgacaacaatcccaagatcgattccttctccgagagaggacacaaacctgattcgatcaaaggcaatctggagtttaacgacgtgcatttctcctacccttcacgcgcaaatgtgaagatcctgaagggtctgaacctgaaggtgcaatcgggacaaactgttgctctcgtcggatcgtctggatgcgggaagagcactacggtccaattgatccagagactctatgacccggatgagggaacgattaacatcgatgggcaggacattcggaatttcaacgtgaattacctgagggagatcatcggggtcgtctcccaagaaccagtgcttttctccactaccatcgcggaaaacatctgctacggaaggggaaacgttaccatggacgaaatcaagaaggcagtgaaggaggccaacgcctacgagtttatcatgaaattgccacaaaagtttgatactctggtgggagaaagaggcgcacagctctcggggggacagaagcagcgcatcgcaattgcgcgggctctggtccgtaatccaaagattctgctcctcgacgaggcaaccagcgcccttgataccgagagtgaagctgaagtccaagccgcactggataaggcccgcgaaggaagaactaccatcgtgatcgcccataggctctcgactgttcggaacgctgatgtgatcgcgggctttgaggacggcgttatcgtcgaacaaggatcacactccgaactgatgaaaaaagaaggagtgtacttcaagctcgtgaatatgcaaacttcgggctcgcaaatccaatcggaagagtttgagctgaatgatgaaaaggcagccaccaggatggcgccgaacggatggaagtcgaggttgttccggcactcgacccagaagaatctcaaaaactctcagatgtgccagaagtccctggacgtggaaacggatggacttgaagctaacgtgcccccggtttcattcttgaaggtcttgaagctgaacaaaacggaatggccgtatttcgtggtcggaaccgtgtgtgccatcgccaacggggggctccaaccggccttctccgtaatcttcagcgaaatcatcgccatctttggtccgggagacgacgcggtcaagcagcaaaagtgcaatatcttctccctgattttcctgttcctgggcatcatcagcttctttactttcttcttgcaggggtttacttttgggaaagcaggagagatcctgaccagacggctgagatctatggcatttaaggccatgctccgccaggatatgtcatggttcgacgatcataagaattcaactggagccctcagcaccaggctcgcaacggacgcggcccaggtccagggagcgactggaactcgcctggccctcatagcgcagaatattgccaacctcggaaccggcatcatcatctcattcatctacggatggcagctgacgctgctgctgcttgctgtggtgccgatcattgcggtgtctggaattgtggaaatgaagctgttggcaggaaatgcgaaacgggataagaaggaactggaggctgcgggaaagattgcgactgaggctatcgagaacatcagaactgtggtgtcgctgacccaggaacgcaaatttgagagcatgtacgtggagaaactgtatggtccatacaggaactcggtccagaaggcccacatatacggaatcaccttctccattagccaggcgtttatgtacttttcgtacgccgggtgttttcggttcggggcgtacctgatcgtgaacggccacatgcggttccgcgacgtgatcctcgtgttctcggcaatcgtttttggagctgtggcgttgggccacgcgtcatcattcgcaccggactacgcaaaagccaagctgtcggcggcgcacctgttcatgctgtttgaacggcagcccctcatcgacagctactccgaggaaggcttgaagccagataagttcgaaggcaacatcactttcaacgaggtggttttcaactacccaacccgcgctaatgtcccggtgctgcaaggactgtccctggaggtgaagaaggggcagactttggccctggtcggctcttccggatgtggcaagtccacggtggtccagctccttgaacgcttttacgacccgctggcgggaacggtattcgtcgacttcggtttccagctgctcgatggccaggaggccaagaaattgaacgtgcaatggctgagagcccaattgggtattgtgtcccaggaaccaatcctcttcgactgctccattgctgaaaacatcgcctacggcgacaacagtagagtggtgtctcaggacgaaatcgtgtcggctgctaaggcagctaacattcacccattcatcgaaacccttccacacaagtatgaaactcgggtgggagacaagggaacgcagctgagtggcggtcaaaaacaacggattgcgatcgcccgggcacttattcggcagcctcaaatcctgctgctggacgaagcgacttcagctctggacaccgaatcagagaaagtggtgcaagaggcactggacaaggccagagagggccgtacctgcatcgtcatcgcccatcggctgtccaccatccagaacgctgacctgatcgtggtgttccaaaacggcagagtgaaggagcacgggacccatcaacaactcctcgcacagaagggaatctacttctcaatggtttccgtgcaggcgggaactcagaatctg

SEQ ID NO: 200279 - DNA, 3858 bp, Artificial Sequence
  derived and/or modified sequence
atggaccttgaagcagctaagaatgggaccgcgtggcggccaactagcgcagaaggagactttgagctggggatctcgagcaagcagaagcgaaaaaagactaagactgtgaaaatgattggagtgttgacccttttccgctacagcgactggcaggacaaactgttcatgtcactggggactattatggcgatcgcgcacggctcaggactccctcttatgatgatcgtgtttggcgaaatgaccgacaagtttgtggataccgcaggaaatttctctttcccagtgaacttttcactttccctgttgaacccgggaaagatactggaagaagagatgactcgctacgcatactactacagcggactgggagcaggcgtgttggtggcagcctacatacaagtctcgttctggactcttgcagccggccggcaaatccgcaagattcggcaaaagttctttcatgcgattctgcgccaggagattggatggttcgacattaatgatactactgaacttaacaccagactgactgacgatatctccaagatatccgaagggattggggacaaggtgggcatgttttttcaagcggtcgccacctttttcgccgggtttatagtgggtttcatacggggctggaaacttactcttgtgattatggccatctccccaattctcggtctttccgccgctgtgtgggccaagattctgtcggcgtttagcgataaggaacttgcagcctacgccaaggccggggcagtcgctgaagaggcgctgggggcgatcagaacggtcattgcctttggaggtcaaaacaaagaactcgaacgttaccaaaaacatttggagaacgcgaaggagattggaatcaaaaaagcaataagcgcaaacatttcaatgggaattgccttccttctcatttacgcatcgtacgcacttgcattttggtacggcagcacccttgtgatttccaaggagtacactatcggaaatgcaatgaccgtgttcttctccatcttgataggcgccttttccgtgggccaagcagctccatgtattgatgcattcgcaaacgcccgtggagccgcatacgtgatttttgatatcatagataacaatcccaagattgactcatttagcgaacggggacataagcctgatagcatcaaaggtaacctggagttcaacgacgtgcatttcagctaccctagcagggcaaacgtgaagatccttaagggactgaaccttaaggtgcagagcggccagaccgtcgctttggtcggctctagcggttgtggcaagtcaaccaccgtgcagctgatccaaagactctatgatcctgatgaagggaccattaacatagacggccaagatatcagaaacttcaacgtgaattacctcagagagatcataggagttgtgtcgcaggaaccagtccttttctcgacgaccattgccgagaatatctgttacggacgtgggaacgtgactatggacgagattaagaaagctgtcaaggaagccaacgcctacgagtttatcatgaaactcccacagaagtttgataccctggtgggcgaaaggggagcccaactttccggtggtcagaaacaaagaatcgcaattgcaagagccctcgtgcgaaatcctaaaatcctccttctcgatgaggcaacctccgcactggatacggaatccgaagcggaagtgcaggctgctctcgataaagccagggagggaagaactactattgttatagctcatcgcttgtcgacggttcgcaacgcggatgtcatcgcgggatttgaggacggagtgatcgtggagcagggatcgcattccgaactgatgaagaaggaaggggtctactttaaactggtgaatatgcagacctcgggctcacagatccagtccgaggaatttgagcttaatgatgaaaaggccgctactcggatggcccctaacggttggaagtcacgcctttttcgtcactccacgcaaaagaacctcaaaaactcgcaaatgtgtcaaaagtcgctggatgtggaaactgatggattggaagcaaatgtgccgcccgtctcctttcttaaagtgcttaagctcaataagaccgaatggccctacttcgtggtcggcactgtgtgtgcaatcgcaaacggaggactgcagccagctttctctgtgatcttttccgagattatcgctatattcggtcccggtgacgacgcagtgaagcagcagaagtgcaacattttcagcctcatcttcctgtttctggggataatcagcttctttacttttttcctccaaggatttacttttggaaaagccggggagattctgacgcggagactcaggagcatggcctttaaagcgatgttgcgtcaggatatgtcatggttcgatgatcataagaattcgaccggtgcgctttccactaggcttgccaccgacgctgcacaagttcaaggagcaaccgggactcgtctggcgcttatagcgcaaaacattgcaaatctgggcactggaattatcatttcttttatctatggctggcaactgaccctgctcctcctcgcagtggtgcccatcatcgcagtcagcggtattgtcgagatgaaactccttgccggaaacgccaagagagataagaaggagctcgaagcagctgggaagatcgcaaccgaggcaattgaaaacatccgaactgtggtttcccttacccaagaacgaaagttcgaatcgatgtacgtcgagaagctgtacggcccttaccgaaattctgtgcaaaaggctcacatttacggcataaccttttcgatttcacaagcattcatgtacttttcgtacgcaggatgctttcgatttggtgcttacctgatagtgaacgggcatatgcgttttcgggatgttatcttggtgttttccgcgattgtctttggagcagtggcactcgggcatgcaagctcgttcgcgcctgattacgcaaaggccaagctgtcggcagcgcacctgttcatgctttttgaacgccaaccgctcatcgattcctacagcgaggagggtctgaagccagataagttcgagggaaacatcacgtttaacgaggtcgtgttcaattaccccactcgcgcaaatgtcccagtgcttcaagggctttcactcgaagtcaagaagggtcaaaccctcgcacttgtgggatcatcggggtgcggaaaatccactgtggtccaactccttgagagattttacgatccccttgcgggtaccgtttttgtggactttggttttcagctgctggacggacaagaagccaagaaattgaatgtccaatggctgagagcccaactgggaatagtgtcacaggagcctattctgtttgactgttccattgcagaaaacatcgcatatggagataattctcgcgtggtcagccaagacgaaattgtgtcggctgcaaaggcggctaacatacatcctttcatagaaacgcttccccacaagtatgaaacccgcgttggtgacaaaggcacccagctctctgggggtcaaaaacagaggattgcaatcgcccgtgcacttatccgccaacctcagattctgttgttggatgaagctacctcggcacttgataccgaaagcgaaaaggtcgtccaggaagcactggacaaggcacgcgaaggtcggacgtgcattgtcatcgctcacagactttcaaccatccagaatgcagatcttatagtggtctttcagaacggacgggtgaaggaacacggtacgcatcaacagcttctggcccagaaggggatttacttctctatggtgtcagtgcaggcaggtacccaaaacttg

SEQ ID NO: 200280 - DNA, 3858 bp, Artificial Sequence
  derived and/or modified sequence
atggatcttgaggcagcgaaaaatggaaccgcgtggcgcccaacttcggcagaaggcgatttcgagctcggaatttcgtcgaagcagaagcggaaaaagactaagactgtaaagatgatcggcgtgcttaccctcttcagatacagcgactggcaggataagctgtttatgtcactgggaactattatggcaatcgcccatgggtccggccttccacttatgatgatagtgttcggagaaatgactgataagttcgtggatacggccgggaatttctcgttcccagttaacttttcgctttcgctccttaatccaggtaagatcctcgaagaggagatgactagatacgcctactactactcggggctcggcgcgggcgtgctcgttgcagcatacattcaggtgagcttctggactttggcagccggacggcagataaggaagatccgccaaaagtttttccacgcaattctgcgccaagaaataggctggttcgatatcaatgataccaccgagctcaacaccaggctcactgatgatatttccaagatatcggaaggcatcggggataaggtggggatgtttttccaggcagtggcaaccttctttgccggattcattgtggggtttatcagaggctggaagctcactttggtgattatggcgatctcgccaattctcggactctcggcagccgtgtgggcgaagattttgtcggccttttcggacaaggagcttgccgcatatgcaaaagccggagctgtggcagaagaggcacttggtgctataaggaccgtgattgcatttggaggtcaaaacaaggagctggaacgatatcagaaacacctggagaacgcaaaggagatcggcatcaagaaggctatttcggcgaacatttcgatgggtattgctttccttctcatttacgcaagctatgcactggccttctggtacggttccacgcttgtcatctcgaaggaatacaccattggtaacgcaatgactgtgttcttttccatcttgattggcgcatttagcgtgggccaggcggcaccttgtattgatgcattcgcaaatgcgagaggtgcagcttacgtgatctttgacataatcgacaataaccccaaaatagactcctttagcgaacggggccataagcccgatagcattaagggaaaccttgaattcaacgatgtgcatttttcctacccaagccgggcaaatgtgaagatattgaagggacttaacctgaaggttcaatcgggccaaacggtcgcactcgtcgggtccagcggatgcggcaaatccaccactgtgcaactgattcaaagactctatgaccccgatgaaggaaccataaacatcgatggacaggatatccgtaatttcaatgttaactacctcagagagataattggagtcgtgagccaggagcctgtgctttttagcactactattgcggagaacatctgttacggaaggggaaatgtgaccatggatgaaatcaagaaggccgtgaaggaggcaaacgcatacgaattcatcatgaagctgccacagaagttcgacactctcgtcggagaacgaggagcacagctgtcgggaggtcaaaagcagcggatcgcgattgcccgcgccctggtgcgaaaccctaagatcctgctgctcgatgaagcaacgtcggcgctggatactgagagcgaagccgaagttcaggctgcactggataaggcaagagagggtcgaaccaccattgtgatagcgcatagattgtcaactgtccggaacgcggacgtgattgcgggttttgaggatggcgtcatcgtcgagcaagggtcacattcggaactcatgaaaaaggaaggcgtgtacttcaagctggtgaacatgcaaacctcagggtcccagatacaatccgaggaatttgagctgaatgacgagaaggcggcaaccagaatggctccaaacggatggaagtcccgactttttcggcattccactcagaagaacttgaagaactcccagatgtgtcaaaagtccctcgacgtggagacggacggcctggaagccaacgtgcctccagtgtccttcctgaaagtgttgaaacttaacaagaccgaatggccgtacttcgtcgtgggtaccgtgtgtgcaatagcgaatggaggactgcaaccagcattctccgtgatcttttcggagattattgccatctttggccccggtgatgatgctgtgaaacagcaaaaatgtaacatcttttcacttatctttctttttcttggtatcatttcattctttaccttttttctccagggatttacctttggaaaggcaggcgagattcttaccagacgacttcgctccatggcatttaaggccatgcttagacaggatatgtcgtggtttgatgatcacaaaaactcgaccggagcactctccacgagactggcaacggatgcagcgcaggtgcagggagcaaccggtaccaggctggccctcatcgcccagaacattgcaaacttgggaaccggaatcataatctcgttcatttacggttggcagctgaccctcttgctcctcgcggtcgtgcccataattgcagtgtcagggatcgtcgaaatgaaactgctggcgggaaatgccaagcgagataagaaggagttggaagctgccggtaagatcgcgactgaggcaatcgagaatattcgtactgtggtttcccttacccaggagagaaagtttgagtcgatgtacgtggagaaactttacggcccttacaggaattccgtgcagaaggcccatatctacggcatcacgttttccatttcacaagcgtttatgtacttttcctacgcaggttgtttccgcttcggtgcatacctgattgttaacggacacatgagatttcgcgacgtcatccttgtgtttagtgccattgtgtttggggcagttgcattgggtcatgcaagctcttttgcccctgactacgcaaaagcaaagctctcggccgcgcatttgtttatgctgtttgaacgacagccgctcattgattcatacagcgaagaaggtttgaaacctgacaaatttgaaggtaacattacttttaacgaagtcgtgtttaactacccaacccgagccaatgtgcctgtcctgcaaggactgtcgctggaagtgaagaaaggccaaactctggcattggtgggttcctctggctgcggtaagagcaccgtcgtccaacttcttgaacgcttttacgaccccctggccggtaccgtgtttgtggattttggcttccaactgctcgatggacaagaagcgaaaaaacttaacgtgcaatggctcagagcacaacttgggattgtgtcacaagagcctatactgtttgactgcagtatagctgagaatatcgcgtacggtgataatagccgtgtggtgagccaagacgaaattgtctccgccgcgaaggctgcaaacattcatcccttcattgagactctgccacataagtacgaaacccgcgtgggagacaaaggtacgcaactttcgggcggacagaagcaacggatcgccatcgcaagggcactcatcagacagcctcaaatacttcttcttgatgaagccacttcagcacttgatactgaatcggaaaaagtggtgcaggaggcgctcgacaaggccagggaagggcggacctgcattgtgattgcacatagactctcgacgattcagaacgcagatctgattgtggtgttccagaatggtagagtcaaggaacacggaactcaccaacaattgcttgcacaaaagggcatctacttctccatggtgtcggtgcaagctggtacccaaaacctt

SEQ ID NO: 200281 - DNA, 3858 bp, Artificial Sequence
  derived and/or modified sequence
atggatttggaagccgccaaaaatggaactgcttggcgaccaacgagcgcagagggcgacttcgaactgggaatcagcagtaagcaaaagcgtaagaagactaagactgtgaagatgataggcgtcctgaccctattccgttacagcgactggcaagacaagctgttcatgtctttaggcactatcatggccatagcacacgggtctggcctacctctcatgatgatagtgttcggggaaatgaccgataagttcgtggatactgctggcaacttttctttccccgtcaatttctccttatcactgctgaaccctggtaagatccttgaagaagagatgacaaggtatgcctactattattctggcttaggtgccggagttttggttgctgcatacattcaggtctctttctggactcttgcggcgggtcgtcagattcgtaaaatacgccagaaattttttcatgctatccttaggcaggagataggctggttcgatattaatgacaccactgagctgaatacacgtcttactgacgatatttccaagattagcgaggggatcggagacaaggtgggaatgttctttcaagcagtagctacttttttcgccggattcatagtgggattcatccgcgggtggaagctaactctggtgatcatggctatcagccccatactggggctatcagccgctgtgtgggccaagattttgagcgcattcagtgataaggaacttgcagcatacgctaaggccggggcagttgccgaagaggcgctgggcgcgatacgcactgtcatcgctttcggaggccaaaacaaggaactagagagatatcagaagcacctcgagaatgcgaaggagattgggataaaaaaggctatctcagccaacatcagcatggggatagcctttcttcttatttacgcctcttatgcgttagccttctggtacggtagcacactggttatcagcaaagagtacacgatcgggaatgcgatgaccgtgtttttcagcatccttatcggagcattttcggtgggtcaagcggccccttgcatagacgcgtttgctaatgcacgaggtgctgcgtatgtgattttcgacattattgataacaatcccaagatcgactcgttctctgagaggggccataagcctgatagcatcaagggaaacctggagtttaacgacgtacatttcagttacccctctcgcgctaacgttaagatactcaaaggcttaaacctgaaggtacagagtggacagacagtggcgctagtggggtctagtggttgtgggaaatccacgacagtccaactgattcaacggctctatgaccctgatgaggggactattaatatagacggacaggatattcggaactttaatgtaaattatctccgggagatcattggggtagtatcacaagaaccagtcctcttttctactacaatcgctgaaaatatttgctatgggcggggaaacgtgaccatggatgaaatcaagaaggccgtgaaagaggccaacgcctatgaattcatcatgaagctgccacaaaagttcgacaccttggtgggggagcggggggcccagctctcaggagggcagaagcagcggattgcaatcgcccgagctctggttagaaacccaaagattctactgctcgatgaggcgacctccgccctggatactgaatcagaagcggaggttcaggccgcactcgataaagctcgcgaaggtcgcaccacaattgtaattgcccacagactgagcaccgttaggaacgcggatgtgatagccggcttcgaagatggggtgatcgtggaacaaggatcccattctgaactgatgaagaaagaaggtgtgtatttcaaactggtgaatatgcagacatccggctcacagatccagagtgaagaatttgagcttaacgacgaaaaagcggccacaaggatggctccgaatggctggaagagtcgactgtttcgtcacagtacacagaagaacctgaagaactcccaaatgtgtcaaaagtccttggatgttgagactgatgggcttgaggcaaatgtgcccccggtctcatttctgaaggtgctgaagctgaacaagacagaatggccctactttgttgtaggcacagtttgtgccatagccaacggaggtcttcagcctgccttcagcgtgatttttagtgaaattatcgctattttcggtccgggcgatgatgcagtgaagcagcaaaagtgtaacatatttagcctcatctttctttttctgggaatcatttcattttttacatttttcctccaggggtttacgttcggtaaagcaggtgaaatcctcacgcggaggttgagatctatggcgttcaaggccatgcttaggcaggacatgtcatggtttgacgatcataaaaatagcacaggagctctttcaaccaggctggccaccgatgcggcacaagtccagggggccactggaacgaggctggctctgattgcccaaaatattgcaaacttgggtacaggcatcatcatttcctttatctacggctggcagttaacactcctgttactggccgttgtgcccatcatcgctgtgagtggcatcgtagagatgaagctgctcgccgggaacgccaagcgggacaaaaaggagctggaagcggcagggaagatcgcaaccgaggcgatcgaaaacatccggaccgttgtgagccttacccaggagcgcaaattcgaatctatgtatgtcgagaagctctatgggccataccgcaattccgttcagaaggcccacatctacggcattacttttagcatctcacaagcctttatgtacttctcctacgctgggtgttttcggtttggtgcctatctaatcgtgaatggccacatgaggttccgggatgtgattctagttttctcggcgatcgttttcggtgccgtcgccctgggtcatgctagctcatttgcacccgattacgccaaggcgaagctctctgctgctcatctgttcatgctgtttgagaggcagccactgatagacagttattcagaggaaggtttgaaacctgacaagttcgaaggcaacataacttttaatgaggtagtgtttaactaccccaccagggcaaacgtgccagttctgcagggattatccttggaagtgaaaaaaggacagaccttggcattggtaggcagctctggatgcggcaaatccactgtggtacagctgcttgagaggttttatgatccactggccggcactgtatttgttgactttggcttccagctcttggatggccaggaagcaaaaaagctcaacgtacagtggctccgagcgcagttaggcatcgttagccaggagcccatattgttcgactgttctattgccgaaaacattgcctacggagataattcgcgcgtcgtaagccaggacgagattgtctcggctgccaaagctgccaatatccaccctttcattgaaacactgcctcataagtacgaaacacgcgtgggcgataagggaacgcaactctctggcggccaaaaacagaggatcgctatagcaagggcactcattcggcagccgcagatacttttgctcgacgaggcgacttccgcccttgacaccgagagtgagaaagtagtgcaggaagcgcttgacaaggctagggaaggcaggacatgtatcgtgatcgcccataggttatcaacaatccaaaatgctgacctgatcgtcgtatttcagaacggaagggtgaaagagcacggcactcaccaacaactgctcgcccaaaaaggcatttacttttccatggtgtccgtgcaagccggcacacagaacctt

SEQ ID NO: 200282 - DNA, 3858 bp, Artificial Sequence
  derived and/or modified sequence
atggacctggaagccgccaagaacggcaccgcctggaggccgacatccgccgaaggagacttcgaactaggaataagcagcaaacagaagcgaaaaaagaccaaaacagttaaaatgatcggtgtgctgacactgttccggtacagtgattggcaagacaagctgtttatgtctctgggtaccatcatggccattgcacacgggagcggcttgcccctcatgatgatcgtgttcggcgagatgaccgacaagttcgttgacacagccggtaatttctcatttccagtgaacttttccctgagcttactcaacccagggaaaatactggaagaggaaatgacacgctacgcttattactacagcgggctgggcgccggagttctggtggcagcatatatacaggtcagtttctggaccctggccgccggaagacagatcagaaagataagacagaaattctttcatgccatcctgaggcaggagattggatggttcgacattaacgacactactgaactgaatacaagactcaccgacgatatctcaaagatatccgaaggtattggcgataaggtcggaatgttctttcaagcagttgccacctttttcgccggattcatcgtcggtttcattcgcggatggaaattgacactagttattatggccatttcccctatactcggcttgagtgctgcagtgtgggccaagattctgagtgcattttccgacaaagagttagcagcctacgccaaggctggggctgttgccgaagaggccctgggagctattcggaccgtgatcgctttcggtgggcagaataaagagctcgagcggtaccagaagcacctggaaaacgccaaggagatagggatcaagaaggctattagtgccaacatatccatgggcattgcctttcttctgatttacgctagttatgctctagcattttggtatggctctaccctggtgatctctaaggagtatactattggcaacgccatgacagtgttcttctctatcctgatcggagctttttccgttgggcaggctgccccatgcatcgatgccttcgctaatgcccgtggcgccgcatatgttatattcgacattattgacaacaatccaaaaatcgattcctttagcgaaagaggccataagccagacagcatcaagggcaatctggagtttaacgatgtgcattttagttatccatctcgagcaaatgtcaagattctaaagggcttaaacttaaaggtccagagtgggcagactgtggccttggttggcagttcagggtgtggaaagtctaccactgtccagctgattcagcgactctacgaccccgatgaaggcaccatcaacatagatggacaagacatacgaaattttaatgttaactatttacgagagattatcggtgttgtgagccaggagccagtgcttttttctacaactatagcagagaatatctgctatgggcgcggtaacgtgactatggatgagattaagaaagctgtcaaggaagccaatgcctacgaattcattatgaaacttccacagaagtttgatacactagttggcgaacgaggggctcagctgagtggggggcagaaacagcgtattgccatagctcgcgcactggttagaaaccccaagattctgctgctggacgaagccacaagtgccctagacaccgagtccgaagcagaggtacaagccgcactggacaaagcacgggagggcagaactacaattgttattgcccatcgtctctctaccgtgaggaatgcagatgtgatcgctggatttgaggacggcgtgatagttgagcaaggctctcactccgagctgatgaagaaggagggggtatactttaaactggtgaatatgcagacatctggctcccagatccagagcgaggaattcgaacttaacgatgagaaagcagctactcgaatggcaccaaatggctggaagtcccggctatttagacattcaacccagaagaacttaaagaacagccagatgtgccagaagtctctggatgtggaaaccgatggcctggaagccaatgtgccacctgtgtccttcctgaaggttttgaagttgaacaagacagagtggccctacttcgtcgttggaaccgtgtgtgccattgcaaatggcggcctgcagcccgctttcagtgtgattttctctgagatcatcgccatatttggccccggcgacgatgcagtcaagcaacagaagtgcaacatcttcagcctgatcttcctgttcctgggaattataagctttttcacatttttcctgcaagggtttactttcggcaaggccggggagatcctaactcgacgtctgagaagcatggcttttaaggccatgctgcggcaggatatgtcttggttcgacgaccataagaactctactggtgccttatcaacccggttagccacagacgctgctcaggtgcagggcgctaccgggacccggctagccctgattgctcagaatattgccaatctgggcactggcatcattatatcttttatctacggctggcagctcactctgttgctactggctgtggtgcctatcatagctgtgtccggaatagttgaaatgaagctactggcaggcaatgcaaaaagggataaaaaagaactggaggctgccggcaaaatagccaccgaagccatcgaaaatattaggacagtggtcagtctgacacaggagcggaagttcgaaagtatgtacgtggagaagttatacgggccataccgtaatagcgtccaaaaggcacacatttacggcatcactttttctattagccaagctttcatgtatttctcttacgccgggtgcttccgcttcggcgcttacctgattgtcaatggtcacatgaggtttagggacgtcattctggtgttttctgcaatagtgttcggggccgttgccctgggacatgcctcatcattcgccccagactatgcaaaggctaagctctccgcagcccacctattcatgctcttcgagcggcaaccactcatagacagctactctgaggaggggttaaagcccgacaaattcgagggcaacataacttttaatgaggtggtgtttaactatcctactcgcgcaaatgtgcccgttctgcagggcctgtccttagaagtgaagaagggtcagactctagctctagtgggcagtagcggatgtggcaagtctactgtcgttcagttactggagcgcttctacgaccctttggccggtacagtgttcgtagattttgggttccagctgctggatgggcaggaggccaagaagcttaatgtgcagtggctacgagcccaacttgggatcgttagtcaggagccaattctattcgactgctctattgcagaaaatatcgcatacggagataacagtcgggtggtatctcaggatgaaatcgtgagtgccgccaaggctgccaacattcaccccttcatagagactttacctcacaagtatgagacccgtgttggagacaagggtacacagctgtctggcgggcagaaacagagaattgcaattgcccgcgcattaattcgccagcctcaaatcctgctgttagacgaagccacttccgcactcgacaccgaaagtgagaaggtagtgcaagaggcacttgataaagccagagagggccggacttgcatcgttatagcccatcgtctgagcacaatacaaaacgccgatctgatagtggtttttcaaaatgggagggtcaaagagcatggcacccaccagcagttactggcacagaaaggcatatatttcagcatggtgagcgtccaggccggcacacagaatctc

SEQ ID NO: 200283 - DNA, 3858 bp, Artificial Sequence
  derived and/or modified sequence
atggatctggaagccgcaaagaacggtacggcatggcggccgacctcggcggaaggtgattttgagctgggaatttcctcaaaacaaaagagaaagaaaaccaagactgtgaagatgattggtgtcctgaccctcttcaggtacagcgattggcaggacaagttgtttatgtcgctgggtactatcatggcaatagcacacggatcaggcttgcccctcatgatgatcgtgtttggggaaatgactgacaaattcgtggacaccgccggaaacttctcctttccggtgaacttctccctttcccttctcaatcccggcaagattttggaggaagagatgacgcgatatgcatactactactccggtcttggagctggagttctggtggctgcatacatccaggtttccttctggactctggcagctggacggcaaatccggaagatacgccagaagttctttcacgcaattcttcgtcaagaaataggctggtttgatatcaatgacaccaccgagcttaacacccgactgaccgatgatatctcgaagatttcagaaggaattggtgataaagttggaatgttctttcaagccgtggccaccttctttgccggattcatagtggggtttattcggggttggaaactcactctggtgatcatggccattagccctatcctcggtctttcggcagctgtgtgggctaagatactctccgcgtttagcgataaggaactggcggcatacgcaaaggctggcgcagtggcagaggaagcgctgggcgcaatcagaactgtgattgcattcggaggccaaaacaaagaactcgaaagataccagaaacatcttgaaaatgcaaaggagattggcataaagaaagcaatctcagcgaacatatcgatgggtatcgcttttctgctgatttacgcttcatacgcactggcattttggtacggttcgaccctggttatttccaaggaatacaccatcgggaacgcaatgactgtgttctttagtattcttatcggggcattttcggtgggacaagctgcaccatgtattgatgcatttgcaaacgcaagaggagcagcatacgtgattttcgacataatcgacaataacccaaagatcgattcgttttctgagcgtggacacaagccagactccattaaaggaaatcttgagtttaatgatgtgcatttctcatacccatccagagctaacgtgaagattcttaagggactgaatctgaaggtgcagtccggtcagactgtcgcccttgtaggatcctcggggtgcggtaagtctactactgttcaacttatacagcgcctttacgatccagacgaaggtaccatcaacatcgacggtcaggatatacgtaacttcaatgtgaactacttgagggagatcatcggcgtggtatcccaagagcctgtcctgttttcgaccaccatagcggagaacatatgctacgggagaggtaatgtcactatggacgaaatcaagaaggcagtcaaggaagcaaacgcatacgagtttatcatgaagctcccacagaagtttgacacccttgtgggagaaagaggggcccaactgtccggagggcagaagcagagaattgcaatcgcacgtgccctcgtgcggaaccctaagatactccttctggatgaggcaacctccgcacttgatactgaatcggaagctgaggtacaggcagcacttgataaagcgcgggagggccgaaccactattgtgattgcacatagattgagtactgtccgaaatgccgatgtcattgccggattcgaagatggggtgattgtcgaacagggatcgcacagcgagcttatgaagaaggagggagtgtacttcaaactggtcaacatgcagacttcaggatcccaaatccagtctgaagagttcgagctgaatgacgaaaaagcagcgactcgcatggctcccaatggatggaagagcagacttttccgacattcaacgcaaaagaacctgaagaacagtcaaatgtgtcaaaagtcactggatgtcgaaactgatggtcttgaggcaaacgtgccccctgtgtccttcctgaaggtgcttaagctgaataagacggaatggccgtactttgtcgtcgggaccgtatgcgccatagccaacggcggactccaacctgctttttcagtcatattctctgagataattgccatttttggtcctggagatgacgccgtgaaacaacagaaatgtaacatcttttcgttgatatttctgttccttggaatcatttcctttttcacgtttttccttcaagggtttacttttggaaaagccggcgaaatcctgactcgcagactgcgcagcatggcattcaaggccatgctcaggcaagatatgagctggtttgatgaccacaagaatagcaccggtgcacttagcacccgcctggcaaccgacgccgctcaggtgcaaggagcaactggtaccaggcttgcacttattgcccaaaacatcgctaatcttgggacgggtatcataatcagcttcatttacggctggcaacttacccttttgctgctcgcagtggtgcccatcattgcggtgtcgggaattgtggaaatgaaactgctggccgggaacgcaaagagggataagaaggaacttgaggcggctggtaagattgcgaccgaagccattgaaaacattcggaccgtcgtgtcgcttacccaggaacgcaagtttgaaagcatgtatgtggaaaagttgtacggaccgtaccgaaattcggtgcaaaaagcacacatttacggcatcacttttagcatttcccaggcattcatgtatttctcatacgccggatgtttccggtttggggcctaccttattgttaatggccacatgcgcttcagagacgtcattctcgtcttttccgcaatcgtctttggtgcagtggcactcggccatgcctcatcgtttgctcccgattacgcaaaagcgaagctgtccgctgctcatctgtttatgttgttcgaacgccaacctcttatcgactcgtactcggaagagggccttaagcctgacaagtttgaaggaaacattaccttcaatgaagtggtctttaactacccaactagggcaaacgtccccgtgctgcaaggtttgtcacttgaagtgaagaaaggccagacgctggcactcgtgggatcatccggttgtgggaagagcactgtggtgcagctccttgaacgcttttacgatccgctggctggaaccgtgtttgtggattttggatttcagttgctggacggtcaggaagcaaaaaagctcaacgtccaatggctgagggcacaactgggtattgtctcccaggaacctattctttttgattgcagcatcgccgaaaacatcgcttatggcgacaatagcagagttgtgtcccaagacgaaatcgtcagcgcagctaaagcggcaaacatccatccctttattgaaacgctccctcataagtatgaaactcgcgtgggggataagggaacccagctgtcgggaggacaaaaacaacgcattgcgattgcgcgggcgctcatccgccaacctcaaattctcctcctggacgaggccacttctgcactcgataccgaatcggaaaaggtcgtgcaggaggcactggataaagcacgggaggggagaacttgtatcgtgattgcccatagactgagcactattcaaaatgcggatttgattgtggtgtttcaaaacggcagagtaaaagaacacggaacccatcagcagcttctcgcacaaaaaggtatttacttttcgatggtaagcgtccaggcgggaacccaaaacctc

SEQ ID NO: 200284 - DNA, 3858 bp, Artificial Sequence
  derived and/or modified sequence
atggacctggaagctgctaagaacggaaccgcctggcggccaacatccgccgagggcgacttcgagcttggaatatcctctaagcagaagcgcaaaaaaaccaagaccgtgaaaatgatcggagtcctgacactgttccgatacagcgactggcaggataaactctttatgtcacttggtactatcatggcaattgctcacggctctgggctgcctctcatgatgatcgtcttcggcgagatgactgataaatttgtggatactgccgggaattttagttttccggtcaattttagtctcagcctcctcaacccaggcaaaattcttgaagaagagatgacacgctatgcttattactacagcggactaggcgccggcgtcctcgtagccgcctatatccaggtgagcttctggaccctcgcagcgggcaggcagatcaggaagatcagacagaagttcttccacgcgatcctgcgccaggaaatcggctggtttgacataaacgatactacagagctgaatacccgactcacagacgacatttcgaaaatatcagagggaataggcgataaagtgggaatgtttttccaggctgtagccaccttcttcgcgggtttcatcgtgggattcataagagggtggaaactcacactcgtgataatggctatctctcccatcctgggactcagcgcagccgtctgggctaagatcctcagtgcctttagtgacaaggaactagcggcatacgccaaagcaggggccgtggcagaggaggccctcggggcaattcggactgtcatagcctttggaggccagaataaggagctcgaacgatatcagaaacatctggaaaacgctaaggagattggaattaaaaaggcaatatctgcaaacatctccatgggtattgctttcctactgatctatgctagttacgccttggcattttggtatggatcaacactggtcatctccaaagaatacactattggcaacgccatgactgtattcttttccattctgataggtgctttctccgtcggacaggctgctccctgcattgacgcatttgctaacgcccgtggagcagcttacgtgatcttcgatatcatcgacaataaccctaaaatcgattcgttctctgaacggggacacaagcctgatagcataaaaggaaatctggaattcaacgacgtacacttcagctatccaagtagagctaatgtgaaaatcctcaaggggcttaacttgaaggttcagtctggacagacagtggcacttgtaggcagctcaggctgtggtaagtccacgaccgtgcaacttatccagagactatatgatcctgacgaaggcaccataaatatcgatggacaagacatccgtaattttaatgtcaattacctgagagaaattatcggcgtggtcagccaggagccagtgttattttcaacgaccatcgccgagaatatttgctacgggagggggaatgtaacgatggatgagattaaaaaggctgtgaaggaggccaatgcatatgagttcatcatgaagcttccccaaaagttcgacactctggtaggggagagaggcgcccagctgagcggcggtcagaaacagcggattgccattgcccgggcccttgtgcgcaatccgaaaatactccttctggacgaggcaacatctgcattggacacggaatccgaggctgaggtgcaggccgccctggataaagcaagggaaggtcggaccaccatagtgatcgcacatagattgtcgactgtaaggaatgccgatgtcatagctggcttcgaggacggagtcatcgtcgagcaggggtctcatagcgaactgatgaagaaggagggagtctacttcaagctagtcaatatgcagacctcaggttcgcaaatacaatcagaggagttcgaactgaacgacgagaaagccgcaacccgcatggccccaaacggatggaagtcccgcctttttcggcatagcacccagaaaaacttgaaaaacagccagatgtgtcagaaatccttagacgtggaaaccgacgggctcgaggccaatgtgccccctgtctcctttctgaaagtcttaaaattaaacaaaaccgagtggccatacttcgttgtgggcactgtttgcgctatcgcaaacggtgggctccagccagccttctcggttatattcagcgagatcattgccattttcgggcccggagacgatgccgtgaaacagcagaagtgtaatatcttttctctgatctttctgtttctaggcatcatcagcttcttcacattttttctccaggggtttacctttggcaaagcaggggagatccttaccaggagactcagaagcatggcctttaaggccatgcttagacaggatatgagctggtttgatgaccacaaaaatagcaccggagctctctccactagactggcgacagacgccgcccaggttcagggggcaaccgggacccggctggcacttatcgctcagaatattgccaacctagggaccggaatcattatttcgttcatatatggttggcaactgaccctgctcctgttggcggtcgttccaatcatcgcagtctccgggattgtcgagatgaagctgctggcaggaaatgccaagcgcgataaaaaagaattagaagccgccggaaagatcgccacggaggccatcgagaatattagaaccgttgtgtccctgacccaggagcgtaagttcgaatctatgtatgtagaaaaattgtatggaccttataggaatagcgtacagaaggctcacatctatggaattaccttcagtatttcccaggcattcatgtatttttcttacgccggatgctttcgttttggtgcttacctaatagtgaatggccatatgaggttccgcgacgtgatactggtgttcagtgctattgtgtttggtgctgttgctctgggccacgcaagctcattcgccccagactacgcaaaggcgaagctcagcgctgcccatttgtttatgctgttcgagcggcagccactgatcgatagctatagcgaagaagggcttaagccagataaatttgagggcaacattacttttaacgaggtcgtcttcaactaccccacgagagcaaatgtccccgtgctgcaaggcctctcgcttgaggtgaagaaaggacaaacactagccctcgtgggatcaagcggatgcggaaaaagtacggtggttcagctgctggagaggttttatgatccgttggcaggcacagtgttcgtggacttcgggtttcagctattagatgggcaggaggcaaagaagcttaatgtgcaatggctgagagcccagctgggcatcgtgtcccaggagccaatcctcttcgactgttcaatcgcagaaaacatcgcatatggcgataactcaagagtggtgtctcaagacgaaattgtgtccgcagctaaggctgccaatattcatccattcatagaaacattaccccacaagtatgagactcgcgtgggggacaaagggactcaattgtctggtggccagaagcagcggatagctatcgcccgggcactcatccggcagccacaaatcctactgctcgacgaggccactagtgcccttgataccgaatcagaaaaagttgtccaggaagcacttgataaagctcgggaggggcgcacctgcatcgtaatagcccataggctgagcacaattcagaatgctgacttgattgtggtgttccagaatggcagggtcaaggaacatgggacacatcagcagttgctggcacagaaaggaatatactttagcatggtgagcgttcaggccgggactcaaaacctc

SEQ ID NO: 200285 - DNA, 3858 bp, Artificial Sequence
  derived and/or modified sequence
atggacttagaagcagcaaagaatggtactgcctggaggccaacatctgctgaaggcgattttgaattaggcatctcctctaagcagaaaaggaagaagactaagacagtgaaaatgatcggcgtgcttactttgtttcgttattcggattggcaagacaagctgttcatgtctctcggcacaataatggccattgctcatggatctggtctcccgttgatgatgattgtgttcggtgagatgaccgacaagttcgttgatacagcaggcaacttttcattccctgtcaactttagcctctcgttgctaaatcccggaaagattctggaggaagagatgactaggtacgcttactactactccggtttgggagctggcgtgttggtcgctgcgtatatccaagtttcattttggactctcgcagcaggacggcaaatccgtaaaatccgtcaaaagttctttcacgctatactaagacaggaaattggatggttcgatataaacgatactacagaacttaacacacgcctgactgatgacatttctaaaatttctgaaggtattggtgacaaggttggaatgttcttccaggctgtggccactttctttgctggttttattgttggctttataaggggttggaagctcaccttagtgataatggcaatatcccctattttgggactaagcgcggctgtttgggctaagatactttcagcttttagtgataaggaactcgctgcttatgctaaggctggtgctgttgctgaagaggctcttggggccattcgtaccgtcatcgcatttggtggccaaaacaaagaacttgaacgatatcaaaaacacctagagaatgccaaagaaatcggaattaaaaaggcaatatctgctaacatatcgatgggtattgcttttctccttatatatgctagttacgctttggccttctggtacgggtcgacccttgtaatctccaaagaatatacaatcggcaatgctatgaccgtttttttttccattctgatcggcgctttttctgtcggacaagcggctccctgcattgatgccttcgcaaatgctcgtggtgcagcttacgtgattttcgacataatcgataataaccctaaaattgatagcttctccgagaggggacacaagcccgattcaattaagggcaatctcgagtttaatgatgttcacttttcgtaccctagtagagccaacgttaagatcttgaaaggccttaacctgaaagttcagtcagggcaaactgtggctttggttggcagtagcggctgcgggaagagcaccaccgttcaattgattcagaggttgtacgacccggatgaaggtacaattaatatcgatggacaagacatacggaatttcaacgttaactatttacgtgaaatcatcggtgttgtttcccaagaaccagtgctgttctcgaccacaatcgctgaaaacatctgctacgggaggggaaacgtgactatggacgaaatcaagaaagcagttaaagaggctaatgcatacgaattcatcatgaaattgcctcaaaaatttgatacactggtgggagagaggggtgctcagttatccggaggccaaaaacagcgaatcgctatcgctagagcattggttagaaatcctaaaattttgctcctggatgaagctacatctgctcttgatactgaatctgaggctgaggttcaggctgcacttgacaaggcaagggaaggaaggacaactattgttatagcacacaggttgagcacagtgcgtaatgccgatgtgattgctggatttgaagatggcgttatcgtggaacaaggatcacactctgagttgatgaagaaggaaggtgtgtactttaagttggtgaacatgcagacttcaggttcccaaatacagtcagaggaatttgagctcaatgatgaaaaagccgcaacaagaatggcacccaacgggtggaaatccaggctgtttcgacatagtacccagaaaaatttgaagaactctcaaatgtgccaaaaatccttggacgtcgaaaccgatggccttgaagcgaacgtccctcccgtgagtttcctaaaagtactgaaactaaataaaacagaatggccttattttgtagttggcactgtgtgtgctattgctaatggtggacttcaaccagcttttagcgttatattttctgaaataatagctatcttcggccctggtgatgatgcggttaagcaacaaaagtgcaatattttctcactcattttcctctttttgggtataatttcatttttcacattttttttgcaaggtttcacattcggtaaagccggtgagattctcacgaggcgtcttagatctatggcctttaaggctatgctacgtcaggatatgtcttggttcgatgatcataaaaactcaactggtgcccttagtacaaggcttgctaccgatgctgcacaagttcagggtgctacaggtactcgtttggcattgattgctcagaacattgctaatcttggaacaggtatcataatatccttcatttacgggtggcagttaacattgttgctgcttgcagtggtccctatcatcgcggtctccgggatcgttgaaatgaaattactagctgggaatgctaaacgagacaaaaaggagctcgaagcagccggaaagattgccaccgaggcaatcgaaaatattaggactgtagtttcattgacgcaggaaaggaaatttgaaagcatgtacgtcgagaaactttatggaccataccgaaatagcgtgcagaaggcgcacatctacggtatcactttttctattagccaggcatttatgtatttcagctacgcaggttgctttaggttcggagcttacttgatcgtaaatggacacatgaggttcagagacgttattcttgtctttagtgcaattgttttcggagcggttgccctcggtcacgccagttctttcgctcccgattatgccaaagccaagctttccgctgctcatttgttcatgctatttgaacgccagcctcttattgattcttattcggaagaaggattaaagcctgacaagtttgaaggcaacatcactttcaatgaggttgtgttcaactacccaaccagggcaaacgttcctgttcttcagggactatcattagaggttaagaagggccaaaccctagcgctcgttggatcgtctggttgcgggaaaagtaccgtagttcaactcctcgaacgcttctatgatcctctagctggcacagtgtttgttgacttcggattccaacttctggacggtcaggaagctaaaaagcttaatgttcagtggttacgtgctcaactagggattgtgagtcaggagccaattcttttcgattgcagtatagcagaaaatatagcctatggtgataattccagagtggttagtcaagatgagatcgtgtcagccgctaaagctgctaacatccatcccttcatcgagacattgcctcacaagtacgagacacgtgttggggacaaaggtacgcaactaagcggtggacagaagcagagaattgctatagccagggcactcatcagacaaccacagatattgttgctggatgaagctacttccgctttggacaccgaaagtgagaaggtggttcaggaggctcttgataaggctagagaggggaggacctgcatcgtcattgctcacaggctaagcacaattcaaaacgcggacctcatcgtagttttccaaaatggtcgtgttaaggaacatggcacccatcagcaacttctcgcacaaaaggggatctatttttcaatggtcagcgttcaggccgggacccagaacttg

SEQ ID NO: 200286 - DNA, 3858 bp, Artificial Sequence
  derived and/or modified sequence
atggaccttgaagccgcgaaaaatggcactgcgtggaggccaacctctgcagaaggtgattttgagctgggcatctcaagtaagcagaaacggaagaaaaccaagacagttaaaatgataggcgtcctgacgctgtttagatacagcgactggcaagacaagcttttcatgagccttggaactatcatggctattgcccacggatctggcttgccactcatgatgatagtttttggagagatgacggataagttcgtggacacggccggcaattttagctttccggtgaacttcagtctcagtctgctcaatcccggcaagatcctggaggaagaaatgaccaggtacgcttattattactcgggcttgggagccggtgtcctcgtggcagcctatattcaggtttctttctggacacttgctgccggtagacagatacggaaaatccggcagaaattctttcacgccattctaagacaggagatcggctggtttgatattaacgatacgacggaactgaacacaaggttgaccgacgatatctccaaaatctccgagggtataggggacaaggtgggaatgtttttccaagcggtagccacattctttgcaggcttcattgtgggctttatccggggatggaagctgacactggtcattatggccatttcgcctatcctgggcctgtcagctgccgtgtgggccaaaatactaagcgccttctctgataaagaacttgcagcctacgcgaaggcaggagcagtagccgaagaggcactcggagccatccgcactgttattgcatttggtggccagaataaggagctggaaagatatcagaaacacttagagaatgcaaaggaaatcggaattaagaaagctatctcagccaacatctctatgggaattgcatttcttctcatatatgcatcctacgccctcgcattttggtatggatctacgctggttatctcaaaagaatacacaataggcaacgcaatgactgtgtttttttctatcctcattggtgccttcagtgtgggacaggccgcaccgtgcattgatgcctttgctaatgcgagaggagccgcatatgttatttttgacattatcgacaacaaccctaaaatcgacagttttagcgagaggggtcacaagccagattccatcaagggcaatctcgagttcaatgatgttcacttctcatatcctagtcgtgccaacgtgaaaatactgaaagggctgaacctgaaggtccagtcagggcagaccgtcgccttggtcggaagcagtggatgcggaaaaagtacgaccgttcaactgatccagcggctatatgatcccgatgaaggcacgatcaatattgatggccaagacatcagaaactttaacgtcaactacctcagggaaatcataggcgtggtttctcaggagcctgtgctgttctcaaccactattgccgaaaatatctgttacgggcgcgggaacgtaacaatggatgagatcaagaaagctgtgaaagaagcaaacgcctatgagttcataatgaaactgccacagaaatttgacacattggttggcgagagaggagcacagttgagcgggggccagaagcagagaattgctattgcgcgcgcgctcgtacggaaccccaaaatcctgttactggacgaggccacgagtgcccttgacacagagagtgaggccgaggtgcaagctgcgctggacaaggcccgtgaagggcgtactaccatagtgatagctcaccgtctctccacagtccgcaatgctgatgtcattgcggggttcgaagatggagttatcgtggagcaaggctctcacagcgagcttatgaagaaagagggcgtctacttcaaactcgtcaacatgcagacgtctggctcacagattcagagcgaagagttcgagttaaacgacgaaaaggctgcaacccgaatggctccaaatggatggaaaagtaggctgtttaggcattcgactcaaaagaacttgaaaaattcacagatgtgccaaaagagtctggatgtggagaccgatggattggaggctaatgtcccccctgtgagtttccttaaagtactcaaactgaacaagacagagtggccgtacttcgtggtaggtactgtctgcgctatcgcaaatgggggattgcagccggccttttctgtgatcttcagcgagatcattgctatttttggacccggagacgatgccgttaagcagcagaagtgcaatatctttagcctgatatttctatttctcgggattatttcctttttcacgtttttcttgcagggatttactttcggaaaagccggagaaattttaactcgccgccttcgaagcatggcatttaaagcaatgctgcggcaggatatgtcctggttcgatgatcacaagaattccactggagctttaagcacgaggttggcaaccgatgccgcccaggtgcagggtgccacggggacccgcctcgcattaattgctcagaatattgccaacctgggaacagggatcattattagttttatttatgggtggcaactcaccttactgctgctggccgtggtccccatcattgcagtttccggaattgttgagatgaaactcttagcgggaaatgccaaaagggataaaaaggaactcgaagctgcgggtaaaattgcaacagaggccatagaaaacatacggacagtagtgtctttaacccaagaacgaaaattcgaatcaatgtacgtggagaagctctatggtccttatcgtaacagcgtgcaaaaagcccacatatatggcatcacgttcagcatttcacaagcatttatgtattttagctatgcggggtgcttccggttcggggcctacttaatcgtgaatggacatatgagatttcgggacgtgattctggtttttagtgccatcgtgttcggagccgtggctctgggccatgcaagttccttcgcccctgattatgctaaggccaagttgtccgccgcacatctattcatgctcttcgagcggcagcccctcatagacagctattcagaagagggcctcaaacccgataagtttgaggggaatataacctttaatgaggtggtcttcaactacccgactagagcgaatgtacctgtcctccaaggactgtcactcgaagttaaaaaaggccaaacgcttgccttagtgggcagttccggttgcggaaagtcaacggtcgtgcagttgctggaacggttttatgacccgctggctgggactgtgtttgtagactttggctttcagttgttagatggccaagaagcaaagaaactgaatgtgcagtggctgcgcgcccagttgggaatcgtgtcccaagaaccaatcctctttgattgttctatcgcagagaatattgcctatggcgataactctagagtggtgagtcaggacgagatcgtgtctgcggcgaaagccgccaacatccacccattcattgaaactttaccccacaaatatgagacccgcgtcggagacaaaggaactcaactgtcagggggtcagaaacagcgaatcgctattgctagagctttgattcgacagccccaaatattgctcctggatgaagccacatctgcgctggacaccgaatcagaaaaagtagtgcaggaggcgctggacaaggctcgtgaggggcggacttgcattgtgatcgctcataggctcagcactattcagaacgccgacctgattgtggtattccagaatgggcgtgtgaaggaacatggcacacatcaacagctgctcgcccagaagggaatttatttcagcatggtatcggtccaggcaggcacccagaatctc

SEQ ID NO: 200287 - DNA, 3858 bp, Artificial Sequence
  derived and/or modified sequence
atggatctcgaagccgcaaaaaacggtacagcctggaggccaacatctgccgagggtgactttgaactgggcatctcttccaagcagaagaggaagaagactaaaactgtgaagatgatcggtgttctgaccctttttcgttactctgactggcaggacaaactgtttatgagcctcggtaccattatggccatagcccacggctccggactgcctttgatgatgatagtcttcggcgagatgaccgataagtttgtggacaccgcaggaaatttctctttccctgtgaacttcagtctctctttgctgaatcccggcaagattctggaggaagagatgaccaggtacgcttactattattccggtttgggcgcaggtgtcctcgtagctgcctacattcaagtatctttttggactctggccgcaggccgccagattcgcaagattcgccagaagttctttcatgccattttgcgccaagaaattggttggtttgacataaatgatacaaccgagctgaacactaggctgaccgatgacatcagtaaaatctccgagggtataggtgataaagtgggtatgttcttccaggctgttgccaccttcttcgctggtttcatcgtgggcttcatcagaggatggaagcttaccttggttatcatggccatctcccctatcctgggcttgtccgctgcagtgtgggccaaaattctcagtgcctttagcgataaggagctggcagcttatgccaaagcaggagctgtagccgaagaggcccttggcgctatcagaactgttatcgccttcggcggacaaaacaaggagctggaaaggtaccagaagcacctggagaacgctaaggagataggtatcaagaaggccatctctgccaacatcagcatgggaatcgcttttctgctgatttatgcctcttacgccctcgctttttggtacggatccactctggttatcagcaaggagtacaccatcggcaacgctatgaccgtgtttttctccattctgattggagccttttccgttggacaagcagctccatgtattgacgctttcgctaacgccaggggagctgcctatgtcattttcgacataatcgataataatcctaagatcgactccttctcagagcgcggtcataagcctgactcaatcaaaggtaatcttgagttcaacgatgttcatttttcctacccttcaagggctaatgtgaaaattctgaagggactgaacctcaaagtgcaatctggacagaccgtagcactggtgggatctagcggttgtggtaagtctactaccgtccaattgatccaacgtctctacgacccagatgagggtactattaacatagatggccaggatatcaggaattttaatgtgaactacctgagggagattatcggtgtggtttctcaggagccagtgctcttctccacaacaattgcagaaaacatctgttatggaagaggaaacgttaccatggatgagatcaaaaaggccgtcaaggaggccaacgcttacgagttcatcatgaaattgccccagaagttcgataccctggtgggcgagcgcggcgcacaactctcaggcggtcagaagcaacgtatcgccatcgcacgtgcccttgtacgcaaccctaagatcctgctccttgacgaagctaccagcgcacttgacacagaatctgaggctgaagttcaagccgcactcgacaaagctagagaaggacgtacaactattgtcatagctcacagactgtctacagtccgtaatgctgatgtgattgctggattcgaagacggagtcatagtggagcagggatcccattccgaactgatgaaaaaggaaggagtttactttaaactggttaacatgcagacctctggttcacagatccagtccgaggagtttgagctcaacgacgagaaggccgccaccaggatggcccccaatggttggaagtcccgcttgttcagacactctactcaaaagaatcttaagaactctcagatgtgtcagaagagcctcgacgtcgagacagacggtctggaggccaatgtgccacctgtctcattcctcaaggtactgaagctgaacaagaccgagtggccttattttgtcgtcggaactgtatgcgccattgctaacggcggcctgcagcccgcattctccgtaatcttctcagaaatcattgcaatcttcggacctggagacgatgccgtcaagcagcagaagtgcaatatcttcagtcttatcttcctctttctcggtataatctctttcttcactttttttctgcaaggcttcaccttcggtaaagctggagagatcctgactaggagactcaggtctatggctttcaaggccatgctgagacaggacatgagttggtttgacgaccataagaactccacaggcgcactcagcaccaggttggcaacagatgcagcacaagtgcagggtgctaccggaactagactggctcttattgcccaaaacattgccaatctcggaactggtattataatcagctttatttatggttggcaattgacactcctgttgcttgccgtggtgccaatcattgctgtctcaggaatcgtagaaatgaagcttctggcaggcaatgcaaagagggataagaaggagcttgaggccgctggaaaaattgctactgaggcaatcgagaacattcgcacagttgtatccctcacacaggaacgcaagttcgaaagcatgtacgtagagaaactttacggaccctaccgcaactccgtgcagaaggcccacatctacggcattactttctcaatttcacaggccttcatgtacttttcatacgctggctgcttcaggttcggcgcctacctcatcgtgaatggccatatgcgtttccgcgatgttatcttggtcttctctgccattgtgttcggtgctgttgccctgggtcacgcttcatctttcgctcctgattacgccaaggccaaactgagtgccgcccacttgttcatgttgttcgagagacagccactcatcgattcttactctgaggagggcctgaagcctgataaattcgaaggcaatataaccttcaatgaagtagtgtttaactatcccacacgcgctaatgtgcccgtgcttcagggcctgagcctggaagtcaagaagggacagactctcgctctggtgggatcaagtggctgcggcaagtcaactgtggtgcagctcctcgagaggttctacgacccacttgccggcacagtttttgtggatttcggcttccaactcctcgatggtcaagaagccaaaaagttgaacgtgcaatggctgagggcccagctgggtatcgtgagccaagagcccatattgttcgattgttcaatcgccgagaacatcgcttacggcgacaattcaagagtagtgtcacaggacgagatcgtcagcgcagccaaggcagctaacattcacccttttattgagaccctgccacataagtatgaaacaagggtaggcgacaaaggaacccagctttccggcggacagaagcagaggattgctattgcaagagccttgatcagacagccacaaatccttctcctcgacgaggcaacaagtgcacttgacacagagtctgagaaggtcgttcaggaagctcttgacaaggcccgcgagggacgcacctgtatcgttatcgcccaccgcttgtccaccatccagaacgccgatttgatagtcgtgtttcaaaacggacgtgtgaaggaacacggcactcaccagcaactgctcgcacagaagggtatatatttcagtatggtaagtgtgcaggctggtacccagaacctc

SEQ ID NO: 200288 - DNA, 3858 bp, Artificial Sequence
  derived and/or modified sequence
atggacttggaggctgccaagaatggtacagcttggaggcccacatccgcagagggcgacttcgagttgggaattagttcaaaacagaagagaaaaaagactaagaccgtgaaaatgattggtgtcctgactctgttccgttattccgactggcaggataaactttttatgagtttaggtactataatggctattgcacatggatcaggactgcctcttatgatgattgtttttggcgaaatgacagataagttcgtcgacaccgcgggcaatttcagttttcccgtgaacttctctctttctttgctcaaccccggaaaaatactcgaggaagaaatgacccggtatgcttattactatagcggattgggtgccggcgtgctcgtcgccgcctacatccaggtgtctttctggacgctcgcggccggaagacagattaggaagatcagacagaaattttttcacgctattcttcgccaggagattggatggtttgacattaacgacactacagaattgaacacccgcttaactgacgatattagtaaaatttccgaaggaatcggcgacaaggtgggaatgttttttcaggcggtggctacgttctttgcagggtttattgttggattcataagaggatggaagctcaccctggtaattatggccattagtcccattttgggcctgtccgcagccgtgtgggccaagattttaagtgccttcagtgacaaggagctcgcagcgtacgccaaggcgggcgccgttgccgaggaggccctgggcgctatccgcacagtgattgcctttggcggccagaacaaagaattggagaggtaccaaaagcatttggagaatgcaaaggaaatcggcattaagaaggcaatttctgcaaatatctctatgggtatagcattcctgcttatatacgcttcttatgcccttgctttttggtacgggagtactctggtgatcagtaaggagtacaccattggcaatgccatgacagtcttcttcagtattctcatcggagcctttagcgttggacaggcagcaccctgtattgatgccttcgccaacgcgcggggcgccgcttacgtgattttcgatataatagacaataatcccaaaatcgatagtttcagtgaacgcggccacaagcctgattcaatcaagggcaatcttgaatttaacgatgtgcacttttcatatccctccagagccaatgtgaagatactcaagggcctaaacctgaaggtgcagtctggacagacagtggctctggtcggttcttccggatgtgggaagagcaccaccgtgcagcttattcagcgtctgtatgatcccgacgagggaactattaacatcgatgggcaggatataaggaacttcaatgtcaactaccttagggagatcattggcgtggtctcgcaggaacccgtccttttttcaaccaccatagctgagaacatatgttatggaaggggcaacgtgacaatggatgaaataaagaaggccgtgaaagaagctaacgcctatgaatttatcatgaagctcccacagaagttcgatacccttgtaggtgagaggggagcccaattgtctggtgggcaaaagcagcgtatagctatagctagagcactggttaggaaccccaaaattctactcttagatgaagccacatcggctctggacaccgaatctgaggctgaagtccaagccgcactggacaaggctcgcgagggcagaactaccatcgttatcgctcacaggctgtccacggtgcggaatgcagacgtgattgcgggatttgaggatggcgtcattgtcgagcaggggtcccatagtgaattgatgaagaaagagggtgtttatttcaagctggtcaacatgcagacatccggatcccagattcagtccgaggagttcgaactgaacgacgagaaggcagccacgcggatggctccaaacggatggaagtcccgactgttcaggcattctacacaaaaaaaccttaaaaattctcagatgtgccagaagagcctcgacgtggagaccgatggtctggaggctaatgttccacccgtgagctttctgaaagtgctaaagctcaacaagactgagtggccctacttcgtggtaggcactgtgtgcgcaatcgccaatggtgggctgcagccagccttctcagtaatctttagcgagatcattgcgatttttggacctggtgacgacgcagtgaagcagcagaagtgcaacatcttctccctgatctttttgttcctaggaattatttcgttcttcacattttttctccaaggctttactttcgggaaagctggcgagatcctaacccggcgcttgcgttctatggcattcaaagctatgctcagacaagatatgagttggtttgacgaccataagaattccacaggagccctcagtacacgcctagcaactgacgcagcccaggtacagggcgccacaggaacgcgtctggccctcatagcccaaaatatagccaaccttggcacaggcattattatctcctttatatatgggtggcagctgacgctgctgctgctggctgtcgtccctatcatcgccgtgtcagggattgtcgaaatgaagctcctggccgggaatgctaagagggataaaaaggagctggaggcggccggcaaaatcgccacggaggcaatagagaacatcagaacagtggtgtctttaacccaggaacgcaagttcgagagcatgtacgtggagaaactttatggtccatatagaaacagtgtgcagaaagcccacatttatggtattaccttctctatctcccaggctttcatgtatttttcgtatgccggctgctttcggtttggtgcatatctaattgtcaatggtcatatgcggttcagagatgtgatattggtgttttcggcgatagtctttggtgcggttgccctgggccacgcttccagctttgctcctgactacgccaaagcaaaactgagcgccgcccacctgtttatgctctttgaaaggcagcccttgattgatagttacagtgaggaagggttaaaacccgacaaattcgaggggaatatcacgtttaatgaggttgtgttcaactacccgaccagggctaacgtgcctgtcctgcagggactgagcctcgaagtgaagaaaggccagactctagccttagtcggcagttccgggtgcggcaagtcaacagtggtccaactgctcgaaaggttctacgatccacttgcaggtacagtctttgtggattttggattccagttgttagacggtcaggaggccaaaaagctgaacgtccagtggttgcgcgctcagttaggaattgtgtcccaggagccaattctgtttgattgtagcatcgcagagaatatcgcctatggcgacaatagtagagtggtaagccaggacgaaattgtatcagccgccaaggccgctaacattcatcccttcatcgagaccctacctcacaaatatgagactagagtcggagataaggggacgcagctgtccggcggccaaaagcaacgaatagcgatcgcaagagcactcatcaggcagccccaaatcctgctgcttgacgaggcgaccagcgcccttgacaccgagtcggagaaggttgtgcaggaggctctcgataaagcccgcgaaggacggacctgtatcgtaatcgctcacaggctatctaccattcagaatgcggacctcattgtagtctttcagaatgggcgagttaaggaacacgggacacatcaacagcttttagcacaaaaaggcatctacttttccatggtgagcgtccaggccggaactcaaaacctc

SEQ ID NO: 200289 - DNA, 3858 bp, Artificial Sequence
  derived and/or modified sequence
atggaccttgaagcagcgaagaatggcactgcgtggcgtcctaccagcgcagagggtgactttgaactcgggatatcaagcaagcagaagcgaaaaaagactaaaactgtcaagatgattggagtcttgaccctgttcagatacagcgactggcaggacaagctgtttatgtcgctgggcactattatggcaattgcccatgggtcgggactgccgctgatgatgattgtctttggagaaatgaccgataagttcgtggacacggccggaaacttttcctttcccgtcaacttcagcctttcgctgttgaaccctggaaaaatcttggaagaggaaatgacccgatacgcatactactactcgggcctcggagcaggagtccttgtggcagcctacattcaagtgagcttctggactctggcagccgggcgccaaattcgcaagatcagacagaaattctttcatgcgattctgcgtcaagaaattggatggtttgacataaatgacactactgaattgaacactagacttaccgatgatatttccaagatcagcgagggaataggggacaaggtggggatgttttttcaagcagtggcaacttttttcgcaggatttatcgtgggtttcattagggggtggaagctgaccctggtgattatggcaatctcgccaattctgggactgtcggctgcagtctgggctaagattctgtcggcattcagcgacaaggagctggcagcatacgcaaaagcaggtgcagtcgcagaagaagccctcggcgccattaggacggtgattgcattcggagggcaaaacaaggaactggaacgataccagaagcacctggaaaacgccaaagagatcgggattaagaaagcaatttccgcaaacattagcatgggtattgcgtttctcctcatctacgcatcctacgcccttgcattttggtacggcagcacgctcgtgatttcgaaggaatacaccatcgggaacgcaatgaccgtctttttctctattcttatcggtgcattttcagtcggacaggcggcaccgtgtatcgacgcttttgcaaatgcacggggtgcagcttacgtgattttcgacataatcgacaataacccgaaaattgattccttttccgaacgcggacataaaccagactccattaagggcaaccttgagtttaacgacgtccattttagctacccttcgagagcaaacgtgaagatcctgaaaggactcaatctgaaggttcaaagcggccagaccgtggcattggtgggaagctcggggtgtggtaagagcactactgtgcagctgatccagcgcctgtacgatcccgatgagggaacgatcaatattgacggacaagatatcaggaactttaatgtcaactaccttagagagattataggtgtggtttcgcaagagcccgtcctgttttcaaccaccatagctgaaaacatttgctacggccgtgggaacgtgaccatggatgaaatcaaaaaggcagtgaaggaggctaatgcatacgaattcattatgaagctcccccagaaattcgataccctggtcggagagcgcggggcacaactgtctggtggacagaaacaacgtattgccattgcacgcgcactcgtgagaaaccccaaaattcttcttttggatgaggcaaccagcgcactggacactgagtcagaagctgaggtgcaagcagcccttgacaaagctagagagggtcgaaccactatcgtgatcgcacatcggctttctaccgtgcgaaacgctgacgtcattgcaggattcgaagatggggtgattgtggagcagggctcgcattcagagttgatgaagaaagaaggcgtgtactttaagttggtcaacatgcaaacctccggttctcaaattcagtcggaggaatttgaactgaacgatgagaaggcagccaccagaatggcaccaaatggatggaaatcccggctttttaggcactcgacgcaaaagaacctgaagaactcccaaatgtgtcagaagtcccttgatgtcgaaactgatgggcttgaggcaaacgtgccacccgtgtcgtttctcaaagtgctgaaactcaataagaccgaatggccttactttgtggtgggtaccgtgtgcgcaatcgcaaacggaggactgcagcctgcgttctccgtgatcttttcagagatcattgccatttttggaccgggggatgatgcagtgaaacagcagaagtgcaacattttctcgcttatctttctgtttctcggtatcattagcttctttaccttttttctgcagggatttactttcggtaaagcaggtgaaatacttaccaggcggcttagatcgatggcattcaaggcgatgctgcgccaagatatgtcatggttcgacgatcacaagaactccaccggtgccctgtcaacccgcttggcaaccgatgcagcacaagtccaaggcgcaactgggacccggcttgcactgatcgcacaaaacattgccaacttgggtactgggatcatcatctcgttcatttatgggtggcaactgaccttgttgctgctggcggtcgtgccgatcatagccgtgagcggtatcgtggaaatgaaactgctcgcaggaaacgcaaagcgggacaaaaaggagctggaggccgccggtaagatcgcaactgaggcaattgaaaacattagaaccgtggtgtcccttactcaagaaaggaaatttgaatccatgtacgtcgaaaaactttacggaccttatagaaattcggtgcagaaggcgcacatttatggaattacgttcagcatctcgcaggcattcatgtacttctcgtacgcgggatgttttaggtttggtgcatacctcatagtgaacggtcatatgagatttagagacgtgatcctggtgttctcggccattgtgttcggagcagtggccctgggccatgcaagctcctttgcaccagactatgcaaaggccaagctgtcagcagcacatcttttcatgctgttcgaacgacaaccacttatcgattcgtactccgaagaaggtctgaagccagacaaattcgaaggaaacataacctttaatgaggtcgtctttaactatcctacgcgggcaaatgtgcctgtcctccagggtctgtcactcgaagtcaagaagggtcaaacgcttgccctggtggggagctccggatgtgggaaaagcaccgtggtgcaattgctcgaaagattttacgatcccctcgcgggtaccgtttttgtggactttggatttcagctgttggacggtcaggaagcaaagaagctgaacgtgcaatggctgagggcccaactggggatcgtctcccaggaacctatcctctttgattgttcaattgcggagaacattgcgtatggcgataactcgcgcgtagtgtcgcaggatgagattgtttccgcagcaaaagccgcaaatatccatccgtttatagaaacccttccccataagtacgaaacgcgggtgggtgacaagggtacccaactctccggcggccagaaacaacggattgccatcgctcgtgcacttatcagacagcctcagatactgctgttggacgaagcaacctcggcccttgatactgaaagcgagaaagtggtccaggaagcacttgataaagccagagaaggtcgtacctgtattgtcattgcgcatagactgtcaactatccaaaatgcagatttgattgtcgtctttcaaaacggccgagtgaaggagcacggcacccatcaacagctgctcgcccagaagggaatctacttttcaatggtgtcggtgcaggcgggaacccaaaacctc

SEQ ID NO: 200290 - DNA, 3858 bp, Artificial Sequence
  derived and/or modified sequence
atggatcttgaggcagcgaagaatggtaccgcatggcggcctacctcagcagagggtgacttcgaactgggcattagtagcaagcagaagaggaaaaagactaagaccgtcaagatgattggtgtgctgacgctgtttagatactcagactggcaagataagctgttcatgtcccttggtactattatggctattgcccacggctcggggcttcccctgatgatgattgtgtttggggagatgactgataagtttgtggacaccgcgggaaacttctcgttccctgtgaatttctcgctttcccttctgaaccctggtaagattcttgaagaagagatgaccaggtacgcatactactactccggactgggcgcgggggtgctggtcgcggcgtatatacaggtcagcttctggactctcgctgcaggtagacagatccggaagattcgccagaaattcttccatgccattctgagacaagaaatcgggtggtttgacattaacgatactaccgaactcaatacccgcctcactgatgacataagcaagattagcgagggaattggggataaggtgggaatgttctttcaggcagtggccaccttttttgccggatttatcgtgggattcattaggggatggaaacttactcttgtaatcatggccatttcaccaattctcggtctgtcggcagcagtgtgggcaaagatactttcggcattttccgataaggaactggccgcatacgcaaaggccggagcagtggcagaagaagccctgggggcaattaggactgtgatcgcattcggcggacaaaacaaggaactggaaaggtaccagaagcaccttgagaacgccaaagagatcggtattaagaaagcgatttcagcgaacattagcatgggaattgcgtttctgctcatctacgcctcgtacgcactcgcattttggtacgggtctaccctggtcatttcaaaggaatacacgattggaaacgcgatgaccgtgttcttcagcatcctgataggtgcattttccgtgggacaagcagcaccttgtattgatgcatttgccaatgcaaggggagcagcgtacgtgatttttgacattattgacaacaaccctaaaatcgactcgttctccgaaagaggtcataagcctgattcaatcaagggaaacctcgagttcaatgatgtgcacttttcgtacccatcgcgagccaacgtgaagatccttaagggactgaatcttaaggtgcagtccggccaaactgtcgcccttgtcggatctagcggctgcgggaagtcaaccaccgtgcaattgattcaaagactctacgatcctgacgaaggaaccataaacattgatggacaagatatcagaaatttcaacgtgaactacctgcgcgagataattggcgtggtgtcacaggaacctgtcctcttttccactaccatcgcagaaaacatatgttacggccgtggtaatgttaccatggatgagattaagaaggcagtgaaggaagcaaacgcatacgaattcattatgaaactccctcagaaatttgataccctggtgggtgagcgaggagcgcagctgtccggagggcaaaagcagcggatcgctatcgcgcgcgcactggttagaaaccccaaaatcctgctgctggatgaggcaactagcgcactcgatacggagagcgaggcagaagtgcaagctgctttggataaggcccgcgagggtcgtactactattgtgattgcccataggctgtcgaccgtgcgcaatgcggacgtcatcgcaggattcgaagatggcgtgattgtggaacaaggttcccatagcgagcttatgaaaaaggagggagtgtactttaaactggtgaatatgcagacctcgggatcccaaatccaatccgaggaatttgagcttaatgatgagaaggcagccacccgcatggcaccgaatggatggaagtcccgtctctttagacattccactcagaagaatctgaagaatagccagatgtgtcaaaagtcgcttgatgtggagactgacgggcttgaagcaaacgtgccaccagtgtcctttcttaaggtgctgaaactcaacaagaccgaatggccctactttgtcgtcgggaccgtgtgtgccattgccaacggcggtttgcagcccgcattctcggtgatattcagtgaaatcatcgcaattttcggaccaggagatgatgcagttaaacaacaaaaatgtaatatcttttcactgatttttctgtttctcggcatcatctcgtttttcaccttttttctgcagggattcacttttggaaaggcaggagaaattctgactcggcgactgagaagcatggcgttcaaagcgatgttgaggcaagacatgtcgtggtttgatgatcacaagaactccactggagccctctcaacgagactcgcaaccgatgcagcgcaagtgcagggggcaaccgggaccaggcttgcactgattgctcagaacattgcaaacctgggaactggaattatcatttcgttcatttatgggtggcagcttactcttcttttgcttgcggtcgtccccatcatcgctgtgagcggcatcgtggaaatgaagctccttgcaggtaatgccaaaagagataagaaggagctcgaagccgcaggaaaaatcgcaaccgaggcgatcgagaacattaggactgtcgtcagccttactcaagagcgcaagttcgagagcatgtacgtggaaaaactgtacgggccttaccgcaattcggttcaaaaggcacatatctacggaattactttttcgatatcgcaggcattcatgtacttttcctacgcaggttgtttcagatttggggcatacctcatcgtgaatggacatatgcgctttcgtgacgtgattttggtcttttccgccattgtgttcggcgcggtggccctcggtcatgcatccagctttgcacctgattacgcaaaggcaaagttgtcggccgcccatctgtttatgttgtttgagaggcaacctctgatagatagctactccgaggagggtctgaaaccggataagtttgaaggaaacatcacctttaacgaggtcgtgttcaactacccaacgcgtgcaaatgtgcctgtccttcagggactctcacttgaagtgaaaaaggggcaaaccttggcacttgtgggttcatcgggatgtggaaaatccaccgtggtccaattgcttgagcgcttctacgatccccttgccggaaccgtgttcgtggacttcgggtttcagcttcttgacgggcaagaagcaaagaaactgaatgtgcagtggctcagagctcaactgggcatcgtctcccaagagcctatactgtttgattgttccatcgcggaaaacatcgcatacggcgataattcacgcgtcgtttcccaagacgaaatagtttccgccgcaaaagcagcaaacatacacccttttatcgagactctccctcacaagtacgaaacccgagtgggagacaagggtactcaactgtcgggtggccaaaagcaaaggattgcaatagcaagagcactcatccgccagccgcagatactcttgctggacgaggctacttcggcacttgacactgagagtgaaaaggtggtccaagaagcactcgataaggcaagggaaggtcggacttgtatagtgatcgcacaccggcttagcactatccagaatgccgatcttattgtggtgttccaaaatggacgtgtcaaagaacacgggactcatcaacagttgctggcacaaaagggaatttacttttcaatggtgtcggtacaagcaggtacccaaaacctt

SEQ ID NO: 200291 - DNA, 3858 bp, Artificial Sequence
  derived and/or modified sequence
atggatcttgaggctgcaaaaaacgggaccgcttggcgtccgacctccgcagaaggtgacttcgagctcggcatttcgagcaagcagaagagaaaaaagactaaaaccgtcaaaatgataggggtgcttacgctcttccgatactctgattggcaggacaagctcttcatgtctctggggaccattatggcgattgcccacggctccgggctcccacttatgatgatcgtgttcggagaaatgaccgataagtttgtcgacactgccggcaacttttcgttcccggtgaacttctccctctcccttttgaatcccggaaagattctggaagaagaaatgactagatatgcctattactactcggggctgggagcaggtgttctggtggcagcctacattcaagtgtccttttggaccctcgccgccggtagacaaattcggaagattcgacaaaagtttttccatgctatactgaggcaagagatcggatggttcgatatcaacgacactaccgaactgaataccagactcactgatgacatctccaagatttcggaaggaatcggcgataaggtcggaatgtttttccaagcggtggccaccttttttgctggttttatcgtgggtttcatacgggggtggaaactgacgctcgtgatcatggcaatttctcctattctgggacttagcgccgcagtgtgggcaaaaatcctgtccgcgttcagcgacaaagaactggcagcatacgcaaaggccggggccgtcgcagaagaggcccttggagcaatccgtactgtgattgcgtttgggggtcagaacaaagaacttgagcggtaccaaaagcacctcgaaaacgcgaaggaaattgggatcaaaaaagcaatttccgccaacatttcaatggggatcgcattccttctgatttacgcatcatacgcgctggccttctggtatggatccacgcttgtcatttccaaggaatacaccattggaaacgcaatgaccgtgtttttctccatccttattggagcattttccgtcggacaggcggcgccctgtattgatgctttcgccaatgcccgcggtgcagcatacgtgatctttgacataatagacaacaaccccaagatcgattcctttagcgaacggggtcacaaacccgactcgataaagggcaatctcgaattcaacgacgtccactttagctacccctcgagagcgaacgtgaaaatcctcaagggtctgaatctgaaggtgcaatccggtcagactgtggcactggtgggcagctcaggctgtggaaaatcgactaccgtgcaactgattcaacgcctctacgatccagacgaaggaaccattaacattgatggacaagacatcagaaatttcaacgtgaactaccttcgagagatcattggtgttgtgtcgcaagagcctgttctgttcagcactactatagcagagaacatttgttacggacgaggcaatgtcacgatggatgagattaagaaggcagtgaaagaggccaatgcttatgaattcatcatgaagttgccacaaaagttcgataccctcgtgggggagcggggtgctcagctttcgggcggtcaaaagcagcgtatcgcaatcgcaagggccctggtgagaaacccaaagattctgctccttgatgaggcaactagcgccctggatacggagtccgaagccgaagtccaggcagcacttgataaagcacgcgaaggacgcactaccatcgtcatcgcacatcgactttcgactgtgagaaacgccgacgtgatcgctggctttgaggatggggtgatagtggagcagggttcacattcggaactcatgaagaaggaaggggtgtactttaaacttgtcaacatgcaaacttcaggaagccaaattcaaagcgaggagttcgagttgaacgacgaaaaggcagccacgaggatggcacctaacgggtggaaatcgcgtctctttcgccattcaacccaaaagaatctcaaaaactcgcagatgtgccaaaagtccctggatgtggaaaccgatggtctggaagcgaacgtccctcccgtctcattccttaaggtgcttaagctgaacaagactgagtggccttacttcgtggtgggtactgtctgtgcgatcgccaacggtggccttcagcccgcatttagcgtcatctttagcgaaatcatcgcaattttcggcccgggtgatgatgcggtcaagcaacaaaagtgtaacatcttttcgctgatctttctctttttgggcatcatctcattctttacctttttcttgcaaggctttacgtttggcaaggcaggagagattttgacccgtcgcctccgttcaatggcgtttaaggcaatgcttcgtcaggatatgagctggtttgatgaccataagaattcgaccggagcactcagcactagattggccaccgatgcggcccaagtccaaggagcgactggaacccggctggcacttattgcacaaaacattgcgaatcttgggaccgggatcattatctcgttcatctacggatggcagctgaccctcctgctcctggcagtcgtcccgataattgcagtgtcaggtatcgtggagatgaaacttttggccggcaacgccaaacgcgataagaaggaattggaagcagcaggaaagattgccaccgaggcgattgaaaacattaggaccgtggtgtcactgacccaggaaagaaagtttgaatcaatgtacgtcgagaagctctatggtccttaccgaaactccgtccagaaggcacatatctacggtataacgttttcaatctcccaagcatttatgtactttagctacgcaggatgttttcgcttcggagcctacctgattgttaatgggcatatgcgattcagagatgtgattctggtcttttccgcaattgtgtttggggctgtggccctcgggcacgcctcgtcgttcgcaccagattacgcaaaagcaaagctgtccgcggctcaccttttcatgctttttgaacgccaaccactgatcgattcctacagcgaagaagggctcaagcctgacaaatttgaaggcaacattactttcaatgaggtggtgtttaactatcctacgcgcgccaacgtgccggtgctgcagggtctttcgctggaagttaagaaagggcaaaccctggcactggtcggttccagcggctgtggcaagtcgaccgtggttcagcttctggaaaggttttacgatccactggcaggtactgtctttgtggacttcggtttccaacttctggacgggcaagaggcaaaaaagttgaatgtgcaatggcttagagcccagctcggtattgtgtcccaggagccaatcctttttgattgcagcatagccgagaacattgcatacggagacaatagccgggtcgtttcccaagatgaaattgtgagcgccgcaaaggcggcaaatatccacccattcatcgaaaccctcccccataagtacgagactcgtgtgggtgataaaggtactcagctctcgggtggacagaagcaaagaatcgcaatagcccgggcactcattagacagcctcaaatccttctgctggacgaagcaacctcggctctggacaccgagtccgaaaaggtggtgcaagaggcacttgataaggcgagggagggcagaacctgcattgtgatagcccatcgcctttctacgattcaaaatgctgatctcatagtggtgtttcaaaatggacgcgttaaggaacatggaacccaccaacagcttctcgcgcaaaaggggatctacttcagcatggtgagcgtccaggcaggaactcagaacctt

SEQ ID NO: 200292 - DNA, 3858 bp, Artificial Sequence
  derived and/or modified sequence
atggatctcgaagctgccaaaaacgggactgcttggcggccgacctccgcagagggggacttcgagctgggaatctcgtcgaagcagaagcgcaagaaaaccaagaccgtcaagatgatcggcgtcctcaccttgtttcgatacagcgattggcaggataagttgttcatgtcgctgggtaccattatggccatcgcacatggatccggtctgccactgatgatgatcgtgttcggagaaatgaccgacaagttcgtggataccgctggcaatttctcattcccggtgaacttttctcttagcctcctgaacccggggaagatcctggaggaagagatgacgcgctacgcctactactactcggggctcggagcgggcgtgctcgtcgcggcgtacatccaggtcagcttttggaccctcgcggcaggccggcagatacgcaaaatcaggcaaaagttcttccacgcgatcctccggcaggaaattggatggttcgacatcaacgatactactgagttgaacacgcgcctgaccgacgacatctccaagatctcggaagggatcggcgacaaggtcggcatgttctttcaggccgtggctaccttctttgctggatttatcgtcggcttcatccgaggctggaagttgaccctggtgatcatggcaatctccccgatcttgggactgtccgccgcagtgtgggctaagatcctttccgctttctcagacaaggaactcgctgcatacgccaaggcaggagctgtggccgaagaagcgctgggtgccattagaactgtgatcgccttcggaggccagaacaaagaactggagcgctaccagaagcatctggaaaacgccaaggagatcggaatcaagaaagctatcagcgctaatatctcgatgggcatcgcgttcctgctgatctacgcctcctacgccttggcattctggtacggatccacgctggtgatcagcaaagagtacaccatcggaaatgccatgaccgtctttttcagcattctgatcggcgcgttctcagtcggacaagccgcaccatgcatcgacgcattcgcaaacgcacggggtgcggcatatgtcattttcgatatcatcgataacaacccgaaaatcgactccttttcggagcggggccacaagccggattcgatcaaggggaatctggaattcaatgacgtccatttctcgtacccgagccgggcgaatgtgaagatcttgaagggacttaacctgaaggtgcaatcgggacaaactgtcgcccttgtgggatcctcaggatgtggaaagtcgaccactgtgcaactgatccaaaggctctacgacccagacgagggaactattaacatcgatggacaggatatccgcaactttaatgtcaattacctccgcgagatcatcggcgtggtgtcccaagagcccgtgctgttcagcaccaccatcgctgagaacatctgctacggccgcggaaatgtgaccatggacgagatcaaaaaggctgtcaaggaggccaacgcttacgaattcattatgaagctgccgcagaaattcgatactcttgtgggagaacggggagctcagttgtcaggcgggcagaaacaacgcatagccattgctcgggccctcgtccgcaaccctaagatcctcctcctggacgaagcgacttccgcactcgacacggaaagcgaagccgaggtgcaggccgccttggacaaggcccgggagggtaggacgaccatcgtcatcgcgcacagactttccaccgtgaggaacgccgatgtgattgcaggtttcgaggacggggtgattgtcgaacaagggagccatagcgagctgatgaagaaggagggagtgtatttcaagctcgtcaacatgcaaactagcgggtcacagattcagtcagaggaattcgagttgaatgacgaaaaagccgcgactaggatggcgccaaatggctggaaatcccgcctctttcggcatagcacgcagaagaacctcaagaattcccagatgtgccaaaagagcctcgatgtcgaaacggatggtctggaggccaacgtgccgcccgtgtcttttctgaaggtactgaaactgaacaagacggagtggccatacttcgtcgtcggcaccgtttgcgccatcgcgaatggtggactccaaccggccttttcggttatcttctcggagattattgcaattttcggcccgggagacgacgcggtgaaacaacagaagtgcaacatcttttcccttatcttcctgtttctcggtatcatctccttcttcaccttcttcctgcaggggttcacctttggtaaggcgggtgaaatccttacccggcgcctcagatcgatggcatttaaggccatgctcagacaggatatgtcgtggttcgacgaccacaagaacagcactggggcgttgtcaactcggttggcgacggatgcggcccaggtgcagggagctaccggaacgaggctggctctcatcgcgcaaaacatcgcgaacctcggaactggcatcatcatatcctttatctacggctggcaactgaccctgctgttgctggcggtggtgccgatcattgcagtctctggaatcgtggagatgaagctgctcgccggcaatgccaagcgggacaagaaagaattggaagcggctggaaaaatcgccactgaggcaatcgaaaacattcggactgtcgtctccctcactcaggagagaaagttcgagtccatgtacgtggaaaagttgtacggcccttatcggaattcggtgcagaaggctcacatctatggtatcactttctcgatctcccaggcctttatgtacttctcgtatgccggatgttttcggttcggcgcgtacctgatcgtgaacggacatatgcggtttcgcgacgtcattttggtgttctctgctattgtctttggagcagtggctctcggccacgccagctcattcgctccagattacgctaaagccaagttgtccgctgcgcacctcttcatgctgttcgaacgccagcctctgatcgactcatactcggaagagggtcttaagccggacaaattcgagggcaacattactttcaatgaggtggtctttaactatccgactcgcgccaatgtgcctgtgctgcagggtctgtcactggaagtgaagaagggtcaaactctcgctttggtggggtccagcggctgtggcaaatcgaccgtggtgcaacttcttgagagattctacgacccgctggcagggacggtgttcgtcgattttggatttcaactcctggacggacaggaagccaagaagttgaacgtccagtggctgcgcgcccaactcggaatcgtgagccaggagccgatcctgttcgattgttcgatcgcggagaatatcgcgtacggggacaacagcagagtcgtgagccaagacgagattgtgtccgctgccaaagcagccaacatccaccctttcatcgaaaccctgcctcacaagtacgaaactcgcgtgggcgataaaggtacccagttgtccgggggtcaaaaacagcgaatcgccatcgcaagagcacttatcagacagccgcagatcctgcttctggatgaagctacgtccgccctcgacactgagtccgaaaaagtggtccaagaagccttggacaaagcacgcgagggaaggacttgtatcgtgatcgcccaccgtctctcaaccatccaaaatgccgatctgatcgtcgtgtttcaaaacggacgcgtgaaggaacacggtacccaccaacagctcctggcgcagaaggggatctacttctccatggtgtcggtccaagcgggaacccagaatctg

SEQ ID NO: 200293 - DNA, 3858 bp, Artificial Sequence
  derived and/or modified sequence
atggaccttgaggcagcaaagaacggaaccgcgtggcggccaacgtccgcagagggagattttgaactcgggatctcatcaaaacaaaagaggaaaaagactaaaaccgtgaagatgataggtgtgctgaccctttttagatacagcgactggcaggataagctgtttatgtcattggggaccatcatggcaatagctcatggctcgggcttgccgctgatgatgatagtgttcggagaaatgaccgacaagtttgtcgatactgcgggaaactttagcttcccagtgaacttttcgctgtccctgctgaacccaggaaagatactggaggaagaaatgactagatacgcatattactactctggtctgggagcaggagtgctggtggcggcctacatacaagtgtcgttttggactctggcagcgggtaggcaaattcgtaagattagacagaagttcttccacgccatactccgtcaagaaatcggatggtttgacataaatgacaccaccgaacttaacacccgcctgaccgatgatatttcaaagatttcggaaggaattggggataaggttggaatgtttttccaggctgtggcaacgtttttcgcaggattcattgtgggtttcattcggggttggaaacttactctggtgattatggccatttcgcccattttgggcctctcggcagcggtgtgggcaaaaatccttagcgccttttccgataaggagcttgcggcctacgcaaaggctggagcagtggcagaagaagccctcggtgcgattagaacggtcatcgccttcgggggacagaataaagagcttgaacgctatcaaaaacatctggagaacgcaaaggagattgggattaagaaggcaatttccgcaaacatctccatgggcatagcatttcttctcatatacgctagctatgcattggccttttggtacgggtctactcttgtcatcagcaaggagtacacgattggaaacgcaatgaccgtctttttcagcatcctcataggtgcgttttcggtgggacaagcagcaccttgtatcgacgcattcgcaaatgcacggggggcggcatatgttatcttcgacattattgataacaatcctaagattgatagctttagtgaacgcgggcataaaccagattcgatcaaaggtaaccttgagttcaacgatgtgcatttctcctacccctcccgggcgaacgtcaagattctcaaaggtttgaacctgaaggtccaaagcggacaaacggtcgcattggtcgggtctagtggctgcggaaagtctactacggtgcagctgattcagcgcctttacgaccctgatgagggcacgattaacattgatggccaagacatccgcaacttcaacgtcaactacctgagagaaatcattggtgtggtgtcgcaggagcccgtgctcttttccacgactatagcggagaatatctgttacggccggggaaacgtcactatggatgaaatcaaaaaagccgtgaaggaggctaacgcttacgagtttatcatgaagttgcctcaaaagtttgacacccttgttggggagcgcggcgctcagctttccggtggacagaaacaacggattgcaattgccagagctcttgtaagaaatccaaagatccttcttcttgacgaagccacctcggctctcgacactgaatcggaagcagaagtgcaggcagcactggacaaggcacgtgaagggcggactactattgtgatcgcccatagactttcaactgtaagaaacgcggatgtcatagccggcttcgaagatggggtgatcgtggagcaggggtcacattcagaactcatgaagaaggaaggcgtgtactttaagctcgtgaacatgcaaacttcaggtagtcaaatccaatccgaagaattcgaattgaatgacgagaaggccgcgactagaatggcccctaacggatggaagtcgagacttttcaggcactcgacccagaaaaatcttaagaatagccagatgtgccaaaaatccctcgatgtcgaaactgatggtctggaggcgaatgtccctcctgtgagtttcctgaaagtcctcaagctgaataagaccgaatggccttacttcgtggtaggaaccgtctgtgccattgcaaatggaggtttgcagcccgcattttcggtgatcttttcggaaatcatcgcaatcttcggacctggtgacgatgctgtcaagcaacaaaaatgcaacatcttctcattgatttttctgtttcttggcattatctcattcttcactttctttttgcagggctttacgttcggaaaagctggggaaattcttactcgaaggcttagatcgatggcttttaaggcaatgctgagacaggacatgagttggttcgatgatcataagaattcgactggagcactgtcgacccgtctcgcgactgacgcagcccaagtgcagggagccactgggacccgactggccctcattgcccaaaacatcgcgaatctcggcaccggtataatcatcagttttatctacggttggcagcttaccctcctccttcttgcagtggtgccaattatcgcagtgtccggcatcgtcgaaatgaaactgctggcaggtaacgcgaaacgggataagaaggaactggaagccgcggggaaaattgcaaccgaggcaattgaaaacattagaactgtggtgtctctgacccaagaacgaaagtttgaatcaatgtacgtcgaaaagctgtacggaccgtatcgcaattccgtccagaaagcacacatttacggtattaccttcagcatttcccaagcatttatgtacttctcctacgctgggtgctttcggtttggtgcataccttattgtgaatggacatatgaggtttagggatgtgattctcgtgttttcagccattgtttttggtgcagtcgcacttggacatgcttcatcgttcgctcctgattacgcaaaggccaagctgtccgctgcacatctgtttatgctttttgaaagacagcctttgatagatagctactccgaggaaggtctgaagccggataagtttgaggggaacatcacttttaacgaagtggtgttcaattatcctactcgcgccaacgtgccagtcctccagggattgagcctggaggtgaagaagggtcaaactctcgccctggtgggaagctcgggctgtggtaagtcgaccgttgtgcaactgctggagaggttttacgatccccttgcaggaaccgtgtttgtggattttggatttcaactgctggatggacaagaagccaaaaaactcaacgtgcagtggcttcgagcccaacttggcatcgtgtcacaagaaccaattcttttcgattgttcaatcgcagaaaacattgcatacggggataattcgcgggtggtatcccaggacgagatagtttcggcggcaaaggcagcaaacatccacccctttattgaaaccctcccacataagtacgaaacccgcgtgggcgacaagggtacccaactgtccggcggacaaaagcagcgtattgccatcgcccgcgcccttatccgccagccgcaaatacttctgctggatgaggcaacgagcgccctggacaccgagtccgagaaggtcgtgcaggaggcactcgataaggccagagaaggtagaacgtgtattgtgattgcacaccggctgagcaccattcaaaatgcggacttgattgtcgtctttcaaaacggtagggtcaaagaacacggcactcaccagcagcttcttgcgcaaaagggaatttactttagcatggtgtcggtgcaagcgggaactcagaatctg

SEQ ID NO: 200294 - DNA, 3858 bp, Artificial Sequence
  derived and/or modified sequence
atggatctggaggcagccaaaaacggcaccgcatggagaccaacctcagccgagggggattttgaactcggcatatctagcaagcaaaagagaaaaaaaacaaaaacagtaaagatgatcggagtgctaacgctgtttcgttattcagactggcaagataaactgttcatgtcgcttgggactataatggcgatagcccacgggagcggtctgcctctgatgatgatagtgttcggagagatgactgacaagtttgtggatactgccggaaatttcagcttcccagtaaatttctctctgagtcttctcaatcccggcaagatcctcgaagaggagatgactcggtatgcttattactacagcggccttggcgctggcgttctcgtagcggcttacatccaggtgtcattctggactcttgccgccgggaggcagatacgaaagatccgtcagaaattcttccatgcaatcttgaggcaggaaatcggctggttcgatattaatgacacgaccgagctcaacacccgcctcactgacgatatttccaagatatccgaggggatcggcgataaagtgggcatgttcttccaagctgtcgctaccttttttgctggcttcatcgtgggcttcatccgcggatggaagctcacactggtaattatggctatttcacccattctagggctctccgccgctgtgtgggccaaaattctttcggcttttagtgataaagaattagccgcctatgccaaggctggggccgtcgcagaggaggccctaggcgcgattaggactgtgatcgcctttgggggccagaacaaggagttggagcgttatcaaaagcacctagaaaacgccaaggagatcggaatcaagaaggcgatctccgctaatatctcaatggggatcgcgttcctgcttatttacgcctcttacgccctcgctttctggtatggcagcactctggtaattagcaaagaatatacgatcggcaatgccatgactgtgttctttagtatcctcatcggagccttctccgtgggccaagcggcaccctgcatagatgcattcgccaatgcaaggggggctgcttatgtcatattcgatataatcgacaataatccaaaaattgatagcttctcagaacgcggtcataaaccggatagtattaagggaaatctcgagtttaacgatgtgcatttctcctatccaagccgggccaacgtgaagatactgaagggactcaacttgaaggtgcagagtggacagactgtcgcactagttggttctagcggctgcggaaagtccaccaccgttcagctaatacagagattgtacgatccagacgagggtaccataaatatcgatgggcaggacatccggaacttcaatgtcaattacctcagggaaataattggcgtggtgtcccaggagcccgtgctcttctccaccactattgccgagaacatctgttatggaagggggaatgtgacaatggacgagattaagaaggctgtgaaagaagctaatgcttacgagtttatcatgaaattgccccagaaattcgacacacttgtgggggaaaggggcgcccagttatccggaggccagaagcagcggattgccattgcgcgggctttggtccgtaatccaaaaatccttctcttagacgaagccacatcagccctggacactgagagtgaggccgaagttcaggccgcgctcgacaaggcacgggaaggccgaacgaccatcgtgatcgcccatcgactctccactgttagaaacgccgacgttatagccggcttcgaggacggagtcattgtcgaacagggctcacactctgagctcatgaagaaagaaggcgtctactttaagttagtgaatatgcagaccagcggttcacagattcagagcgaggaatttgagctaaatgacgaaaaagcagccacccgcatggcccccaacggatggaagagccggcttttccgccacagcacacaaaaaaacctaaagaattcacagatgtgtcagaaatccctggatgttgagacagacggcctggaggccaacgtgccacccgtgtctttcctgaaagtcctcaaattgaacaagacagaatggccttactttgtagtcggcactgtgtgcgccattgccaacgggggtttgcaacctgcattctccgtgatctttagcgagatcatcgcaatcttcggccctggtgacgacgcagtgaagcagcagaagtgtaatattttttcgctgatctttctgtttctcggcattattagcttctttaccttttttctccagggctttacatttggaaaggctggtgaaatcctaacccgtcgccttcggagcatggcctttaaggccatgctgaggcaagacatgtcatggttcgatgaccacaagaactctaccggagccttatccacccgcctcgcaactgatgcggctcaggtgcaaggggctacaggcacacgcttggcactgattgctcagaatattgcaaacctgggcacgggcatcattatctcttttatctatggatggcagctgaccctcttactgctggctgtggtgcccatcattgctgtctcaggtattgtagaaatgaaactgttagcagggaacgcaaaacgcgataagaaggaactagaggcagctggaaagatcgctaccgaagcaattgagaacatcagaaccgtcgtgagcctgacacaggaacgtaagttcgaaagcatgtacgttgagaaactgtacgggccttacagaaattcagtgcagaaagcccacatctacggcatcacattcagcatctctcaagcatttatgtactttagttacgctgggtgttttcgatttggcgcctacctcattgtgaacggtcatatgcgcttcagggacgtcatactggtgtttagcgctatcgtatttggcgctgtggctctgggccatgcgtcctcctttgcccctgactatgcaaaggccaaactatctgccgcgcatttgtttatgttgtttgagcgacaacccctgattgacagttattctgaggaagggctgaaacccgacaaatttgaggggaatattacatttaatgaagtggtctttaattatcctacgcgggctaatgtgccagtcctccaaggcctttccctagaggtgaagaagggccagaccttggccctggttggcagttcagggtgcggtaagagcacggtagtgcaactgttggagaggttctacgaccccctagcgggtacggtatttgttgacttcggtttccagctgctggatgggcaggaggctaaaaaactgaacgttcagtggttaagagcccaactaggaattgtgtctcaagaaccaatcctgtttgattgctcaatagctgagaacatcgcctacggtgataactcaagggttgttagtcaggatgaaattgtgagcgcagccaaggcggcgaatatccacccattcatcgagaccctcccgcacaagtatgagacacgcgtgggtgataagggcactcagcttagtggaggccagaagcaacgcatcgccatagcccgagcactgattagacagccccagattctactgctggatgaggcaacttccgcactggacactgaatcggagaaagtggtgcaggaagctttggataaggccagagagggacgcacctgcatagtgatagcccacagactgtctaccattcagaatgcagacctcatagtcgtgtttcaaaacggcagggtgaaagagcacggaactcaccagcaattactcgcccagaaagggatctactttagcatggtgtcagtgcaggctggtacccaaaacttg

SEQ ID NO: 200295 - DNA, 3858 bp, Artificial Sequence
  derived and/or modified sequence
atggatttggaagcagctaaaaatggaactgcatggaggccaacatctgccgaaggggacttcgaattgggaatctcgtccaaacagaaaaggaaaaagacaaaaacagtgaaaatgatcggagtgctcacgctgttcagatattccgattggcaggataaactattcatgagtttagggactataatggccatcgctcatgggagtggacttcctctaatgatgattgtgtttggagaaatgactgataaatttgtggatactgccgggaatttttcattcccagtcaattttagtctatctttgctcaaccccgggaaaattctcgaagaagagatgactaggtacgcctattattatagtggactcggggccggagtcctcgttgcggcctatatccaggtgtctttttggactctggcagcagggcgccagatccggaagatcaggcagaaattttttcacgctatcctacgacaggaaattgggtggttcgatatcaacgatactacagaactaaacactagactgactgatgatatctctaaaattagtgaaggaataggggataaagtgggaatgttttttcaggctgtagctacattcttcgccggattcattgttggattcatcagaggatggaaacttacactggtgatcatggcaataagtcccatcctcggattgtccgctgccgtctgggccaaaatcctctcggccttttctgataaagaattagctgcgtacgctaaggcaggagccgtcgccgaagaagccttaggggccattcggactgtgatcgcttttggggggcagaataaagagttagagcggtatcagaaacaccttgaaaatgctaaagagataggaataaaaaaagccatatcagctaacatctcaatgggaattgcgtttctcctaatctatgcgtcttatgcactcgcattttggtacggatcaactctggttatctccaaagaatacactatcggaaacgccatgacagtgttcttctctatactgataggagctttttctgtaggacaggccgccccatgtatagacgcatttgctaatgcccgcggggccgcctatgtgatcttcgatatcatcgataacaatcccaaaatcgactctttttccgaaagagggcacaaacctgattctataaaagggaatctcgaattcaacgatgtgcatttctcatatccttcaagagccaatgtaaaaatccttaaagggcttaacctgaaagtgcagagtgggcagactgtcgcactggttggatctagtgggtgtggaaagtctacaactgttcaactcatccagcggctgtatgaccctgatgagggaactattaatattgatggacaggatatccgaaatttcaatgtgaactatctacgcgaaattataggggtagttagtcaggaaccagtcctattttctacaacaatagctgaaaatatctgttatggaagaggaaacgtcacaatggatgaaatcaaaaaagcagttaaagaagctaacgcctacgaatttatcatgaaattaccccagaaatttgatactcttgtaggagagaggggagcccagctctctggagggcagaaacagcgcatagccatcgctagggccctggtgaggaatcccaaaatactcctcctggacgaagccacttcagcactagatacagaatctgaagcagaagtacaagccgcgctggataaagccagggaaggacgaactacaatagtcatcgcacatagactttccacagtgcggaacgcggatgtgatcgctgggtttgaagatggggtcatagtggagcagggatcccattctgaattgatgaaaaaagaaggggtgtatttcaagctggtgaatatgcagacatccggatctcagatacagtccgaggaatttgaactcaatgatgaaaaagccgccacacgcatggcacctaacggatggaaatccaggctattcagacattctactcaaaaaaatctaaaaaattcccagatgtgccagaaatcattagatgtcgaaactgatggactcgaagccaatgtcccccctgtctcctttctgaaagtcctcaaattaaacaaaacagaatggccatatttcgtcgtcggaacggtgtgtgccatagcaaatggagggctgcagccagctttttcagtcatattttcagagattatagccatctttgggccaggagatgatgccgtcaagcagcagaaatgcaatatattctctctaatattcctctttctgggaatcatctccttcttcactttttttctccaggggttcacattcgggaaagctggggaaatccttacacgccggctcagaagtatggcgttcaaagcaatgcttaggcaggacatgtcttggtttgatgatcacaagaacagtactggggcattgtctactcgactagccacagatgccgcccaggtccagggagcaactgggacaaggcttgctctgatcgcacagaatatagccaatcttggaactggaatcatcatctctttcatttatggatggcagctcacactcctcctcctggccgtcgtgccaataatcgctgtttctggaatagtcgaaatgaagctgcttgctgggaacgccaagagagataaaaaagaactagaagccgctggaaaaatagcaactgaagctatcgaaaatatcagaacagtggttagtctaacacaggaacggaagttcgaatcaatgtacgtagaaaaactttatggaccttatcggaatagtgtacagaaagcacatatatatgggataacattcagtatctcacaggcctttatgtattttagttatgctgggtgtttcaggttcggagcgtatttaatcgttaacggacacatgaggttcagggatgtcattctggtattctctgccatagttttcggggcagtggctctcgggcatgcttcttccttcgcacctgattatgcaaaggccaaattatccgccgcgcatcttttcatgctgttcgagcgccagcctttaattgattcctacagtgaagaagggctaaagcctgataaatttgaagggaacataacttttaatgaggtagtgtttaattaccccacaagggccaacgttcctgttctacagggactgtctctggaggtaaaaaaaggacagacactcgctctagtcggatcatctgggtgtgggaaatctacagtcgtacagctgctggaaaggttctatgatccactcgctggaactgttttcgttgatttcggattccagctattggatggacaggaagcgaaaaagctcaatgtccagtggctaagagcgcagctggggattgtgtctcaggaacccatactcttcgattgctccattgcagaaaatatagcatacggggataattcacgggtggtgtcccaggatgaaatcgtgtcagcagctaaggctgctaacatccaccccttcatagaaactcttccccataaatatgagacacgcgttggggataaaggaactcagctttctggaggacagaaacagaggatagccatcgcaagagcactcatccgacagcctcagatcctattacttgatgaagccacgtctgccctcgatactgaatctgaaaaagtggttcaggaagcattggataaggcccgagaagggcgcacttgtattgttatagctcatcggctatctacaatccagaacgcagatctcatagtagtatttcaaaatgggagagtgaaagagcatgggacacaccagcagctcctggcccagaaagggatctacttctctatggtgtccgtgcaggcagggactcaaaacctt

SEQ ID NO: 200296 - DNA, 3858 bp, Artificial Sequence
  derived and/or modified sequence
atggacctggaggcagctaagaatggtacggcctggcgcccgacgagcgccgaaggagacttcgagctggggatctcttccaagcagaaacggaaaaagaccaagacggttaagatgattggcgtgcttactctctttcgctacagcgactggcaggacaaactctttatgtccttggggactatcatggcaatcgcccacggatcgggacttccactcatgatgatcgttttcggggagatgacggacaaatttgtggacaccgcgggtaacttctccttcccagttaactttagtctctccctgctgaaccccggaaagatcctggaagaggaaatgactcgctacgcatactactactcgggactcggagccggcgtgctcgtggccgcgtacatccaggtgtcgttctggaccctggctgccggacgccagattcgcaaaatccggcaaaagttcttccatgcaatcctgagacaagagatcggttggtttgacatcaacgataccaccgaactcaacactaggctgactgatgacatcagcaagatcagcgagggaatcggtgataaggtcggaatgttcttccaagccgtggcaacgttctttgcggggttcatcgtgggattcatcagaggctggaagctgactctggtcattatggccatctcaccgatcctcggcctctcagccgccgtgtgggcgaaaatcctgagcgcgttcagtgacaaggaactcgccgcgtacgcaaaggcaggcgccgtcgcggaggaggccctcggagcgatccgcactgtgattgcgtttgggggccaaaacaaggaattggaaagataccagaaacacctggagaacgcgaaggagatcggcatcaagaaggcgatttccgcgaacatatcgatgggaattgccttcttgttgatctacgcttcctacgcgctggccttctggtacgggtctactctcgtgatcagcaaggaatatactattggcaacgccatgactgtgttcttctccatcttgatcggcgccttctccgtcggccaggctgcaccgtgcatcgacgccttcgcgaatgcgcgcggcgcggcatacgtcatattcgacataattgataacaatccgaagatcgactcgttctcggagcgcggccacaagcctgattcgatcaaaggcaacctcgaattcaatgacgttcacttttcctacccgagccgcgccaatgtcaaaatcctgaagggactgaatctcaaagttcagtccggacaaaccgttgcactggtgggaagcagcggctgcggaaagagcactaccgtccagctgattcaaagactctacgatccggacgaaggaacgattaacatcgacggacaagatattcgcaacttcaatgtcaactacctccgggagattatcggtgtggtgtcacaggaacccgtgttgttctcaaccactatcgcagagaacatttgttacggacgcggtaacgtcaccatggacgagatcaagaaagcggtgaaggaagctaatgcctacgagtttatcatgaagctgccgcagaaattcgatactctcgtgggggaacgtggagcgcagctttccggaggacagaagcagcgcattgccatcgctcgcgcattggtccgcaacccaaagattctccttctggacgaggctacctcagccctggatactgaatcggaagctgaggtccaggctgccctggacaaggctcgggagggacggactaccatcgtaatcgcccataggctgagcactgtccggaacgccgatgtgattgccgggttcgaggacggggtcatcgtggaacagggctcccactctgagctcatgaagaaggaaggcgtgtactttaaactggtcaacatgcaaacctcgggatcccagatccagagcgaggaattcgagctgaatgatgaaaaggccgccacccgaatggcccctaacggctggaagagcaggctttttagacactcaactcaaaagaacttgaagaactcccagatgtgccagaaatccctggatgtcgaaaccgacggactggaagccaatgtccccccagtgtcgttcctgaaagtgctgaagctgaacaaaaccgaatggccgtatttcgtggtgggcaccgtgtgcgccatcgcgaatggcggcctgcaaccggctttttcggtgatcttctcggaaatcattgcgatcttcggaccgggcgacgacgccgtgaagcagcaaaagtgcaacatcttctcactcattttcttgttcctgggaatcatctcctttttcaccttctttctgcaaggcttcaccttcggaaaagcaggagaaatcctgaccagacggctgaggtcaatggcttttaaggcgatgttgaggcaggatatgagttggtttgatgaccataagaactcaactggagccctgtcgacgagactggccacggacgccgcccaggtccagggcgcgacgggtactagactggcactgatcgcccagaatattgccaacctgggtaccggaatcatcatatcctttatctacgggtggcagctcactctgctgctgctggcagtggtgcctatcattgcggtgtcaggcatcgtggagatgaagctccttgcgggaaacgcaaagcgagataagaaagagctggaagccgcgggaaagatcgccactgaagcgatcgaaaacatcagaaccgtggttagcctgacccaggagcgtaagtttgagtccatgtacgtggaaaagctgtacggaccgtatagaaatagcgtccagaaagcccatatctatggaatcaccttcagcatctcgcaagcctttatgtacttctcctacgcaggatgcttccggtttggagcctacctgattgtcaacggacatatgaggtttcgggacgtgatcctggttttctccgccatcgtgtttggggcggtcgcacttggtcacgccagctcgttcgcccctgactacgctaaagcaaaattgtctgcagctcaccttttcatgctgtttgaacggcagcccctcattgactcgtacagcgaggaaggcctcaaacctgacaaattcgaaggtaacatcacctttaatgaagtggtattcaattacccgacccgcgcaaacgtccctgtgctgcaaggcctgtcacttgaagtcaagaagggacagactctcgccctggtcggatccagtgggtgcgggaagtcaaccgtggtccagctcctggaaaggttctatgacccgctcgcaggtaccgtctttgtcgatttcggatttcagcttctggatggacaagaggcgaagaaacttaacgtgcagtggctcagagcacaactgggaatcgtatcgcaggagccgatcctcttcgattgctcgatcgccgaaaacatcgcctacggagacaattcaagagtggtgtcccaagatgaaatcgtttcagccgcaaaggctgcaaacatccatccgttcatcgaaaccttgccgcacaagtacgaaactcgcgtgggggataagggtactcaactcagcggtggtcagaaacaacggattgcgatcgcccgggcccttattcgccagccgcagatcctcctgctcgatgaggctactagcgccctggacaccgagtcggagaaggttgtgcaggaggcgcttgacaaagcccgggaaggcagaacctgcatagtgatcgcccaccggctttcgacgatccagaacgcagacttgatcgtggtgttccagaacgggcgagtgaaggaacatggcacgcaccaacaactcctggcacagaaaggaatctacttcagcatggtgtcggtccaggcaggtactcagaacctg

SEQ ID NO: 200297 - DNA, 3858 bp, Artificial Sequence
  derived and/or modified sequence
atggatctggaagcagccaaaaatgggacagcatggcggccaaccagcgccgaaggggatttcgagctgggaattagctccaagcagaaacgcaaaaagaccaagactgtgaaaatgatcggagtgcttactcttttccggtattcggactggcaagacaagttattcatgagtctgggcaccattatggccatcgctcatgggtctggtctgccgctgatgatgatagtgtttggagaaatgaccgataagttcgttgacactgcgggaaactttagctttccagtgaatttttccctgtctctgctgaacccaggtaagattctcgaagaagaaatgacccgttacgcttactattattcaggactgggcgctggggtcctggtcgcagcgtacatacaagtcagcttctggaccctggctgcaggtcgccagattcggaaaatcagacagaagttctttcacgcgattctaagacaggaaattgggtggttcgacataaacgataccacagagcttaacacgcgtctcacagacgacatctcaaaaattagtgaggggatcggggataaggtcggtatgttttttcaggccgttgcaaccttcttcgccggttttattgtgggattcattcgaggctggaagctgactctggtgatcatggcaatctcacccattctaggattgtccgcggccgtgtgggccaaaatactgagcgccttcagcgacaaggagcttgccgcctacgccaaagccggagccgtggcagaggaagcgttgggcgccattcgcactgtcatagcttttggaggccagaacaaggagctcgagcggtaccagaaacatctcgagaatgctaaggagattggcataaaaaaagccatctccgccaatatttcgatgggaattgcgttccttctgatttacgctagctacgccctggcgttctggtatggctctaccctggtgatctctaaggagtacactatcgggaatgcaatgacagtgttcttttctattcttatcggagctttcagcgtggggcaggctgcgccctgtatcgatgccttcgccaacgcccgaggcgccgcttatgtgatttttgatattatcgacaacaacccgaagatcgatagtttctcagagagaggacacaaacccgatagcatcaagggaaatctcgagttcaacgacgtgcacttttcctacccgagccgggccaacgtcaaaatcctaaagggtctgaacctgaaggtgcagagcgggcagacagtggccctggtgggctcctccgggtgcggcaaaagcaccaccgtccagctcattcaaaggctgtacgatcccgatgaaggcacgattaacattgacgggcaggatatacgcaactttaacgtgaattatctgcgcgagattatcggggtcgtgagccaggagccggtgctattctcaactaccattgccgagaatatctgctatggtaggggcaatgtgaccatggacgaaattaaaaaagccgtgaaagaggctaatgcttacgagttcattatgaaacttccacagaagttcgacaccttggtcggcgagagaggcgcccagctgtcaggcggccaaaagcagcgtatcgccattgccagagctttggtccgcaatcctaagatcctactgctggacgaggctacaagcgctctggacactgagtctgaggccgaggtgcaggcagccctggataaagcgcgcgaaggcagaaccaccattgtgatcgcccaccggttgagcacggtccggaatgccgacgtgattgctggctttgaagatggggtaatcgtcgaacaaggatcgcattctgagctgatgaaaaaagagggagtctatttcaagctggttaatatgcagacaagtggtagccagatccagtctgaggagtttgagttgaacgacgaaaaggccgccaccaggatggcccccaatggttggaagagcagacttttccgccatagcacgcaaaagaacctgaagaattcacagatgtgccaaaaatccctggatgttgaaaccgatggactggaagccaacgttccacccgtgtctttcctgaaggtgcttaaactgaacaagaccgaatggccatacttcgtggtggggaccgtatgtgctattgcgaacggcggccttcagcccgccttcagcgtgatcttctccgaaatcattgccatctttgggcctggcgacgacgccgtcaaacagcagaagtgcaatatctttagcctgatcttcctcttcctcggcatcataagctttttcaccttcttcctgcaggggtttacctttggcaaagccggcgagatcctcacaaggcggctcagatcaatggcattcaaagctatgctgaggcaggatatgagctggtttgacgatcataaaaactcgacgggcgctttgagtacacgcctcgctaccgatgccgcacaagtacagggagcaacggggacgagactggccctgatagctcagaatattgccaatttaggtaccggtatcatcataagctttatctacggctggcagctgactctgcttctgctggcagttgttcccatcatcgctgttagcgggatcgtggaaatgaagttgctggctgggaacgcgaagagagacaagaaggaattggaagctgcagggaaaatcgccacagaagccattgagaacattaggacagtcgttagtctcacccaagagcggaaattcgagtctatgtacgtggagaagctgtacggcccttaccgaaatagtgttcagaaggctcacatatatgggatcaccttcagtataagccaggcttttatgtacttctcttacgccggctgctttcgatttggtgcttacctcatagttaacggccacatgcgcttccgggatgtgatcctggtgttctccgcaattgtgttcggagctgtggcgctcgggcacgcgtcctcatttgcacctgactatgccaaggcaaaactgtccgctgcacacttatttatgctgttcgagcggcagcccctcatagactcatatagtgaagaaggtctgaaacccgataagttcgagggaaatatcactttcaatgaagtcgtgtttaattatcctacccgggccaacgtgcccgtgctgcaggggcttagccttgaggtcaaaaaggggcagaccctggcgttggtgggctcgagtgggtgcggaaagagcaccgtggtgcagctgctcgagcgcttttacgaccccctcgccgggactgtctttgtggattttggcttccagcttttggacgggcaggaagccaaaaagctcaatgtgcaatggctgcgagcccaattgggtatcgtatctcaagagccaattctgttcgactgctccattgccgaaaacattgcctacggggacaactcccgtgttgtctctcaagatgaaattgtcagtgcagctaaagctgccaacatccatccgttcatagagacgctacctcacaagtatgagactcgggtgggtgacaagggcacgcagctgtccggtgggcagaaacagcgcatcgctatcgcaagagcacttatcaggcagccccaaatactcctcctggatgaggccactagtgcactcgatactgagtctgagaaggtcgtgcaagaggctctggataaggcccgggaagggcgcacctgtatagtcatcgcacatcgcctgagtacgattcaaaacgcggaccttatcgtcgtcttccagaatggccgagtcaaggagcatggaactcatcagcagttgctcgctcagaaggggatctatttctctatggtgagtgtccaggcagggacacagaatctc

SEQ ID NO: 200298 - DNA, 3858 bp, Artificial Sequence
  derived and/or modified sequence
atggatctggaagctgctaaaaacggcacagcttggaggcctacctctgcagagggcgatttcgaactgggcatatcctccaaacaaaaaagaaagaagaccaaaacagtaaaaatgataggggtgttgaccctgtttcggtactccgactggcaggataaactgttcatgagtctcggtacaatcatggcgattgcccatggatctggactgccgctaatgatgatcgtatttggagagatgacggataagtttgtcgatactgcgggaaacttctcattccctgttaacttctccctctcattgttgaatcctggcaagatattggaagaagagatgactaggtacgcctactactattctggcctgggcgcaggtgtgctggtagctgcatacattcaggtgtcgttttggaccctggctgcgggcagacaaatcagaaagatccgacagaaatttttccacgcgatactgcgccaggaaattgggtggtttgatattaacgacactaccgaactgaacacccgccttacagatgatatttccaaaatcagcgaaggtattggagacaaggttggcatgttttttcaggcagtcgcgactttctttgccgggtttattgtcgggttcattagaggctggaagctgactcttgtgattatggccataagcccaattttggggctttccgccgccgtgtgggcgaaaatcctgtccgcattctctgacaaggagttagccgcttatgcgaaagccggcgccgtcgccgaagaagccctaggtgctatcaggaccgtaattgcctttggcggtcagaacaaggagctggagcgataccagaagcatctcgagaatgctaaagaaattggaatcaagaaggccatttcagccaacatcagcatggggatcgctttcctactgatctatgcctcctacgctctagcattctggtatgggtcaacactcgtgatcagcaaggagtacacaattgggaacgccatgacagttttcttttcaatcttaattggggcattttctgtcggtcaggccgctccctgcatagacgcattcgcaaacgctcgaggggccgcctacgttatcttcgatataatcgataacaaccccaaaatcgacagtttctcggagcgtgggcataagccagactccatcaaggggaatctagagtttaacgacgtgcacttctcttatcctagcagggccaacgtcaaaattctgaaggggctgaacctgaaggtgcagtccggccagaccgtggcactcgttgggtcatcaggttgcggcaagagtaccacagtgcagctgattcagcgtctgtacgaccccgacgaaggaaccataaatatagatgggcaggatatacggaacttcaatgtaaattacctccgagagattataggagtagtgtcacaagagccggtcctcttttccaccacaatcgctgagaatatttgttacgggaggggaaatgtcacaatggatgaaatcaaaaaggcggtgaaggaagccaacgcatacgagtttataatgaagttgccccagaaatttgacactctcgtgggagaacgaggagcacagttgagtgggggccaaaagcagagaattgcaatcgccagggcacttgtacgcaatcctaaaattctgctactggacgaagctacctctgctctggacacggaatcagaagctgaggtacaagcagccctggataaggcccgcgaagggcgaacaaccatcgtgatcgcacacaggctgtccacagtgcgtaacgccgacgttatcgctggctttgaagatggggtcattgtggaacagggttcacattccgaattgatgaaaaaggaaggagtctactttaaactggtaaacatgcagaccagtggttcccaaatacagtctgaggaattcgaattaaatgatgagaaggccgctacacgaatggcccccaacggatggaaaagcaggctattccgccactctactcaaaaaaatctgaaaaatagccagatgtgccagaaatccctggatgtggaaaccgatggtttggaggcaaatgtgccacctgtgagcttcctgaaggtcctcaaactgaacaaaacggaatggccatacttcgtcgtggggaccgtctgtgccattgctaatggtggcctacaaccagcgttctccgtgatttttagtgagattatagcgatcttcgggccaggcgacgacgccgtcaaacagcagaagtgtaatatattctccctgatttttcttttcctgggaatcattagcttcttcacgttctttcttcagggcttcactttcggcaaggccggggagatcctcacacgaaggttaagatccatggcttttaaggcaatgttaagacaggacatgtcttggttcgacgaccacaagaatagcacaggggctctgagtacaaggttagccactgacgctgctcaagtccaaggggccacaggcactcgactggcgctaattgcgcagaacatcgcaaatctcgggaccggtatcataatttcttttatatacggttggcagctgactctgctgttgctggctgtggtccccataatcgccgtgtccggtattgtcgaaatgaaactgttggccggaaacgctaagcgagacaaaaaagagctagaagcggccgggaaaattgccacggaagcgattgaaaatattagaaccgtcgtgtctctgactcaagagcgcaaatttgagagtatgtatgtggaaaaactttacggaccctatagaaacagtgtccagaaagcacacatttacgggatcacattttccatttcccaggcctttatgtacttcagctacgctgggtgcttcaggttcggcgcttatttaattgttaacgggcacatgagattcagggacgttattttagtgttctccgcgatcgtctttggcgctgttgccttgggccatgcctcatccttcgcccccgactacgcgaaggcgaaactatctgcggcccatctgtttatgctgtttgagcgtcagcccctgattgactcctattccgaggagggactgaaacccgataaattcgaaggcaacatcaccttcaacgaagtcgtgtttaattatcctacgagagccaacgtgccggtgctgcagggcctgagcctggaagtcaagaaaggacaaacacttgccctggtcgggagcagcggctgtggcaagtctaccgtcgtgcagcttttggagcgattctatgatccccttgcaggaacagtattcgtggatttcggcttccagttgctcgatggccaagaagcaaaaaaattgaacgtgcaatggctacgagctcaacttggtatcgtgtcccaggagccgattctcttcgattgtagtatcgcagaaaacatcgcttatggcgacaactcacgagttgtatcacaggacgaaatcgtcagcgcagctaaggctgccaatatccacccatttatcgagaccctaccacacaagtatgaaacccgggtcggtgacaaggggactcagctgtctggggggcagaaacaacgcatcgcgattgccagagcgctgatacgtcagcctcaaatcctgcttctggatgaggcaacttctgcgctggataccgaatccgagaaagtggtgcaggaagccctggacaaggcaagagaaggccgaacatgcatcgtgatagctcacaggctcagcaccatccaaaatgccgatctgattgtggtttttcaaaatggccgggtgaaggagcatggcacgcatcaacagctgttggctcagaaaggcatctacttcagcatggtgtccgttcaggctggaacccagaattta

SEQ ID NO: 200299 - DNA, 3858 bp, Artificial Sequence
  derived and/or modified sequence
atggacctggaagccgccaaaaatggaactgcctggcgccccacttctgcagaaggggactttgaactggggatttctagtaaacagaaacggaaaaagactaagacagtcaaaatgataggagttctcactttgtttaggtacagtgattggcaggataaactgtttatgtcccttgggacaatcatggctatcgctcacggaagtgggctacccctaatgatgatcgtgttcggggagatgactgataaattcgtggatactgccgggaacttttcatttcccgtgaacttctctctttcattactaaaccctggaaaaatcctcgaggaggaaatgactcgctatgcctactactattcggggctcggagctggggtgctcgtggctgcttatatacaggtgtcattttggacactcgccgcagggcggcagatccgcaaaattagacagaaatttttccacgcaattttgcgacaggagatcgggtggtttgatataaacgatacaactgaactgaatacacgcctcacagatgatatatccaaaatctcagaagggatcggggataaggtgggaatgttcttccaggccgtcgccacttttttcgcagggttcatcgtcgggttcatcaggggatggaaacttacattagtcataatggccatctcaccaatacttgggctctctgccgcggtatgggccaaaatcctctcggcgttctctgacaaggaacttgctgcatatgccaaagctggggccgtagctgaggaagctttaggagctatccggactgtgatcgcatttggaggacagaacaaagagttggagcgatatcagaaacatctcgaaaatgccaaggaaatcggaatcaaaaaagctatctccgcaaatatctccatggggatcgcattcctgttaatatatgcaagttatgccttagccttctggtatggatctacattagtgatttccaaagaatatacaattggaaacgctatgacggtgttcttttccatcctgatcggggctttctcagtggggcaggccgccccttgtatcgatgcctttgctaacgcccgcggggccgcttacgtgatattcgatatcatcgataataatccgaaaatcgattctttcagtgaaaggggacacaaaccagatagtatcaagggaaatttggagttcaacgacgtgcactttagttacccatcaagggctaacgtaaaaattctcaaggggcttaacctcaaagttcagtctgggcaaactgtggcactcgttgggagttctggatgcggaaaatcaactactgtgcagctcatacagcgactctacgacccagatgagggaacaatcaatattgatgggcaagatatccggaacttcaatgtgaactatctgcgagaaataatcggggttgtctctcaggaacctgtcttattcagtactacaatcgccgaaaatatctgttatgggagggggaacgtgacaatggatgaaatcaaaaaggcagtgaaagaagctaatgcttacgagtttataatgaaactgcctcagaaattcgacactcttgtgggagaaaggggggcccagctatcaggagggcaaaagcagcgaatcgcaatagctagagccctagtgaggaacccaaaaatactcctactagatgaagccacatcagcgttggatacagaatcagaggcggaagtacaggctgctctcgataaagcccgggaaggaagaactacaatcgtgatcgctcacagattgtccacagttcggaatgccgatgtcatagcagggttcgaagatggagtcatcgtcgaacagggatcccattcagagctaatgaaaaaagaaggggtttattttaaacttgtcaatatgcagacttctgggtcacagatccagtcagaagaattcgaactgaatgatgaaaaagccgctacacgcatggccccaaatgggtggaaatcgagactgttccgacattcaactcaaaaaaatcttaaaaattcgcagatgtgtcagaaatctctagatgtcgaaacagatgggctcgaagctaatgtgccccctgttagttttcttaaagtcttaaagctgaacaaaactgaatggccctacttcgtagtcggaacagtctgcgctatcgctaatggaggacttcagccagctttttctgttatcttctccgaaataatagctatatttgggcccggggatgatgctgttaaacagcagaaatgtaatatcttttctctcatctttcttttcttaggaattataagtttcttcacattctttctccaggggttcacttttgggaaagctggagagatactaactcgccgactgaggagtatggccttcaaagctatgctccggcaggatatgtcctggttcgatgatcacaaaaactcaactggagctctatcaacacgcctcgcaactgatgctgcgcaggtccagggggctactggaacaaggctcgctctcatcgcacagaacatcgctaatttgggaacagggattatcatatcctttatctatgggtggcagcttacactattgttacttgccgtggtacctataatagctgtttccgggattgtggaaatgaaactgctcgccggaaacgcaaagagggataaaaaggaactcgaagccgcgggaaaaatcgcaactgaagctattgaaaatatacgcactgtagtgtctctgacacaggaacgcaaattcgaatccatgtatgttgaaaaactctacgggccatacaggaacagtgtccaaaaagcccatatttatggaattacattctcaatctctcaggcctttatgtacttctcatatgctggatgttttcgctttggagcatatctaatcgttaacggacacatgagattccgggacgtcatcttggtgttttctgctatcgtgtttggggccgtggctctggggcacgcctcctcctttgcacctgattatgccaaagctaaactctccgccgcacatctctttatgctatttgaaagacagcccctcatcgactcttactctgaagaaggactcaaacccgataaatttgaaggaaatataacatttaacgaggtcgtattcaattatccaacaagggctaacgtaccagtactccagggactatcccttgaagttaaaaaggggcagacacttgctttggtggggtcttccgggtgcggaaaaagtacagtggtgcaactccttgaaagattctatgatcctctagctggaacagtgtttgtcgattttgggttccagctcctggatggacaggaagccaaaaaacttaacgtacagtggctccgcgctcagctcggaatcgtatcacaggaaccaatccttttcgattgttccatcgctgaaaacattgcctatggggacaattcgagagtggtgtcccaggatgaaatagtgtccgcagccaaagctgccaatatacaccctttcatcgaaacactgccacataaatatgaaacaagagtcggggataagggaacacagttgtcaggaggacagaaacagaggatagctatcgccagagccctcattagacagccacagatcctgcttctagatgaagcaacaagtgccctagatacagaatcggaaaaagtcgtgcaagaagccctggataaagctcgggagggaagaacatgcatagtcatcgctcatcgcctatccacgatccagaacgctgatttaattgtggtgttccagaacgggcgagttaaagaacacggaacacaccagcaactcttggcacagaaagggatttatttctccatggtgtcggttcaggcagggactcagaacctt

SEQ ID NO: 200300 - DNA, 3858 bp, Artificial Sequence
  derived and/or modified sequence
atggacctcgaagcagccaaaaacggtacagcctggcggcctacgagcgctgaaggggatttcgaactagggatctctagcaaacagaagcggaagaaaacaaaaaccgtgaaaatgataggcgtgcttacactttttaggtactctgactggcaagacaagctattcatgtcgctgggaacaataatggcaatcgcacatggcagcggactgcctctgatgatgattgtcttcggcgagatgactgataaattcgtggatactgcgggcaatttctcatttcctgttaacttcagtctgagcctcctaaacccaggtaaaattctcgaagaggaaatgactaggtacgcatactattatagtggcctcggagctggggtgctcgtagctgcctacattcaggtgagtttctggactctagccgccgggcgccagatccgaaagattagacagaagttctttcatgcgattctgcggcaagaaattgggtggttcgatattaatgacactaccgagctaaacacaagactcaccgacgacattagcaaaatctccgagggaattggtgataaagttggaatgttctttcaggccgttgcaacctttttcgcgggatttatcgtgggtttcattcgtggttggaaactcacccttgtgattatggctatatcccctattcttgggctgtccgcggcggtgtgggcaaagatcttgagtgcgttttcagacaaggagctggctgcctacgcaaaggcaggggcagtcgcggaggaggccctcggtgcaataaggacagtgatcgcattcggtggtcaaaacaaagagttggagaggtatcagaaacacctggaaaatgctaaggagattggaataaagaaggcaatatctgccaacatcagcatggggatcgcctttctcctgatctacgcatcctatgcattagccttctggtacggctccaccctagtgatttccaaggagtacactattggcaacgcaatgaccgtgttcttttctatacttatcggtgcctttagtgtggggcaggccgccccctgcatcgacgctttcgccaatgcacgcggcgccgcttacgtgatttttgatataatcgacaacaatcccaaaattgactccttcagcgagagaggccacaaacccgactctatcaaagggaacctcgagtttaacgatgtgcacttttcctacccttctcgcgccaacgtgaagatactgaaagggctgaatctgaaggttcagtccggccagacagtggcacttgtgggttctagcggatgcgggaagtccaccactgttcagcttattcagcgactgtatgaccctgatgagggcacaatcaacattgacggtcaggacatcaggaattttaacgtcaattatctcagggagatcatcggggtggtgtctcaggagcccgtcttgtttagcacaacgattgccgagaacatctgctatgggcggggcaacgtgactatggatgaaattaagaaagctgttaaagaggctaacgcctatgagttcatcatgaaacttccgcagaagttcgacactttagtgggggaacggggcgctcagctgtccggcggtcagaagcagcgcattgcaattgcccgcgccctggtgaggaatccaaagattttgctcctggatgaagctacatcagctctggataccgagagtgaagcagaagtgcaagctgctcttgataaggccagggaaggccgcacaaccatcgtgatcgcccatcgcttgagcactgttaggaacgctgatgttattgccggcttcgaggatggggtgatcgtagaacaaggctcacacagtgagttaatgaagaaagagggggtctactttaagctagtgaacatgcagacaagcgggtcccagatccagagtgaagagttcgagcttaacgacgagaaggcagcaacacgcatggcgcctaatggttggaagagccgactcttcaggcactcaacccagaagaatctcaaaaactcccagatgtgccaaaagtctctcgacgtcgagacagatggcttggaggccaacgtaccaccagttagttttctgaaggtgctcaaactgaataaaaccgagtggccatattttgtggtgggaaccgtctgcgcaatagccaatgggggcctgcaaccagcattttccgttattttctcggagatcatagcaatctttggccccggtgacgatgcagtgaaacagcagaaatgcaatatcttcagcttaatcttcctgtttctcgggataattagcttttttacattctttttgcaggggttcacttttggtaaagccggggaaatcctgacgcgccgtctccgtagcatggcatttaaagccatgttaagacaggacatgagttggtttgacgaccataagaattccaccggggccctttcaactaggttggctactgatgcagctcaggtgcagggtgcaactggtacgagactggcgctgattgctcagaacatagcaaatcttggaactgggataataatttccttcatttacggatggcagttaactctgctccttctggctgttgtgccgatcattgcagtgagtggaatcgtggagatgaaactactggctggtaatgcgaagagggataagaaagaactcgaggcagcgggcaagatagcaactgaggcaatagagaatatcagaaccgttgtgagtcttacccaggaaaggaaatttgagagcatgtatgtggaaaagctgtacgggccttacaggaacagcgtacagaaggcgcacatctatggtatcacattttctattagccaagctttcatgtattttagctatgcaggatgtttccgtttcggggcatacttgatcgttaatggtcatatgcgattcagggatgtgatccttgttttttccgctatcgtgttcggtgcagttgctctggggcatgcaagctcattcgcccctgattatgcgaaagctaaactgtcggctgcccacctgttcatgctgttcgagcgccagcccctgatcgactcctattccgaggaagggctgaagccagataagttcgagggcaacattacattcaacgaggtggtatttaactatcccacccgggccaacgtgccagtgctccaaggcctgtcactggaagtgaaaaaggggcagactctggcactcgtggggagctccggctgcggaaagagtaccgtcgtgcaactcctggagcggttctatgacccattggccggaacagtcttcgtggatttcggcttccagcttctcgatgggcaggaggctaagaaactgaatgtacaatggctgagggctcagctcggtattgtcagccaagagccaatcctcttcgactgctctattgctgaaaatatcgcttatggggataattcacgggtggtgagtcaggatgagattgtatccgccgccaaagccgcaaatattcaccccttcattgagacccttcctcataaatatgaaacccgagttggggacaaaggcactcagctgagcggcgggcaaaaacaacggatcgctatcgctagagccctaataagacagcctcagattctacttttagacgaggctacaagcgccttggacactgagagcgagaaagtagtgcaggaagctctcgacaaggcgagagagggacgaacctgcatagtgatcgcccatagactgtcaaccatccagaacgctgatcttattgtggtgttccaaaacggcagagtgaaggaacatggaacacatcagcagcttttggcccaaaaaggaatctatttctcaatggtgagcgtgcaggctggaacccagaatctg

SEQ ID NO: 200301 - DNA, 3858 bp, Artificial Sequence
  derived and/or modified sequence
atggatcttgaggcagccaagaacggcaccgcctggcggcctacaagtgcggaaggggatttcgaactcggcatcagctcaaagcagaaacgtaaaaagactaagactgttaaaatgatcggagtgctgactctcttcaggtactccgattggcaggataagctattcatgtccctgggaaccatcatggctatcgcgcacggatctggtctaccgctgatgatgattgtcttcggggagatgaccgataagtttgtggacaccgcaggaaacttctctttccctgtgaacttttccctgtctcttcttaacccaggaaagatccttgaagaagagatgacaaggtacgcttactattatagcggcctcggagcaggcgtcttagtggctgcatatatccaagtcagcttttggaccctggccgctgggcgccaaattaggaaaatcaggcagaagtttttccacgcaatccttcgccaggaaattggatggtttgatataaatgacaccaccgagctcaacacgaggctcacagatgacatcagcaagatcagtgagggtataggcgataaggtcggaatgttcttccaggcagtcgctacattctttgcaggtttcatcgtgggttttatacgcggctggaaactcacacttgtgattatggcgattagcccaatcttgggactcagcgctgcggtgtgggctaaaatcttgagcgcttttagtgataaagagttggccgcgtatgccaaagccggcgcggtagcggaggaagctcttggagctatcagaaccgtgattgcgttcggaggccaaaacaaagaactggagagatatcagaaacacctggaaaatgcaaaagaaatcggaattaagaaagccatctccgctaatatctcaatggggattgccttcctcctgatttacgctagctacgctcttgccttttggtacggaagcacacttgtcatctctaaggaatacactatcggcaatgccatgacggttttttttagcattctcatcggagcttttagcgttgggcaggccgctccatgtattgacgccttcgccaacgcgcgcggtgcagcttacgtcatcttcgatatcattgacaacaatcctaagatcgatagcttcagcgaacgcggtcacaagccagactccataaaaggcaacctggagtttaatgatgttcatttctcatatccttctcgggccaatgtaaaaatcttgaaaggcctcaacctgaaggtgcaaagcgggcaaactgtggccctggtcggctcctcaggctgtggaaaatcaaccaccgtgcaactgattcaaagactgtacgatccagatgagggaaccattaacatagatgggcaggacatccggaacttcaacgttaactacctgcgggagatcatcggtgtggtgtcacaggagccggtcctcttcagcacaacaatcgcagagaacatttgctatggaagaggaaacgtaaccatggatgagattaaaaaagctgtgaaggaagcaaatgcttacgagtttatcatgaaactgcctcagaaattcgatacactggtaggcgagcgtggcgcccaactgtccggtggccaaaagcagaggatcgcgatcgctcgtgcactggtgagaaatcctaagatcctgcttctggatgaggcaaccagcgccctggacacagagagtgaagcggaagtacaggctgccctagacaaagctcgggagggaaggaccaccattgtgattgcgcaccgcctttcgactgttagaaatgctgatgtgattgcaggattcgaagacggagtcatcgtggaacaggggtctcattctgaactgatgaaaaaggaaggcgtctactttaagcttgttaatatgcagacttcaggttcacaaatccaaagcgaggagttcgagctcaacgatgaaaaggccgcaacaagaatggcacccaatggctggaagtcgagactttttcggcattctacccagaaaaacctgaagaactctcagatgtgccaaaaaagtctcgatgtggagactgatggccttgaggctaacgtgccacccgtctcctttctgaaggtcctgaaactgaacaagacagagtggccatattttgttgtcgggactgtatgcgcaatcgccaacggcggtctgcaaccagctttcagcgtcatcttcagcgaaattattgccatttttggtccaggcgacgatgccgtcaagcagcagaaatgcaacatcttttcactcatttttctctttctgggaataatttcatttttcacattctttctgcaagggttcaccttcggaaaggctggagaaatccttacgagaaggttaagatcaatggcatttaaggcgatgttgcgacaagatatgagctggtttgatgaccacaagaacagcactggcgctctttccacccggctggctaccgatgccgcccaagtacaaggcgcaactggaacaaggctggccctgattgcacagaatatcgccaacttaggaacaggcataatcatcagcttcatttacggctggcaactgacgctgctccttctggctgtggtgccgattatcgcggttagtggaatagtggagatgaagctattggccgggaacgccaaaagggacaaaaaggaactggaagccgcaggaaaaattgccaccgaggccatagaaaacattcgaactgttgtatcgttaactcaagaacgcaaatttgagtcaatgtacgtggagaaactgtacggtccctatcgtaactccgtgcagaaagcacatatatacggaattacttttagcataagtcaagcattcatgtacttttcttatgccgggtgtttcagattcggagcctatcttatcgtaaatggccatatgagattcagagatgtgatcttagtgttttctgccatcgtgttcggcgctgtagctcttggccacgcctcctccttcgctcctgattatgccaaggctaagttatccgctgctcacctgtttatgctgttcgagagacagccacttatcgatagctactcagaggagggacttaaaccagataaattcgagggaaatatcacatttaacgaagttgtgttcaactaccccacaagggctaatgtaccagtgcttcagggcctgtcactggaggtaaaaaagggccagaccctggctctcgtcggcagttcaggatgcggaaagagcaccgtcgtccaattactggagaggttctacgaccccttggctggcacggtatttgtggattttggctttcagctcctggatggacaggaggctaaaaagctgaacgttcagtggctccgcgcacagcttggaatcgtgagtcaggaacccatcttatttgactgttccatcgcagagaacattgcatatggggataactcgcgggtggtgtcacaggacgagatagtgtcagctgctaaagctgctaacatccacccgtttattgagacactcccacataagtatgaaaccagggtcggcgacaagggtacccagctgagtggagggcaaaaacagagaattgctattgctcgtgctctcatcaggcagccccagatcctgctgctggacgaggctacttcagcgctggacactgagtctgaaaaagtggtgcaagaggcgttagacaaggcaagagaggggcggacctgtattgtgatcgcacacaggttgtctaccatccaaaacgctgaccttattgtcgtctttcaaaatgggagagtcaaggaacacggcacacatcagcaacttcttgcccaaaaaggaatctacttttctatggtgtctgtgcaggcaggtacacagaactta

SEQ ID NO: 200302 - DNA, 3858 bp, Artificial Sequence
  derived and/or modified sequence
atggatttggaagctgcaaaaaatggtacggcctggagaccaacttcagccgaaggagatttcgaacttggtatttcgtctaaacaaaaaagaaaaaaaactaaaaccgttaaaatgattggagttcttacactttttcgatatagtgattggcaagataaacttttcatgagtcttggtacaataatggctattgctcatggttctggacttccattaatgatgatagtctttggagagatgacagataaatttgttgatacagctggaaatttcagttttccagttaattttagtctttctttactaaacccaggtaaaattcttgaagaagaaatgactagatatgcttattattatagtggattaggagcaggagttttggtagcagcttatatacaagtttcattttggacattggctgctggacgacaaattagaaaaattagacaaaaattttttcatgctattcttagacaggagataggatggttcgacataaatgatacaacagaactaaatacaagacttactgatgatatttcaaagatttcagaaggaattggagataaagttggaatgtttttccaagctgttgctacattttttgctggatttatagttggatttattagaggatggaaattaactttagttataatggctatttcaccaattttaggtttatcagctgctgtctgggcaaaaatattaagtgcattcagtgacaaagagctcgcagcatacgctaaagctggagctgttgccgaggaggctttgggagctatacgtactgttattgcatttggaggacaaaataaagagcttgaacgttatcaaaagcatcttgagaacgctaaagaaattgggattaaaaaagcaatttcagcaaatatttcaatgggtattgcttttcttttaatttatgcttcatatgcattagctttttggtatggaagtactcttgttatttctaaggaatatactattggaaatgcaatgactgtttttttcagtatacttattggagcattttcagttggacaagctgctccttgtattgacgcttttgcaaatgcaagaggagcagcttatgtcatttttgatataatagataacaatccaaagattgatagtttttcagaacgagggcataaaccagattcaattaagggtaatttagaatttaatgatgttcatttttcatatccatcacgtgctaatgttaaaatattaaaaggtttaaatctaaaggttcaatctggacaaacagtagcattagttggatcttcaggatgtggaaaatcaactacagttcagcttattcaaagattatatgatccagacgaaggaacaattaatattgatggacaagacattagaaattttaatgttaactatttaagagaaataattggggttgtttcacaagaaccagttttattctcaacaactattgctgaaaatatttgttatggacgagggaacgttacaatggatgaaattaaaaaagcagtcaaggaagcaaatgcatatgaatttattatgaagttaccacaaaaatttgatacattagttggagaaagaggtgctcaattatcaggaggacaaaaacaaagaattgcaattgctagagcacttgtaagaaatccaaaaattcttctattagacgaagctacaagtgcacttgatactgaatcagaagctgaagttcaagcagctttggataaagctagagaaggacgaacaactatagttattgcacatagattatctacagttcgaaacgctgatgttattgcaggtttcgaagatggtgttattgttgaacaaggatctcatagcgaacttatgaaaaaggagggagtatattttaaattggtaaatatgcaaacttcaggatctcaaattcaatctgaagaatttgaattaaatgatgaaaaagcagcaactagaatggcacctaatggatggaaatcaagactttttagacattctacacaaaaaaatttgaaaaattctcaaatgtgtcaaaaatcactcgatgtagaaacagacggattagaagcaaatgtaccaccagtttcatttcttaaagtattgaagctaaacaaaactgaatggccatattttgttgttggaacagtttgtgcaatagctaatggaggacttcaacctgcattttcagtaattttttcagaaattattgctatcttcggaccaggtgatgatgctgttaagcaacaaaaatgtaatattttcagtttaatttttctatttttaggaattatttcattttttacattttttttgcaaggatttacattcggaaaagctggtgaaatattgacaagaagattaagatcgatggcttttaaagcaatgttgagacaagatatgtcttggtttgatgatcataaaaattcgacaggtgcattatctacacgtttagcaacagatgcagcacaagttcaaggagcaacaggaacaagattagcattaattgctcaaaatattgcaaatttaggaacaggaattattattagttttatttatggttggcaattaactttattacttcttgcagtagtcccaattatagcagtttctgggattgtagaaatgaagttacttgctggaaatgcaaaaagagacaaaaaggaacttgaagctgctggaaaaattgctaccgaagcaatagaaaatattagaactgttgtttcacttacacaagaaagaaagttcgaatcaatgtatgtagaaaaattatatggtccatatagaaatagtgtacaaaaggcacatatttatggaattacattttcaatttcacaagcattcatgtattttagttatgcaggatgttttagatttggtgcttatttaatcgttaacggtcatatgcgttttagagatgttattttagttttctcagctattgtttttggagctgttgcattaggacatgcatcatcgtttgccccagattatgctaaagcaaaattaagtgcagcacatttatttatgctttttgaacgacaaccattaattgatagttattcagaagaaggacttaagccagacaaatttgaaggaaatattactttcaacgaagttgtttttaattatccaacaagagctaatgttccagtattacaaggattatctcttgaagtaaaaaaaggacaaacattagcccttgtaggatcaagtggatgtggaaaatctactgttgttcaattattagaaagattttatgatccattagctggaacagtttttgttgatttcggtttccaattacttgacggacaagaagcaaaaaaacttaatgttcaatggttacgagcacaattaggtattgtaagtcaagaaccaattcttttcgattgttcaattgctgaaaatattgcttatggagataatagtagagttgtatcacaagatgaaattgtttcagctgctaaagcagccaatattcatccatttattgaaactcttccacataaatatgaaacgagagttggtgacaaaggtacacaattatcaggaggacaaaaacaaagaattgcaatagcaagggctcttattagacaacctcaaattttattattagatgaagcaacaagtgctttagatacagaaagtgaaaaagttgttcaagaagctttagacaaagcacgtgaaggtagaacttgtattgttatagctcatcgtttatcaactatacaaaatgcagatttaatcgtcgtttttcaaaacggtagagttaaagaacatggtactcatcaacaattattagctcaaaaaggaatttatttcagtatggtttctgtacaagccggtactcaaaattta

SEQ ID NO: 200303 - DNA, 3858 bp, Artificial Sequence
  derived and/or modified sequence
atggacttggaagccgcaaaaaacggaactgcctggcgcccgactagcgccgagggcgactttgaactcggaatctcatccaagcaaaaacgcaagaaaaccaagaccgttaagatgatcggtgtgctgaccctgttccgctactcggattggcaggacaaactctttatgtcgctgggaactattatggcaatcgcccacggatccggactgccgctgatgatgatcgtgtttggcgaaatgaccgacaagttcgtggataccgcgggcaacttctcattcccggtcaatttcagcctctcgctgctcaacccaggcaagatcctggaggaagagatgactcgctacgcctactactattccggactcggggctggagtgctcgtggcagcttacattcaagtctccttttggacccttgcagcaggacggcagatccgcaaaatccggcagaaattcttccacgcgatcctgcggcaggagatcggatggttcgacatcaacgacactaccgagctgaataccaggctgactgatgacatctccaagatcagcgaaggaatcggcgacaaggtcgggatgttcttccaggcggtggctacttttttcgcaggttttatcgtgggcttcatccgtggctggaagctgactttggtgatcatggccatctcacccatccttggcctttccgctgcagtgtgggccaagatcttgtcggcgttctcggataaagagctggcggcgtacgcaaaggccggcgccgtggcggaggaggcgctcggcgccatccgcaccgtgatcgccttcggagggcaaaacaaggagctcgagagataccagaagcatctggagaacgccaaagagatcggcatcaagaaagcaatctcagccaacatctcgatgggcatcgctttcctgctcatctacgcttcgtacgcccttgctttctggtacggctccaccctggtgataagcaaagagtatactatcggtaatgcgatgactgtctttttctcgatcctgatcggagcgttctccgtcggacaggcggcaccgtgcatcgacgcgtttgcgaacgctaggggcgctgcctacgtgatctttgacatcatcgataacaacccaaagatagattcgtttagcgaacgcggacacaagccagactcaatcaagggaaacctggagtttaatgacgtgcacttctcctacccatcacgggccaacgtgaagatcctcaagggactcaatttgaaagtccaatccggacagaccgtggcgctcgtcggatccagcggatgtggaaagtcgactactgtccagcttatccagcgcctttacgacccagacgaaggaactatcaacatcgacggccaggatatccgcaatttcaacgtgaattacctcagggagatcatcggagtcgtctcccaggaacccgtgctcttctccacgactattgcggagaacatttgctatggccgcggaaacgtgactatggacgaaatcaagaaggcagtgaaagaggcgaacgcgtacgaattcatcatgaaactgcctcagaaattcgacactttggtgggcgaacggggtgcacaactttcgggaggccagaaacagcggatcgcgatagcgcgtgcgctggtcagaaacccgaaaatcttgttgttggacgaggcgacgtcggcgctggatactgaatccgaggctgaggtgcaagctgcactggataaagcacgggaaggccgcactaccatcgtcatcgcccaccgcctttccaccgtgcgcaacgccgatgtgatcgccggattcgaggacggagtgatcgtggaacaaggatcgcattcagagctcatgaagaaagaaggggtgtacttcaagctggtgaatatgcagacctccgggtcccaaatccaatcggaagagttcgaattgaacgatgaaaaggcggcgaccagaatggccccgaacggatggaagtcccggctgttccgccactccacccagaagaatctcaagaacagccagatgtgtcaaaaatcgctggacgttgaaactgatggcctggaagctaacgtgccgccagtgtcatttctgaaggtcttgaagctgaataagaccgagtggccctacttcgtggtggggactgtgtgcgcaatcgcgaacggaggattgcagccagccttcagcgtgattttcagcgagatcatcgcaattttcggacctggagatgatgccgtgaagcagcagaaatgcaatatcttctcgctgatttttctctttcttggcattatctcgtttttcaccttcttcctccaaggtttcaccttcggaaaagcgggcgaaatcctcacgagacgcctgcgctcaatggcgttcaaggcgatgctgagacaggacatgtcttggtttgacgatcataagaatagcaccggggcgctgtcgaccaggctcgccaccgatgcggcccaagtccagggagcaactggaacccggctggcgctgatcgcacagaacattgccaacctcggcactgggatcatcatctcctttatctacggttggcaactgactcttctgctcttggccgtcgttcccatcatcgcggtgagcggcatcgtggaaatgaagctcctcgccggaaacgctaaaagggataagaaggaactggaagccgcgggtaagatcgcaactgaggccatcgaaaacatccgcactgtggtgtcgctgacccaagaacggaagttcgagtcaatgtacgtcgagaagctctacggtccttaccggaactcggtgcagaaggcgcacatctacggaatcactttcagcatcagccaagccttcatgtacttcagctacgccggatgctttagattcggagcgtacctcatcgtgaatggccacatgcggttcagagacgtgatcctggtgttctcggccatcgtattcggggctgtggcactgggacacgcctcctcatttgccccagactacgcaaaggcgaaactgagtgcggcacatttgttcatgctcttcgaaaggcagccgttgatagatagctactcagaagagggactgaagccagataagttcgaaggaaatatcactttcaacgaagttgtctttaactacccgaccagagcaaacgtgccagtcctccaaggactctccctcgaagtgaagaaggggcagaccctcgcactggtgggttcctccggttgcggtaagtcgaccgtcgtgcaactgttggagcgcttctacgatcccctggccggaactgtgttcgtcgatttcggatttcaactgctggatggacaagaagctaagaagctcaacgtccaatggctgcgagcccaactcggaatcgtgtcgcaagaaccaatcctctttgactgctccattgccgagaacattgcttacggtgataactcccgcgttgtgtcccaggacgaaatcgtgtcagccgccaaggcggccaacattcatccgtttatcgaaaccctgccgcacaagtacgaaacccgcgtcggagataaagggacccagctctctggagggcagaagcaaaggatcgccatcgcgcgcgccctcatccgtcagccgcaaattctgctgctggacgaggctacttccgctctggacaccgaaagcgagaaagtggtccaagaagcgctggacaaggcgcgggaaggaagaacgtgcatcgtgatcgcacatcgcctgtcgactattcaaaacgccgatctgatcgtggttttccagaatggaagggtcaaagagcatggaacccatcaacaactcttggcacaaaagggcatttacttctccatggtttcagtccaggctggaacccaaaacctg

SEQ ID NO: 200304 - DNA, 3858 bp, Artificial Sequence
  derived and/or modified sequence
atggaccttgaggctgctaagaatgggacagcatggcggcccacctcagctgagggtgactttgagttggggatcagttcaaaacaaaaacgcaagaaaactaagactgtgaagatgattggcgttttgacattgttccgttattcggactggcaggacaaactgtttatgtccctcgggactataatggcgattgcgcacggctctggcttgccattgatgatgatcgtctttggggaaatgactgacaagttcgttgacaccgcaggcaatttttcttttcccgtaaacttttcactatcccttctgaatccaggaaagatactcgaagaagaaatgacgcggtacgcctattactatagcgggcttggagcgggcgtgttagtggcagcctacattcaggtgtcgttctggacccttgccgcaggccggcagataagaaagatacgtcagaagttctttcatgccatactcagacaggagatcggctggttcgacataaacgatacaaccgagttgaacactagactaacggacgacatttcgaaaatatctgaggggattggtgataaggttggcatgtttttccaggcagtggccacattctttgctggttttatagtgggattcatcagggggtggaaattgaccctcgtaatcatggccatttctccaattctgggcctttctgctgccgtgtgggcaaagatcctgagtgcattttccgacaaggaattagccgcttatgccaaggccggcgccgtggcagaagaggcactgggggcaatccgcacagttattgcgttcggcggccagaataaggaactcgagcgctatcagaagcatcttgagaacgccaaggagataggtatcaaaaaggccatatcagccaacatttccatgggaatagcctttctgctgatctatgcctcctacgcgttagctttttggtacggttccacgctggtgatcagtaaggagtatactataggaaatgcgatgacagtgttttttagcattctgattggcgcgttctccgtggggcaggccgctccctgcattgatgctttcgctaatgccagaggagcggcatacgtaattttcgacatcattgacaataaccctaagattgatagcttctctgagagaggacataaaccggactcaattaagggcaatctggagtttaatgacgtgcatttctcctaccccagtcgggccaacgttaaaatcttgaaggggctgaacctgaaggtgcagagcggacaaacagtagcactggtggggagctctggttgtggcaaatcaaccaccgtccagctgattcagaggctgtatgatcctgatgagggcacgattaacatagatggtcaagatatccggaattttaacgtgaactacctccgagaaataataggtgtggtgagccaagagccagtgctcttttcgaccacaattgctgagaacatttgctacgggcggggtaatgtgactatggatgaaataaagaaggccgtgaaggaggcaaatgcgtatgaattcattatgaagctgccgcagaagtttgacactctggtgggcgagcgcggggctcaactctccggggggcagaaacagaggatcgcaatcgccagagcgttagtgcggaacccgaagatactcctgcttgatgaagctacatccgcattggatactgaatccgaggcagaagtgcaggctgctttggataaggccagagaaggtcggaccaccatagtaatcgcacacaggctcagcactgtgcggaatgctgacgtgattgccggattcgaggatggcgtgatagtggaacagggatcacattccgagctgatgaaaaaggaaggtgtttactttaagttagtgaatatgcagacttccggaagtcagattcagtctgaagagttcgagctgaacgacgagaaagccgccacacgcatggcccccaacggctggaaatcgcgcctcttcaggcattctacacagaaaaatttaaaaaatagccaaatgtgccagaaatccctggatgtggaaacggacggcctggaggctaacgtcccgcccgtttcttttttaaaagtccttaagctgaataaaacagaatggccttattttgtagtgggtacggtttgcgctattgcgaatggagggctccaaccagctttttcagtgatatttagtgagattatcgcgatatttggccccggcgacgatgctgtgaaacagcagaaatgtaatatcttttccctgatcttcttgttcctgggcatcatctcgttttttacattcttcctacagggcttcaccttcggtaaggccggcgaaatccttactaggagattacgcagtatggcattcaaagctatgctccggcaggatatgagctggtttgacgatcacaaaaactccacgggcgccctatccacccgcctggcaaccgatgctgctcaagtgcaaggcgctacaggcacaaggctggcccttattgcccagaacatcgccaacctgggaaccggcataataatatcttttatttacggttggcagttgaccctgttactgctggctgttgtgccaatcattgccgtctcagggatcgtcgagatgaagctgctggcaggcaatgcgaagcgcgataagaaggaacttgaagcagccggtaagatagctacagaggctattgagaacatcaggaccgtcgtttcccttacgcaggaacggaaattcgagtctatgtacgtagagaagctgtatgggccgtacagaaattcggtccaaaaggcccacatctacggaatcaccttctcgatctcacaggctttcatgtatttttcatatgccggctgttttcggtttggggcatatctaatcgtgaacgggcacatgagattccgggacgtaatactcgtattctcagcgattgtgttcggcgcggttgcactgggtcacgcgtcttcgttcgctccggattatgccaaggctaagctatccgcggcccatttatttatgctgtttgagcgccagccactcattgacagttactccgaagaggggcttaaacccgataagtttgagggcaatataacattcaacgaagtagttttcaactacccaacacgggcaaatgttcccgttctacaggggctgtcgctggaagtaaagaaaggccagacgctggctctggtcggctcctccggttgtggaaagtccacggtggtacagttactagagagattttatgacccattggctggaaccgtatttgtggacttcggctttcagctgttggacgggcaggaagctaaaaagttgaatgtccagtggcttagggcacaactcgggatagtgtcgcaagaaccaatactcttcgactgttcaatagcagagaacattgcttatggcgataatagtcgggtggtctcccaagatgaaatcgtgtccgcagcaaaagccgcaaatattcacccttttatcgagaccctgccccacaagtacgagactagggttggcgacaaaggcacccagctgagtggaggccagaagcagagaatagctattgctagggccctgataaggcagccacagattttgctgctggacgaggcaacttcggccttggatacggagtcagagaaggtggtccaggaagcattggacaaggcgcgggaggggagaacctgcatcgtcatcgcccacagactgagcaccatccaaaatgcggatctcattgtcgtctttcagaacgggcgggttaaggaacacgggacccatcaacagctgctcgcacagaaaggcatatatttttctatggtgagcgtacaggcgggaacccagaacttg

SEQ ID NO: 200305 - DNA, 3858 bp, Artificial Sequence
  derived and/or modified sequence
atggatctggaggccgctaagaatggcacggcctggcgacccacgtccgcggagggagactttgagctgggaatctccagtaagcagaaacgcaaaaagaccaaaacagtgaagatgatcggcgttcttaccctcttccgctactcagattggcaggacaagctgtttatgtctctggggaccataatggccatagcacacggatctggcttgcccctcatgatgatcgtttttggagaaatgactgataaattcgtggacaccgctggtaactttagtttccctgtcaattttagcctgtctttgcttaaccccggaaagatcctggaggaagagatgacacggtacgcttattactacagcggtctgggagcaggagtgttggtcgcagcctacatccaggtctccttctggactttggcagcaggacggcaaatcagaaagatacggcaaaaattttttcatgccatccttcggcaggagatcgggtggttcgacattaacgatacaactgagctgaacacgcgattgaccgacgacatctctaagattagtgagggcatcggcgataaggtaggaatgttcttccaggccgtcgcaacattcttcgcagggttcatcgtgggattcatccgaggctggaagctcaccctggtgattatggcaattagtccaatactgggtctctccgcagctgtgtgggctaaaattctgagtgccttttcagacaaggaacttgcggcttatgccaaggctggagctgtggccgaggaggcgctgggcgccatccgcaccgtgatcgctttcgggggacagaacaaggagctggaacgatatcaaaagcatctggagaacgcaaaggagattgggatcaagaaggcaatttcagccaacatatcaatgggcattgccttcctgctgatatacgcgtcctatgcactggccttctggtacggcagcacattggtcatctcaaaggagtatacaatagggaacgcgatgaccgtgtttttttccatcttgattggggccttcagcgttggccaggccgccccgtgcatcgatgcctttgctaacgcccgaggagctgcatatgtgattttcgatatcattgacaataatcccaagatcgatagctttagcgaacgcggacataagccagattctatcaagggcaacctggagttcaacgatgtgcattttagttacccaagtcgcgctaatgtgaagatcctgaagggtctcaatttgaaggtccagtccggacagacagttgccctggttggatctagcggatgtggcaagtccaccactgttcagctgatccagagactgtacgaccctgacgaaggaacaattaacattgacgggcaagacatcagaaacttcaacgtgaactacctgcgcgagattatcggagtggtgtcacaggaacccgtgttgtttagcactaccatagcggagaacatttgctatgggagaggcaatgtgactatggatgaaatcaaaaaggccgtgaaggaagctaacgcctacgaatttatcatgaagcttccccagaagttcgatacgctcgtcggtgagcgcggagcacagctgtcaggcgggcagaagcagagaatcgcgatcgctcgagctctcgttagaaacccaaaaatattgctgctggacgaggctaccagcgccttggacaccgagtccgaggctgaagtgcaggctgcgttggataaggcacgggagggccgcaccacgatcgttattgcacaccgcctgtctaccgtcaggaatgcagacgttattgctggctttgaagatggagtcatagtggaacaagggtcccactcagaacttatgaagaaagagggagtctatttcaagctggtcaatatgcagacgtccgggtcacagatccaaagcgaagagttcgaattgaacgacgaaaaagccgccacacgcatggcccctaatggctggaagagcaggctcttcagacattctacacaaaagaatctgaagaatagccagatgtgtcaaaaaagtctggatgtggagacggacggcctcgaagccaacgtgcctccagtctcattcttgaaggtcctcaaattgaacaaaacagaatggccctacttcgttgtgggcacagtatgtgcaatcgcaaacggcggtctgcagcccgcattttctgtaatattctcagagattattgctatattcggaccaggcgacgatgccgtgaaacaacagaagtgcaacattttttctctgatctttctctttttgggtatcatttcatttttcaccttttttctgcaagggtttacgttcggaaaggccggggagattctgacaaggaggctgagatccatggccttcaaggctatgctcaggcaggatatgagctggtttgacgaccataagaattctaccggggccctttctaccagactcgccactgatgctgcacaggtccagggcgctacgggtacgcgactcgcactcatagcccagaacattgctaatctgggaacaggtatcatcatttccttcatctatggctggcagcttacactcctgctgctggctgtggttccaatcatcgccgtgtcaggaatcgtggagatgaagctgctggccggaaatgcaaagcgcgataaaaaagaactggaggcagccggcaaaatcgcaaccgaagcaattgagaacatccgcacagtcgtatcactcacgcaggaaaggaagttcgaatcaatgtacgtcgaaaaactgtacggcccatatcggaatagtgtgcagaaggctcatatttatggcattacattcagtatttcccaggctttcatgtatttctcctatgcagggtgcttccgctttggggcttacctgatagtcaatgggcacatgcggttccgagatgtgatcctggttttctcagccattgttttcggcgctgtcgcacttgggcacgcctcctccttcgctcccgattacgccaaggccaaactgagcgccgcccacttgtttatgctgtttgaacgccagccattgatcgatagctatagtgaagagggcttgaagcctgacaagttcgaggggaatattactttcaatgaggtagtgttcaattatcctactagagccaatgtgccagtactgcaaggcctgagtctggaggtcaaaaaaggccagacccttgcattggtggggtcctccggatgtggcaaatctactgtggtgcagcttttggagcgcttttacgaccccctggctggaactgtgttcgtggacttcggcttccaactgctggatggccaggaagccaaaaaactgaatgtgcagtggctgcgggctcagctcggcatagttagccaagagccgatccttttcgactgttctatcgcggaaaatatcgcatacggcgacaattctcgagtggtgtctcaggacgaaatcgtgtcagctgctaaggccgccaatatccacccctttatcgaaacactgccacacaagtatgagaccagggtgggggataaagggacccaactttccggcggccagaagcaaaggattgccatcgcccgggcgctgattcgccaaccgcagattctgttgctggatgaggccacaagcgcccttgacactgaatcagagaaggtcgtgcaggaggcactcgacaaggctcgggaggggaggacctgtatcgtgatcgctcatcgcctgagcaccattcagaatgcagatctcatagtcgttttccagaatggccgagtcaaagaacacggaacgcatcagcaactgttggctcaaaaaggcatatactttagtatggtcagcgtgcaggcaggaactcagaacctg

SEQ ID NO: 200306 - DNA, 3858 bp, Artificial Sequence
  derived and/or modified sequence
atggatctggaagcagcaaagaacggtaccgcctggcgccctacctccgcggaaggggattttgaattgggcatctcgtctaagcagaagaggaaaaagaccaaaactgtcaagatgatcggagtgctgaccctgttccggtactcagactggcaggataagctgttcatgtcacttggtaccatcatggccatcgcccacggatccggactcccactcatgatgatcgtgtttggagagatgaccgacaagtttgtggatacggccggaaacttttctttcccggtgaatttctccctgtccctgctcaatcccggaaagatcctcgaggaggagatgacccgctacgcctactattacagcggcctgggtgccggagtgctcgtggccgcttacatccaagtctcgttctggactctcgcagcaggacggcaaatccgtaaaatccgacagaaattcttccatgcaatcctccggcaggaaatcggttggttcgacattaacgatacgactgaactgaatacccgcctgacggatgacatctctaagattagcgagggtatcggcgataaggtgggaatgttctttcaagctgtggcgaccttcttcgctggcttcatcgtgggattcatcaggggctggaagctgactctggtgatcatggcaatctccccgatcctgggcctgtcagcggctgtctgggctaagatactgtcggccttctccgacaaggaactcgcagcatacgccaaagcgggcgccgttgctgaagaagcccttggcgccattcgcacggtgatcgcctttggaggccaaaacaaagaactggagagataccaaaaacaccttgaaaatgccaaggagatcggcatcaagaaggcaatctctgccaatatcagcatgggtatcgcgtttttgctgatttacgcgtcctatgcgctggcgttctggtacgggtccaccctcgtgatcagcaaggaatacaccatcggaaacgccatgactgtgttcttctccatcttgattggagccttctccgtggggcaggccgccccgtgcatcgatgctttcgcgaacgctcggggagctgcgtatgtcatctttgacatcatcgacaacaaccctaagattgactcgttctcggaaagaggacacaagcccgactccatcaagggcaatctcgagttcaacgatgtgcacttctcgtacccttcccgcgccaacgtgaagatactcaagggccttaacctcaaggtgcagtcgggccagaccgtcgccctcgtgggaagcagcggttgtggaaagtctaccaccgtccaactcatccagcgcctgtacgacccagacgagggcaccatcaacattgatgggcaggacatcaggaacttcaatgtgaattacctgcgcgagatcatcggggtggtgtcacaggaacccgtgttgttcagcactactatcgccgaaaacatctgctacggacggggaaatgtcacgatggacgagatcaagaaggccgtgaaggaggcaaatgcttacgagtttatcatgaagctgcctcagaaattcgacactttggtcggcgaacggggcgcccagctctcggggggacaaaagcagaggattgcaatcgcacgcgcgctggtgaggaacccgaagatcctgctcctggacgaagcaacctcagcacttgataccgaatccgaagccgaagtgcaggcggcattggataaagcaagggaaggaagaactactattgtgattgcccatcgactgtcgaccgtgaggaacgccgacgtgatcgcaggattcgaggacggagtcatcgtcgaacaggggtcccattcggagttgatgaagaaggagggagtgtacttcaaacttgtcaacatgcagacgtccgggtcgcagatccagtcggaagagtttgagctcaatgacgagaaggcggcgactcggatggccccaaatggatggaaatcgcggcttttccgccactccactcaaaagaacctcaagaactcacaaatgtgccagaaatccctcgacgtggaaactgacggacttgaggccaacgtccctcctgtctcgtttctgaaggtcctgaagttgaacaaaactgagtggccgtatttcgttgtcggcaccgtttgtgctatcgcaaatggggggctccaaccggccttctcggtgatcttctcagagatcatcgcaattttcggacctggcgatgatgcagtgaaacaacaaaagtgcaatatcttctcactgattttcctcttcctcggcataatctcattcttcactttctttctgcaagggtttactttcggtaaggcgggcgaaatcctcactcgcagactgcgcagcatggcctttaaggccatgcttcgacaggatatgtcgtggttcgatgaccataagaactcgactggagcgctgagcacccgcctcgctacggacgctgcccaggttcagggtgcgaccggcacccggcttgcgcttatcgcccagaacatcgcgaacctgggtaccggaattatcatcagcttcatctacggctggcaattgacgttgctcctgctggctgtggttccgatcattgccgtgagcggaatcgtggagatgaagctgttggccggaaacgcgaagcgggacaaaaaggaactggaggccgcaggaaaaatcgccaccgaagcaatcgaaaacatcaggaccgtcgtgagcctgacgcaggagcgcaaattcgaatccatgtatgtcgagaagctgtatggaccctaccgaaattcagtgcagaaggcacacatttacggaatcactttcagcatttcccaagcgtttatgtacttttcatacgctggatgtttccgctttggagcctacctgattgttaacggacatatgaggttccgggacgtgatcttggtgttctcagctatcgtgttcggcgctgttgcactgggacatgcgagcagcttcgcccccgactacgccaaagcaaaactgtcggcggctcacctcttcatgctgttcgaacgccaaccgctgatcgattcatactctgaggaagggttgaaacccgacaaattcgagggaaatatcaccttcaatgaggtcgtctttaactacccgactcgggcgaacgtccccgttctgcaaggcctctccctcgaggtcaagaaggggcaaactctggctctggttggaagctccggatgcggcaaatcgaccgtggtccaactccttgagcgcttttacgatccactggctgggaccgtgtttgtggacttcggctttcagctcttggacgggcaggaggcaaagaaacttaatgtgcagtggctgagggctcagctcggtatcgtgagccaggaaccgatcctctttgattgctcaatcgcagagaacatcgcgtacggagacaactcccgcgtggtgtcacaagacgagattgtgtccgccgccaaggcagctaacatccacccgttcatcgaaaccctcccacacaagtacgaaacgcgcgttggtgataagggtactcagctgtctgggggacagaagcagcgtatcgccattgcgcgcgccctgatccggcagccacaaattctgctgctggatgaggccacttcagccctggatactgagagcgagaaggtggtgcaggaggccctggacaaagcgagagaaggccggacctgtatcgtcattgcccaccggttgtcgactatccagaacgccgatctgatcgtcgtgttccaaaatgggcgggtcaaagaacacggaacgcatcagcaactgcttgcccaaaaaggaatctacttctcgatggtgtccgtgcaagcaggcacgcagaatctg

SEQ ID NO: 200307 - DNA, 3858 bp, Artificial Sequence
  derived and/or modified sequence
atggatctggaagccgcaaagaatgggactgcatggcgcccaacgagtgcggagggcgacttcgaactcggtatctcgtcgaagcaaaagcggaaaaagactaagaccgtgaaaatgatcggagtgctgaccctcttccgctactcagactggcaggacaagctctttatgtcgctgggaactataatggcaatcgctcacggatccggtctgccgttgatgatgatcgttttcggcgaaatgacggataagttcgtggacaccgcggggaatttctcctttcccgtgaacttttcactctcgctcctcaatccaggaaagatcctggaagaagagatgacgcgctacgcgtactactactctggactgggcgccggtgtgctggtcgccgcatacatccaggtgtccttctggactctggcagccggacggcagatccgcaaaattcggcagaaattcttccatgccatcctccggcaggaaattggatggttcgacatcaacgataccactgagctgaacacccgcctgactgatgatatctcaaagatttcggaaggaatcggggacaaagtgggcatgttttttcaggctgtggctactttcttcgccgggtttatcgtggggtttatcaggggttggaaattgacgcttgttatcatggcgatctcgccgattttgggactgtcggccgccgtgtgggcgaaaatcctgtctgcgttttccgacaaagaactcgccgcgtacgcaaaggcaggggctgtcgcagaagaggcactcggagcgatccgcacggtgatcgctttcggtggacagaataaagagctggaaaggtatcagaaacatctcgagaatgctaaggaaattggaataaagaaggctatcagcgccaatatcagcatgggaatcgcctttctcttgatctacgcctcgtacgcactggccttctggtacggatcgaccctcgtcatctccaaggagtataccatcggcaatgccatgaccgtgttcttctcgattctgattggagccttctcggtcggtcaggcggccccttgcatcgacgccttcgcaaacgccagaggcgcagcgtacgtgatcttcgacattattgataacaacccgaagattgacagcttctccgagaggggtcacaaaccggattcaatcaagggcaatctggaattcaacgacgtgcacttttcgtacccgtcacgagccaacgtcaagattcttaaaggcctcaatctgaaagtgcagtctggacagactgttgctctggtcggctcgtcaggatgtgggaaaagcactaccgtgcaactgatccaacggctctacgacccggacgaagggaccattaacatagacgggcaggacatccgcaactttaacgtcaattacctgcgcgagattattggggtggtgagtcaggagccagtgctgttctccaccaccatcgcggaaaacatctgctatggacggggcaatgtgaccatggatgaaatcaaaaaggccgtgaaggaagcgaacgcctacgagttcatcatgaagctccctcaaaagttcgacactctcgtgggtgaacggggtgcacagttgagcggagggcaaaagcaacggatcgccatcgcgagggctctggttcgcaaccctaaaatcctgctgctggatgaggctacgtcagcgttggacaccgagtcggaagctgaggtccaagccgccctggacaaggcccgggagggacgaaccactatcgtgatcgcacatcggctgtccaccgtgcgaaacgccgacgtgatcgccggattcgaggacggcgtgatcgtggagcagggctcccactccgaattgatgaaaaaggaaggcgtgtactttaaactcgtgaacatgcagacctccgggtcccagatccagagcgaagagttcgagctcaatgatgagaaggccgccactagaatggcaccaaacggatggaagtcccggcttttcagacactcaactcaaaagaacctcaaaaactcccagatgtgccaaaaatcactggacgtggaaactgatggacttgaagccaacgtgcccccggtgtcattcctcaaggtgctcaaactgaacaagaccgaatggccatacttcgtggtgggcacggtgtgcgctatcgcgaatggaggccttcagccggctttctccgtcattttcagcgaaatcatcgccatcttcggaccaggtgatgacgccgtcaagcagcaaaaatgtaatatcttctctctcatcttcctgttccttgggataatctccttctttactttctttctgcagggcttcaccttcggaaaggcgggagaaatcttgactcggcggctcagatcaatggccttcaaagcgatgctgcggcaagatatgtcctggttcgatgaccacaagaactccaccggtgcactctctaccagactcgctaccgacgcggcccaggttcagggggccaccggaacgagactcgcgctcattgctcaaaacatcgcgaacctcggcaccggcattatcatctccttcatttacggatggcaacttactctcctgttgttggctgtcgtgccaatcatcgcggtgtcaggtattgtcgagatgaaactgctcgccggaaacgccaaaagagacaagaaggaacttgaggcggcgggaaaaatcgccaccgaagcgatagagaatatccggaccgtagtgtccctgacccaagaacgcaagtttgaatcaatgtacgtggagaaactgtacggcccgtatagaaatagcgttcaaaaggctcatatctacggaatcaccttttcgatctcccaggcgttcatgtacttctcctacgcaggttgctttcggttcggagcgtaccttatcgtgaatggacatatgcgctttagagacgtgatcttggtcttttccgctatcgtgttcggagccgtcgcgcttggacacgcctcatccttcgcccctgactacgcgaaggcgaagttgagcgcggcgcacctgttcatgctcttcgagagacagccgctgatcgattcgtactcggaggagggactgaagcccgacaagttcgaaggtaacatcaccttcaacgaggtcgttttcaactaccctacgagagccaacgtcccagtcctccaaggactttcgttggaagtcaaaaagggccagactttggccctcgtgggcagctctggctgcggcaagtcgacggtcgtgcagctgctggaaaggttctatgaccccctggcgggaaccgtttttgtggatttcggtttccagctcctcgacgggcaagaggccaagaaactgaacgttcaatggctgagagcgcagctgggcatcgtgtcacaagagccaatcctcttcgattgcagcatcgccgagaacatcgcctacggggacaacagccgcgtggtgtcacaggacgagatcgtctcggccgcgaaagccgccaacatccacccgttcatcgaaaccctgcctcacaagtatgaaactagagtgggagacaagggaactcagttgagcggcggtcagaagcagcgcattgccatcgccagggcgctgatccgccagccgcaaattctgttgcttgacgaagccacctcggctctcgacaccgaatcggagaaagtggtgcaggaagcgctcgacaaggccagagaagggagaacctgtattgtgatcgctcataggctcagcacgatccagaatgccgatctgatcgtggtgttccaaaatggacgcgtcaaggagcatgggacccaccaacagcttctggcccaaaaagggatatacttcagcatggtgagcgtgcaagcgggaactcagaacctg

SEQ ID NO: 200308 - DNA, 3858 bp, Artificial Sequence
  derived and/or modified sequence
atggatcttgaggcagccaaaaacggaacagcatggcgccccacctccgcagagggggactttgagcttggaatttcatctaagcagaaaagaaagaaaaccaaaacggtgaagatgatcggtgttctgaccctcttcagatattcagattggcaggataagctctttatgtctctgggcaccattatggccatcgcccacgggtcagggctgccccttatgatgattgtcttcggcgaaatgacagacaaatttgtggacaccgctgggaacttcagcttccctgtcaacttctctttgagcctccttaatccgggcaagatcctggaggaggagatgactcgatacgcatactactactcggggttgggagcgggcgtactggtagcggcctatatccaggtgtccttctggacactcgccgccggccgccaaattaggaagatccgccagaagttcttccatgcgatcctgagacaggagattggttggttcgacataaacgacactaccgagttgaacacccggttaacagacgacatatcgaagatctccgaaggcatcggagacaaggtaggtatgttttttcaggccgttgctacgttcttcgcgggctttattgttggcttcatccgagggtggaaactcacactggtgatcatggcgattagccctatcttagggctctctgcagccgtctgggcaaagattctgtccgccttttcagataaggaactggccgcttatgctaaggccggggccgtcgccgaggaggccctgggtgcaattaggaccgtgattgcttttgggggtcagaataaggagctcgagagataccagaaacatcttgagaatgctaaggaaatcggtattaagaaggcgattagcgccaacatctcaatggggattgctttcttactgatttatgctagctatgccctggccttttggtatgggtcaaccctggtcatatccaaggagtacacaatcggcaacgccatgacggtgttcttctcgatcttaataggggcttttagtgtcggccaagctgccccatgtatcgatgcatttgcgaatgcacggggcgccgcctacgtcatttttgatataatcgacaacaatcctaaaattgacagtttcagtgaacgcggacataaaccggatagcatcaagggtaatttggaattcaatgatgttcatttctcttatccctcccgtgccaatgttaagatactaaaaggccttaacttgaaggtgcagtctgggcaaactgtggctctggtcgggagttccggatgcggcaagtctaccacagtgcaacttatccaacggctgtacgatccagacgagggtaccataaatattgacggccaggacattaggaatttcaacgtgaactatctgagggaaattataggcgtggtctcacaggaaccagttttgttcagcacgactatcgcagagaacatatgttatggccgcggcaacgttactatggatgaaatcaagaaggctgtgaaggaagcaaatgcctatgagtttatcatgaagctcccccagaagtttgatactctcgtcggtgaacgaggagctcaactgtcgggcggccagaagcaaagaatcgctattgctcgtgctttggttaggaatcctaagatcctccttctcgatgaggccacatctgccctagacacggagtctgaagcggaagtgcaagctgctctagataaggcccgtgagggccggaccactatagtcattgctcacaggctctctacagtccgcaacgccgatgtgattgccggcttcgaagacggcgtgattgtggaacagggatcccacagcgagctcatgaagaaggagggggtgtacttcaagctagtgaatatgcagactagcggctctcagatccagtccgaggagtttgagctaaacgacgagaaagctgcaacacgaatggcgcctaatgggtggaagtcccgcctttttcgccacagcacacagaagaacctcaaaaactcgcagatgtgccaaaaaagcttggacgtcgagaccgatggactggaggccaatgtgccacccgtgtccttcctgaaggtgctgaagcttaataagacggagtggccttattttgtggtaggtacagtgtgcgctatcgccaacggcgggcttcaaccagccttctctgtgattttctccgaaattattgccatcttcggaccgggcgacgatgccgtgaagcaacagaagtgtaacattttcagtctaatcttcctgttccttggcataatttctttctttacgttcttcctgcaggggtttacgtttggcaaggccggtgaaatcctgacgcggagattgaggtcaatggcctttaaggccatgctgaggcaggatatgtcttggtttgacgaccacaaaaactcaacaggcgccctcagcaccagactcgctacagacgcagcccaggtgcagggggcaaccggtactcggctggcactgattgcccagaatatcgctaatctgggaaccggaattatcatctctttcatctacggatggcaacttactttactgcttctcgccgtcgtgcccattatcgctgtaagcggcattgtggaaatgaaacttctagcaggaaatgcgaagcgcgataagaaagaactggaggcagctgggaaaattgctaccgaggctatcgagaacattcggacagtcgtgtcactcacacaggagagaaaattcgaaagtatgtacgtagagaagttgtacggaccttaccggaactcagtacagaaggctcatatctacggcatcacattttccatcagccaggctttcatgtacttctcatacgctggctgctttaggttcggagcctacttgattgtgaacggtcacatgcggttccgcgatgtcatacttgtgttctccgccattgtattcggggcagtggcactgggtcacgccagcagcttcgccccagactacgcgaaggccaaattgtctgccgcccacttgttcatgctatttgaaaggcagccgcttatagactcgtattccgaagagggcctaaaacctgataaattcgagggtaacatcactttcaacgaggtcgtgtttaactatcccacacgcgccaacgtgccggtgctgcaagggctcagcctggaggttaagaaggggcagacactcgcgcttgttggctcctccggctgcggaaagtcaactgtggtccagctccttgaaagattctacgatcccctcgctggcaccgtgttcgttgatttcggatttcaactcttggacgggcaggaagcgaagaagcttaacgtgcagtggttgcgagcccagctgggcattgtcagccaggagcccatcctctttgactgctctatcgccgaaaatatcgcgtacggcgataactcacgcgtggttagccaggatgagatcgtctccgctgctaaggcggccaacatacatccgttcatagagacactcccacataagtatgaaacccgcgtgggcgataaaggtacacagctgagcggaggccagaagcagcggatcgcaatagcccgagcgctgattagacaaccccaaatcctattgctggacgaggccacgtctgccctcgatacagaatcagagaaggtggtgcaggaggctttagacaaagcccgcgagggccgtacgtgcatcgtgatcgcacacagactgtcgacgattcagaatgctgatctgatcgtagtgttccagaatggtcgggtcaaggaacatgggacccatcagcaacttctggcacaaaagggcatctacttctccatggtgtctgtccaggccggaacccaaaatctc

SEQ ID NO: 200309 - DNA, 3858 bp, Artificial Sequence
  derived and/or modified sequence
atggatctcgaggccgcaaaaaacggaacagcctggcgaccaacctcagctgaaggcgacttcgagctaggtatctcctcaaagcaaaaaaggaagaagacaaagaccgtcaaaatgatcggcgtactgaccctcttcagatacagcgactggcaggataagttgttcatgtcactcgggactatcatggcaatcgcacacggatcaggcctccctctgatgatgattgtgtttggagaaatgacagacaagtttgttgatactgccggtaacttttcttttcctgtcaacttttccctcagcctgttaaaccccggaaagattctggaagaggagatgaccaggtacgcttactattactcaggcctgggtgctggagtactggtggccgcttatatacaagtgtctttttggacactcgccgcaggccgacagatacgcaaaataagacagaagttcttccacgcgattctgcgccaggagatcggctggttcgacatcaatgacactaccgaactgaataccaggctcactgatgatatcagcaaaatcagtgaaggaataggagataaggtgggtatgttttttcaggctgttgcgactttctttgcgggattcatagtgggatttatacgcggttggaaattgaccctggttatcatggccattagccccatcctgggactatcggcggcagtttgggctaagattctgagcgccttcagtgacaaggagctcgccgcgtacgccaaggctggcgctgtggccgaggaggcgttgggagcaatcagaacggtaatcgcttttggcgggcagaataaggagctggaacggtatcagaagcacctggaaaatgctaaggagatcggcatcaagaaggctatctctgcaaatatcagcatggggatcgcctttctgctcatttatgcctcttatgcgctggccttctggtacgggtcaacactggtcatttctaaagaatatacaattgggaacgctatgaccgtcttttttagcattctcatcggagcttttagtgtgggtcaggccgctccctgcatcgacgcttttgccaatgctagaggagctgcctacgtcatcttcgacatcatcgacaataaccctaaaatcgacagcttcagcgaacggggccataaacctgactccatcaagggcaacctcgagttcaacgacgtccatttttcctacccatctagagctaacgtgaaaatcctgaaggggctcaacttgaaggtccagtccggccagactgtggccttggttggctctagtggctgtggcaagagtactaccgtgcagctcatacaacgcctctacgatccagacgagggcacaatcaacatcgatggacaggacatcagaaacttcaacgtgaactatcttcgcgagatcatcggcgtggtaagccaggagccagtgctctttagcacaactatagcagagaacatctgctatgggaggggcaacgtgactatggatgagatcaaaaaagccgtaaaggaagctaatgcttacgagtttatcatgaagctccctcaaaagttcgatactttggttggagagagaggagcccagctttccggcggacagaagcaacgaatcgccatcgcaagggcccttgtgagaaatccaaagatcctgttactggacgaggcaaccagtgcactcgataccgagagcgaagccgaagtccaagctgctcttgacaaagctcgtgaaggaaggaccaccatcgttatcgcacaccggctgtctactgtccggaacgccgacgtgatcgcaggctttgaggatggagtcattgtggaacaggggagccacagcgagctgatgaaaaaggagggagtgtattttaagctcgttaacatgcagacatccgggtctcagatccaaagcgaagagttcgaactgaatgatgagaaggccgctacccgaatggcacctaatggctggaagagccgactctttagacatagcacacaaaagaaccttaaaaacagccaaatgtgccagaagtccctggatgtggaaaccgacgggcttgaggcaaacgtgccacctgtgtcattcctgaaggtcctgaaactgaacaagacggagtggccatatttcgtcgtgggcacagtctgtgcgatcgcaaacggtggcttgcagcccgcttttagcgtcatttttagcgagatcatagcaatctttggccccggagatgacgcagttaaacagcagaagtgcaacattttctccctcattttcctcttcctgggtatcatcagcttctttacattcttcctgcagggattcacattcggaaaagcaggggaaatcctgactagacgattacgcagcatggctttcaaagctatgttgagacaagacatgtcatggtttgatgatcacaagaattccaccggggctctgagcacaagattggcgaccgacgctgcccaggtgcagggagccaccgggactagattggcactcatcgcccagaatatagccaacctcgggactggaattattatatcattcatttatggctggcaacttacccttcttttgctggcggtggtgcctattattgccgtgagcggaatcgtggaaatgaaacttctcgctggcaacgcaaaaagggacaagaaggagctggaggctgcgggaaaaatcgccaccgaggccatagagaacatccgtaccgtggttagtcttacacaagaacggaaattcgaatccatgtatgtagagaaactctatgggccttatcggaatagcgtgcaaaaggcgcatatctacggcataacttttagtatctctcaggcgtttatgtatttctcctacgctggatgcttccgatttggcgcctacctaatcgtgaacggccacatgcggttcagggacgttatacttgtgttctcagccatcgtcttcggagccgtggcccttggccacgcttcgtccttcgcgccggactatgctaaggcaaaactgtctgctgcgcatctcttcatgctctttgaacgccagcctctgatcgacagctacagtgaagagggcctgaaaccagataagttcgagggaaacattacatttaatgaagtggtctttaactaccccactcgggctaacgtgccagtcctacaaggattgtcgctggaagtcaaaaaaggacaaactctcgctctcgtcggcagttcgggatgcggcaagtcaacagtcgtgcagttgcttgaaagattctacgatccactggccggaaccgtgtttgtggattttgggttccaattgctcgacggacaggaggcaaaaaagctcaatgtgcaatggctgcgcgctcaactgggcatagtcagccaggagcctatcttattcgactgcagcatcgctgagaacatcgcatacggtgacaacagcagggtcgttagtcaggatgaaatagtgtctgccgctaaggctgctaacattcacccttttattgaaactctgccacacaaatacgaaacacgagtcggggataagggtacacaactgagcggtggtcaaaaacagcgaatcgccattgcccgcgccctcatcaggcaaccccaaatcttgctgcttgacgaagctacaagtgcgcttgacaccgagtccgagaaagtagtccaagaggccctggacaaggcaagagaaggaagaacctgtatcgttatcgcccacaggctctcaacaatacagaacgctgacctgattgttgtttttcagaatggaagggtcaaggaacatggcacgcaccaacagctgctggcacaaaaaggaatttatttcagcatggtgagcgttcaagccggaacccagaacctg

SEQ ID NO: 200310 - DNA, 3858 bp, Artificial Sequence
  derived and/or modified sequence
atggaccttgaagcggcgaaaaacgggaccgcctggaggccgacgagcgccgagggagacttcgaactcggcatctcttccaaacagaagcggaaaaagaccaaaaccgtcaagatgatcggcgtcctcaccctcttccggtattcggactggcaagataagctgttcatgtccctgggcactatcatggcaattgcgcacgggtcagggctgcctctgatgatgatcgtgttcggagaaatgaccgataagttcgtagataccgcaggaaacttctcgttcccggtcaacttctccctttcgctcctgaacccgggaaagatcctggaggaggaaatgacccggtacgcgtattactactcgggactgggggcaggcgtgctcgtggccgcttacatccaggtgtctttctggactttggctgcgggacggcagatccgcaaaattcgccagaagttcttccacgccatcctgcgccaggaaattggatggtttgacatcaatgacaccaccgaattgaacactcggctgactgatgacatctccaagatctcggaagggatcggagataaagtcggaatgttcttccaagccgtagcgactttctttgcaggcttcatcgtgggattcattcgcggatggaagctcacccttgtcatcatggccatcagccccattcttggcttgagcgcggcggtgtgggcaaaaattctctccgcgttctcagataaagagctcgctgcctacgcaaaggccggagctgtggcagaggaggcactcggtgcaatccgcactgtgatcgcctttggagggcagaacaaggaactggaacggtaccagaagcacctcgaaaacgccaaggaaatcgggattaagaaagccatctcagccaatatcagtatgggtatcgccttcttgctgatctacgcctcctacgctctcgctttttggtacggttcgaccctcgtgatctcaaaggaatacactatcggcaatgccatgactgtgttcttctcgatacttattggagcttttagcgtgggacaggcggcgccatgcattgacgcattcgccaacgcccggggagctgcttacgtgattttcgatatcatcgataacaacccgaagatcgactcattctcagagcgcggtcacaagcctgactccatcaaaggtaacctcgagtttaatgacgtccactttagctaccccagcagagccaacgtgaagatcctgaagggactgaacctcaaagtgcagagcggacaaactgtggcgctggttggttcctcgggctgcggtaaaagcaccaccgtgcaactgatccagagactttatgatccggacgaggggaccatcaatatcgacggtcaggacatccgaaatttcaatgtgaattacctgcgggagatcatcggtgtggtgtcccaggagccggtcctgttttccactacgatcgctgagaacatctgctacggtagaggaaatgtcactatggacgagattaagaaggcggttaaagaagccaatgcgtacgaattcattatgaagctcccacaaaagttcgacactttggtgggagagagaggagcgcaactgagcgggggccaaaagcaaaggattgctatcgcccgcgccctcgtgcgaaacccaaagatccttctgctggatgaagcgacttccgctttggataccgaatccgaggcggaggtgcaggccgccctcgataaggcgagagaaggaaggaccacgatagtgatcgcacatcgcctgtcgactgtccggaatgcagacgttatagcaggatttgaggacggagtcatcgtggagcagggctcccactcggaactgatgaagaaagagggcgtctacttcaaactggtcaacatgcaaacctcgggctcccagattcagtcagaggaattcgaactcaacgatgaaaaagcggctacccggatggcaccaaatggctggaaatcaagactgtttcgccatagcacgcagaagaatctgaaaaattcacagatgtgtcagaagtcactggacgtggaaactgatgggttggaagccaacgtcccaccggtgtccttcctgaaggtgttgaagctgaacaaaactgagtggccgtacttcgtggtgggcaccgtgtgcgctatcgccaacggcggtctgcaaccggccttctcggtgatcttctcagaaatcatcgccatcttcggaccaggagacgacgcggtgaagcagcagaagtgtaacatcttctcgcttatcttcctgttccttggcatcatctcttttttcaccttcttcctgcagggatttaccttcggcaaggcaggagagatccttacccggcgcttgcggtcgatggcctttaaagccatgttgagacaggacatgagctggtttgatgatcacaaaaattccactggagccctctccaccagacttgctactgacgcggcccaggtgcagggcgccaccggcacccgcctggcgctgatcgcccagaatatcgcaaatttgggaacgggaatcatcatctcattcatctacggctggcagctcactctgttgctcctcgccgtggtgccaatcatcgctgtctcgggaatcgtggaaatgaagctgctggccggcaacgcgaagagagacaagaaagagctggaggctgccggtaagatcgcaactgaagccatcgagaacatccgcaccgtggtcagtctgactcaagagaggaagttcgaatcgatgtacgtggaaaagctctacggaccgtaccggaacagcgtgcaaaaggcccatatatacggaatcactttttctatctcccaggcgttcatgtacttcagctacgccggttgctttcggttcggagcatacctgatcgtgaatggacacatgcgcttccgggacgtcatcctggtcttttcggccattgtctttggggcagtcgctctcggacacgcaagctcgtttgcgcccgactacgccaaggccaaactgtcggctgctcatctgtttatgctgttcgaacgccaaccgctcatcgacagttattcggaggaagggctgaagccggacaaatttgagggaaacatcaccttcaacgaagtggtgttcaactaccctactcgggcgaacgtccctgttttgcaaggactgtcgctggaagtgaagaaggggcaaaccctcgcgctggtgggatcctcggggtgcggaaagtccacggtcgtgcagctgctggagcgcttctacgatcctctggctgggactgttttcgtcgatttcggctttcagctgcttgacgggcaggaggcgaaaaagctgaatgtccagtggctgcgtgcccagctcggaatcgtctcccaagaacctatcctcttcgattgtagcatcgccgaaaacatcgcgtacggagataactcacgcgtggtgtcgcaggatgaaattgtgagcgcagccaaggcagctaatattcatccattcatcgaaaccctgccccataagtacgagactagagtgggcgacaagggaacgcagctgtccggcggccagaagcagaggattgccatcgcacgcgcactgatcaggcagccgcagatcctcctccttgatgaagcaacctcagccctcgacactgagagcgaaaaggtggtccaagaagccctggacaaggcgcgcgaaggtcgaacttgcattgtgattgcccatcgcctgagcaccatccaaaacgccgacctcatcgtcgtgttccaaaacggaagagtgaaggagcacggaacgcaccagcaactgctggcacaaaagggaatctacttctcaatggttagcgtgcaagccggaacccaaaacctc

SEQ ID NO: 200311 - DNA, 3858 bp, Artificial Sequence
  derived and/or modified sequence
atggatctcgaagccgccaagaatggtaccgcatggcgcccgacttccgcagagggtgactttgaactgggtatttccagcaagcaaaagcggaagaagactaagaccgtcaagatgataggggttctgaccctgtttcgctatagcgactggcaagacaagctgttcatgtcgttaggaaccattatggccatcgcgcatggcagtgggctcccccttatgatgattgttttcggggaaatgaccgacaaatttgtggataccgccggcaactttagtttcccggtgaacttttctctgtccctactcaatcctggtaagatcctcgaggaagaaatgaccaggtatgcctactactattcgggactgggggcgggtgttttagtagcggcatatatccaggtgagtttttggactttggctgccggtcgacagatacgtaaaattagacagaagttctttcacgctatcctccgccaggaaattggctggtttgacatcaatgacaccacagaattgaatacccgtctgactgacgacatttcgaaaatcagtgagggcattggtgataaggttggtatgttctttcaagcggtcgctactttctttgcgggtttcatcgtcgggttcatacgtggatggaagctaacgttggttatcatggccatctctcctatcttgggtctgtccgcggcggtatgggctaagatcctgtctgcgttcagcgacaaggagctggccgcttatgcgaaggccggcgcagtcgccgaggaggcacttggcgctattcgcaccgtgattgcctttggaggtcaaaacaaagagctcgagcggtatcaaaagcatcttgagaacgcgaaggaaattggaattaaaaaagctatctcggcaaatattagcatgggtatcgcctttttgttgatttatgcctcttatgccctggccttctggtatggcagcaccctggtgatcagcaaagagtatactatcggcaacgctatgactgtttttttcagcattttgataggagccttctctgtgggtcaggcagccccatgcattgacgcctttgcaaacgcacggggtgcggcgtatgtgatctttgacatcatcgataacaacccaaagatcgacagcttttctgaaaggggccataagccagacagcatcaagggtaacttggaattcaacgatgtccacttcagctatccatcccgcgcgaatgttaagattctcaagggtctgaacctgaaggtgcaatctggacagactgtcgcacttgtcggtagtagcggctgtgggaagtctaccaccgtgcaattaattcagcgcctgtatgatcccgatgagggcaccattaacattgacggtcaggacatacgtaacttcaacgtgaactacctccgcgaaataattggagtcgtgtctcaggagccggtcctgttcagcacgactattgctgagaacatttgctacggccggggtaatgttactatggacgagatcaagaaggctgttaaggaggcgaacgcatatgagttcatcatgaaattgcctcaaaaatttgatactctggttggggagcgtggtgcgcagttgtccggaggtcagaaacaacgaattgctatcgcccgtgcgctcgtcaggaatccgaaaatcctattgctcgatgaggcgacctccgcactcgacaccgagagcgaagcggaggtccaagcggcactggacaaagcacgcgaaggtcggacgaccatcgtcattgcccatcgactgtcaacggtccgcaacgctgatgtgatagctggatttgaggacggcgttatagttgagcagggttcccatagcgagcttatgaaaaaagaaggcgtgtatttcaaactggttaacatgcaaacctctggcagtcaaatccaaagcgaagagtttgaactgaatgacgaaaaggccgcgacccgtatggcgcctaatggttggaaatctagactgttcagacatagtacgcagaagaatctgaaaaactctcagatgtgccagaagagcttggacgttgagacggacgggctggaagctaatgttcctccggtgtcatttctgaaagtcctgaagctgaacaagacggagtggccttatttcgttgtaggcacggtgtgtgcgattgcgaacggcggtctgcagccggccttcagcgtcatcttttcggagataatagctatcttcgggccgggtgacgacgcagtgaagcaacagaagtgcaatattttctccctgatcttcctgttcctgggcatcatttcattctttactttttttcttcaagggtttaccttcggcaaagcaggcgagatcctgacccgtcgcctgcggagcatggcgttcaaggcgatgctacggcaggacatgtcctggttcgacgaccacaaaaacagcaccggcgccctgagcacccgcctggctaccgatgccgctcaggttcaaggagccacgggaacccggcttgccttgattgcccagaacatcgcaaacctgggtaccggtattattatttcatttatatatgggtggcagttgaccttgctgctgctggcggtcgtaccaatcatagcagtctctggtatagtcgagatgaaactgttagccggaaacgctaagagggacaagaaagaactcgaggccgccggaaaaatcgcaacggaggcaattgagaacatccgcactgtcgtttctctaacgcaggagcgtaaattcgaatcaatgtatgtggagaagctgtacggtccttacagaaacagtgtccagaaagcgcacatttatggcattacattttcgatctcccaggcgtttatgtatttctcctatgcaggttgttttcgcttcggcgcttacctgatagttaacggccacatgaggtttcgcgatgttattctcgtgttctcagcgatcgtatttggagcagttgcattgggacatgcaagcagcttcgcgccggactacgccaaagctaagctcagtgctgcgcacttatttatgctgttcgagcggcagccgctgattgacagctactccgaggaaggcctgaagccagataaatttgaaggcaatatcacattcaacgaagtggtgtttaactacccgacgcgcgccaacgtcccagttctgcagggcttgtctctggaggtgaaaaaaggtcaaactctcgcgcttgtaggaagctctggatgcggtaagagcaccgtggttcaactgctggagcggttctatgacccgctcgccgggacagtatttgtggatttcgggtttcagctgctggacgggcaagaggcaaagaagcttaacgtgcagtggctacgggctcagctgggcattgttagtcaggagcctattttatttgattgctccatcgccgagaatatagcttatggcgataattccagggttgtgagtcaggatgagattgtgtctgcggcaaaggccgctaacattcatccttttattgaaactctcccgcacaaatatgaaacgcgggtcggtgataaaggcacccagctgtccggtggtcaaaaacagcggattgctattgcgcgcgcgttgatcagacagccgcagatcttgttgctggatgaggctacgtcagcgctggacacagaaagcgagaaggtggtacaagaagcattggacaaggcgcgcgagggccgcacatgtatcgtgattgcacaccgtctgtccactattcagaacgcagacctcatcgttgtgttccagaatggtcgggtaaaagagcatggtacccatcagcagctgctggcccagaagggtatttacttcagcatggttagcgtgcaggcgggcacccaaaatctg

SEQ ID NO: 200312 - DNA, 3858 bp, Artificial Sequence
  derived and/or modified sequence
atggatctcgaggcagcaaagaacggaactgcatggcggccaacgtctgcagaaggcgactttgagctcggcatctcaagcaagcaaaaacggaaaaagactaagaccgtcaaaatgattggagtgctcactctgtttcggtacagcgactggcaggataagctgtttatgtcactcggtactatcatggccattgcacatggatcaggacttccgctcatgatgatagtgttcggtgaaatgactgataagttcgtagataccgccgggaacttttcatttcccgtcaatttctcgctctcactgcttaatccaggtaagatactggaagaggagatgactaggtatgcatactactacagcggccttggggccggagtccttgtggccgcatacattcaggtgtcattttggaccctcgcagctggcaggcaaatccggaagatcagacagaagtttttccatgcgatcctgaggcaggaaatcggttggttcgacataaacgatactaccgagcttaacacccggttgacggatgacatttcgaagatttcagaaggaatcggggataaggtgggcatgtttttccaagctgtcgcgacgttcttcgcaggcttcatcgtgggatttatccgcgggtggaagttgaccctggtgatcatggcgatctcacctatacttggactgtcagcagcagtctgggccaagatcctgagcgctttttcagataaggaactcgcggcttacgcaaaagctggcgcggtggcggaggaagcattgggcgctattcgaaccgtcatagcctttggaggccaaaacaaggaactcgaacgctaccagaaacatcttgaaaacgctaaggaaattggtatcaagaaggccattagcgcaaacatttccatgggaattgcctttctcctgatatacgcctcgtacgctctggccttttggtacggttcaactctggtgatttccaaagaatacactatcggcaatgcgatgaccgtgttcttttcaatacttattggagcattttcagtgggacaagcggctccgtgtatcgatgcattcgccaacgcgcggggggcggcatacgtcatcttcgacattatcgataacaaccctaagatagattcattctccgaaagaggtcataagccagactccattaagggaaacttggaattcaatgatgtgcatttttcctacccgtcccgcgccaatgtgaagatccttaaaggtctgaaccttaaggtgcaatcgggacagaccgtggctcttgtgggttcgtcgggttgcggaaagtccactaccgtgcaactgattcaacgactttacgatcctgacgaaggaacgatcaacattgatggtcaggacattagaaactttaatgtgaattatcttcgcgagataataggcgtcgtctcacaagaaccagtgcttttttcgaccaccatagccgaaaacatatgctacggcagagggaatgttacgatggatgaaatcaagaaggcagttaaggaggcaaacgcatacgagttcatcatgaaactgccccaaaagtttgataccctcgttggagaacgtggagctcaactcagcggtggtcagaaacagagaatagcgattgcaagagcactggtgcggaatccaaagattctgctgcttgacgaggctacttccgcacttgataccgaatctgaggccgaagtccaagcagcccttgataaggccagggaagggcgcactaccattgtgatcgcgcatcggctttcaactgtgagaaacgccgatgtgatcgccggatttgaggatggtgtgatcgtcgaacaaggtagccatagtgaacttatgaaaaaagaaggcgtgtactttaagctcgtcaacatgcagacttcaggatctcagattcaatcggaagagtttgaactgaacgatgaaaaggccgcaaccaggatggcccccaacggatggaagtcgcgtctgtttaggcactctacccaaaagaatctgaagaacagccagatgtgtcaaaaatcacttgatgtcgaaactgacggcctcgaagcgaacgtcccgccggtgtcgtttctgaaggtcctcaaactgaataagacggaatggccgtattttgtggtcgggaccgtgtgtgccattgcgaacggaggcctgcagcctgctttttcagtcattttcagcgagattattgcgatcttcggccctggtgatgatgcagtgaaacaacaaaaatgcaacattttcagcctgatttttctttttctcggaattatctcgtttttcaccttttttctgcagggatttactttcggaaaagctggagaaatactcaccagacgactgagaagcatggcatttaaggcaatgcttcgtcaagacatgtcgtggtttgatgatcataagaactcaaccggagcactctcgactaggctcgcaaccgatgcggcacaagttcaaggtgcaaccgggactcgtttggcccttatagcacaaaacatagcaaaccttgggactggaatcattatctcattcatctacggttggcaactcactttgctgctgttggccgtggtgcccattattgccgtgtccggtatagtggaaatgaagctgctggctgggaacgcaaaaagagacaagaaggaacttgaggccgcgggaaagattgcaacggaagctatcgaaaacattcggaccgtggtgagcctgacccaggagcgcaagtttgaatcgatgtacgtggagaagttgtacggcccctacaggaacagcgtccagaaggcccacatttacggaattactttttcgatttcacaggcgtttatgtacttctcgtacgccggttgtttccgcttcggagcatacctcatcgtgaacggacatatgaggtttcgggacgttattctggtgttttccgcaattgtgtttggagccgtggctctgggacatgcatcgtcctttgcccctgactacgctaaggcaaagttgtccgcagcccatctgtttatgctgtttgaaagacaaccacttattgattcgtactcggaagaaggtctgaaacctgacaagttcgaaggcaacatcacttttaacgaggtggtgttcaactacccgaccagagctaacgttccagtgcttcaaggactttcgctggaggtgaagaagggacagaccctggccctcgttggttccagcggatgtggtaagtcgaccgtggtgcaacttctggagagattctatgaccccctcgccgggactgtctttgtggacttcggatttcagttgctggacggacaggaagcgaagaagctgaacgtgcagtggctcagagcacaactgggcatagtctcccaggaaccaatcttgtttgactgctccatcgcagagaatatcgcatacggggataactccagggtggtgtctcaagatgagatagtctccgcagcaaaagcagctaacattcatccctttattgagactctccctcacaagtacgagactcgcgtgggagacaaggggacccaattgtcgggcggacagaagcaaaggatcgcaatcgctagggctctgatccgacaacctcaaatactgctgctcgatgaggcgacgtccgccctcgacactgaatcggaaaaggttgtgcaagaagcacttgataaggcacgcgaaggtcggacctgtattgtgattgcccatcgactgtccactattcagaatgcagatcttattgtcgtgtttcagaacggtagggtgaaagagcacggtacccatcagcagctgttggcacagaagggaatctacttttcgatggtttcggtgcaggcgggaacccagaatctt

SEQ ID NO: 200313 - DNA, 3858 bp, Artificial Sequence
  derived and/or modified sequence
atggacttggaggccgcgaagaacggcaccgcgtggcggcccacgagtgccgagggggactttgagctcggcatcagctccaaacagaagcgcaagaagacgaagaccgttaagatgattggtgttctcaccctgttccgctactcggactggcaggataagctgttcatgtcactaggcacaatcatggccatcgcgcacgggtccggattgccgctaatgatgatcgtgtttggcgagatgaccgataagtttgttgataccgccggcaacttcagctttcctgttaacttctccctcagcctcctgaatccgggcaagatccttgaggaggagatgacccgctatgcgtactactactctggcctcggagctggagttttagtggcagcctacatccaagtgtccttctggactctcgctgctggacgccagatccggaagatccggcagaagttcttccacgcaattttgcgtcaagagatcggttggttcgatatcaatgacacgacagagctgaacacccgcctgaccgatgatatttctaagatctcggaggggatcggtgacaaggtgggcatgttcttccaagcggtggctaccttcttcgcgggtttcatcgtagggttcatccgcggttggaagttgacgctagtgattatggctatctcgccaattttgggactgtccgccgctgtgtgggccaagatcctgagcgccttctccgataaggagctggcagcttatgcaaaggccggtgcggtggcagaggaggctctgggagccattcgtacggtcatagccttcggcggccagaacaaggagctcgagaggtaccaaaagcacctggagaacgccaaagagatcggcatcaaaaaggctatcagcgcaaacatttccatgggcatcgcatttctcctgatttatgcttcttacgcgcttgccttctggtatggctccacccttgtgattagtaaggagtacaccattgggaatgccatgaccgtcttcttttcgattctgatcggtgcattctccgtcggtcaagccgcgccctgcattgatgccttcgcgaatgcccgtggtgccgcatacgttatttttgacatcattgataacaaccctaagatcgattccttcagcgagcgtggtcacaaaccggattctatcaagggcaacctcgaattcaatgatgtccacttctcataccccagtcgcgctaacgttaagatcttgaagggcttgaatttaaaggtgcagagtggccagaccgtcgctcttgttggctcatccggctgcggtaaatccaccaccgttcaactgattcagcggctgtacgatcccgatgagggcacaatcaacatcgatggccaagacatccgaaactttaacgtcaactacctccgggagatcatcggcgtcgtcagccaggagccggtcctgtttagcaccaccattgccgagaatatatgctacggccgcggcaacgtgactatggatgagatcaaaaaggctgtgaaggaggcaaatgcctacgagttcattatgaagctgccgcagaagttcgataccctggtcggtgagcgcggcgcgcagctttctggtggtcagaagcaacgtattgccatagctcgagcgctcgtgcgcaatccgaagatcctgctcttggacgaggccacgtctgctctggacacggaaagcgaagccgaggtccaagcggcccttgacaaggctagagagggtcgcactacaatcgttattgcccacaggctcagtaccgtgcgaaatgctgatgtcattgccggattcgaggacggtgtgatcgtcgagcagggatcacacagcgagctcatgaagaaggagggagtgtactttaaactggttaacatgcaaaccagcggcagccaaatccaatccgaagagttcgagctaaacgacgagaaggccgccacccgtatggcacccaacggatggaaaagccgcctctttcgacactcgacccagaagaacctcaagaattcccagatgtgccagaaatccctcgatgtcgagacggacggcctcgaggccaacgtccctccggtcagcttcttgaaggtcttgaaattgaacaagacagaatggccctacttcgtcgtggggacggtctgcgccatcgcgaacggcgggttgcaaccggcattcagtgtcatcttctccgaaatcattgccatttttggcccgggtgatgacgccgtaaagcagcagaagtgcaacatttttagcctcatcttcctttttttgggaatcatatcgttctttacattcttcttgcaggggttcactttcggcaaagcgggcgagattcttacccggagactgcgctctatggcatttaaggctatgcttcgtcaagacatgtcctggtttgacgaccacaagaatagcaccggagccttgtccacccgtttggccactgatgccgctcaagtgcaaggagcgacaggaacccgtctggccctcatcgcccagaacatcgcaaatctgggcacaggtatcattatctctttcatttacgggtggcagctgacgctcctacttttggccgtcgtgcctattattgcagtctctggtatcgttgagatgaagcttcttgccggcaatgcaaagcgagacaagaaggagctcgaagccgccggaaagatagctaccgaagccatcgagaacatccgcaccgtggtctctctcacccaggaaagaaagtttgaatcgatgtacgttgagaagctttatggcccttatagaaactccgtccagaaggctcacatttatggcatcactttctccatctcgcaagcattcatgtacttttcctacgccggctgctttcgcttcggcgcctatcttatcgtcaacggccacatgagattccgcgacgttatcctggtgttcagtgccatcgtgtttggggccgttgccctgggacatgcttcctccttcgcgcctgattacgcgaaggcaaagctgtcagctgctcatcttttcatgttgtttgaacgccagcctctgattgactcctactccgaggagggccttaagccggacaagttcgaaggtaacatcacctttaacgaggttgtctttaactatcccacgcgagccaacgtgcctgtgctccagggactcagcctggaggtcaagaagggccagaccttggcccttgtgggttcctcgggatgcgggaagagcactgttgtgcagttgctggagcgtttttacgatccgcttgctggtaccgtcttcgttgacttcggcttccagctccttgacggtcaggaggcaaaaaagctgaacgttcagtggttgagggcccagcttggcatcgtgagccaggagccgatcctgtttgattgttccattgcagaaaacatcgcttacggcgataacagccgtgttgtctcccaggacgagatcgtctctgcggccaaggccgctaacatacacccttttatcgagacactcccccacaagtacgagacccgagtcggcgataagggcacccaactttcgggtggccagaagcagcgcatcgccatcgcccgcgcactaatcaggcaaccacagattttactgctggatgaggctaccagtgctctcgatacggagagcgagaaggttgtacaggaggcactggacaaggctagggaaggccgcacctgcattgtgattgcgcaccgcctgtccaccatccaaaacgcagatcttatagttgttttccaaaatggccgcgttaaggagcacggcacgcatcagcagttgctggcccaaaagggcatctatttctcgatggtcagcgttcaggcgggtacccagaacctc

SEQ ID NO: 200314 - DNA, 3858 bp, Artificial Sequence
  derived and/or modified sequence
atggatctggaagcagccaagaatggaactgcgtggaggcccacctcggctgaaggcgattttgagctgggcatctcgtcgaagcagaaacgcaagaaaaccaagactgtgaaaatgattggcgtgcttactctcttcagatactccgactggcaagacaagctgttcatgtcactgggtaccattatggcaatcgcacacgggtcaggattgccacttatgatgatagtttttggggagatgactgacaagttcgtcgacacggctggaaatttctcgtttccagtgaacttctcactctcactgctgaatcccggaaaaatcctcgaagaagagatgacgcgctacgcctactactacagcgggctgggagctggagtcctcgtggccgcctacatacaagtgtcattctggaccctggccgcgggacggcaaatcaggaagattcgacaaaagttctttcacgctatccttcgccaagaaattggatggttcgacattaatgacacgactgagctgaatactcgccttaccgacgacatctcgaagataagtgaaggcattggagacaaggtcggaatgttcttccaggctgtggcaaccttcttcgccggattcatcgtcggatttatccggggatggaaactgaccctcgtgatcatggccatttcgcctatcctcggactctccgctgccgtgtgggcaaaaatcctgtccgccttctcagataaagaactggctgcgtatgctaaagcaggcgcggtggcggaggaggcactgggagcgatcaggactgtcatagcgttcggagggcagaacaaagaattggagaggtaccagaagcatcttgaaaacgcgaaagagatcggaatcaaaaaggctatcagcgccaacataagcatgggaattgccttcctgctcatctacgcttcgtatgcactggcattctggtacggctcgacgctggtgatctcgaaggaatacaccatcgggaatgccatgaccgtgtttttctccatcctgattggagcgttttcggtgggccaagcggccccgtgtatcgacgcattcgctaatgcacgcggcgcggcctacgttatctttgatatcatcgacaataacccgaagatcgactcgttctcggagagagggcacaagcccgactcgatcaaaggaaacctcgagtttaacgatgtccacttctcgtacccttcaagagcaaatgtcaaaatcctgaaggggctgaacctgaaggtgcagagcgggcagaccgtggcgttggtgggctcatccggctgtgggaagtctacgactgtgcagctcatccagcggctgtacgatccggacgaagggaccatcaatatcgacggacaggatatccgcaatttcaacgtgaactacctgcgggaaatcattggagtggtcagccaagagccggtgctgttttcgaccactatcgcggaaaacatctgctacggacgcggtaacgtcactatggatgagattaagaaagcggtcaaggaagcaaatgcctacgagttcatcatgaagctgccacagaagttcgacactttggtgggcgagcgcggggcacaacttagtggaggtcagaagcagcggatcgcaatcgcccgcgcgctcgtgagaaatcccaaaatcctgttgctcgacgaggcaacctccgccctggatacggagtccgaagccgaggttcaggctgccctcgacaaggcgcgcgagggccgcactaccatcgtgatcgcacacagactctccaccgtgaggaacgccgatgtgatcgcaggcttcgaggatggagtgatcgtggaacagggcagccactccgaactgatgaagaaggaaggtgtgtacttcaagttggtgaatatgcaaacctcaggatcacaaatccagtccgaagagttcgaactgaacgacgaaaaggccgccacgcggatggccccaaacggatggaaaagccgcctgttcaggcattccactcagaagaacctgaagaacagccagatgtgtcaaaagtcattggatgttgagacggacggcctcgaagccaacgtgccgcctgtgtcgttcttgaaagtgctcaaactgaataagactgaatggccgtacttcgtggtcggaactgtctgcgctatcgccaacggcgggttgcagccggcgtttagcgttatcttttcggagatcatcgcgatatttggccccggcgatgacgcagtgaagcagcaaaagtgcaacatcttctcccttatctttctgttcctcggaatcatctccttcttcactttcttcctgcagggcttcaccttcggcaaagctggcgaaatcttgacccggcggttgcggtccatggccttcaaagcgatgctgagacaggacatgtcatggttcgatgatcacaagaatagcaccggtgcactgtcaacccgcctggcaactgatgctgcccaggtgcaaggagcgaccggcactcgccttgccctcatcgcacagaacatcgccaacctgggtaccggaatcattatctcattcatatacggctggcagctcaccctgctgctgctggcagtggtgccaatcatcgcggtgagcggaatcgtggaaatgaagctgctggctgggaacgctaagcgcgacaaaaaagaacttgaggccgctggtaagatcgcgaccgaggcaatcgaaaacatccggaccgtcgtcagtctgactcaggagagaaagtttgaatcgatgtacgtggaaaaactctatggaccgtacaggaattcggtccagaaggcccacatctacggaatcactttctccatctcccaggctttcatgtacttctcatacgccggatgctttaggtttggagcctaccttatagtgaacggtcatatgcgtttccgggatgttattctggtgttctcagcaatagtgtttggggccgtagcgctggggcatgcgagctcttttgccccagactatgccaaggccaagttgtccgccgcccatctgtttatgctcttcgaaagacaacctctcattgactcttactccgaggaagggttgaagcccgataagtttgaaggaaatatcaccttcaatgaagtggtgttcaactacccgacccgagcgaacgtcccggtcctgcagggcctgtcgctggaagtcaagaaggggcagactctggctctggtgggatcatctggttgcggaaaatcaacggtggtgcaactgctggagcgattctacgacccacttgcaggaactgtgttcgtcgacttcggatttcaactgctggacggacaagaggccaagaagctcaacgtccagtggcttagagcacaattgggcatcgtgagccaggagccaatcctgttcgactgttctatcgccgagaacatcgcttacggcgataactccagggtcgtgtcccaggatgagatcgttagcgccgctaaagccgccaacattcatcctttcatcgaaactctgccgcacaagtacgaaaccagagtgggagacaagggaactcagctcagcggtggacagaagcaacggatcgccattgcccgggcgcttatcagacagccgcaaatcctcctccttgatgaagccacttcagctctggacactgagtcagagaaggtggtgcaggaagcacttgataaggctcgcgaaggccgcacttgtatcgtcattgcccaccgtctcagtaccatccagaacgccgaccttatcgtcgtctttcaaaatggacgggtcaaagaacacggcacccatcagcaactcctcgcccagaagggaatctacttctcgatggtgtcggtacaagctggtacccaaaacctg

SEQ ID NO: 200315 - DNA, 3858 bp, Artificial Sequence
  derived and/or modified sequence
atggatttggaagctgccaagaacggtaccgcatggcgccccacgtccgcggaaggagactttgaacttggtatctccagcaagcaaaaacgcaagaaaaccaagactgtgaagatgatcggtgtccttactcttttccgttactcggattggcaggataaactctttatgtcattgggtactattatggcaatcgcacacggctctggacttcccctgatgatgatagtctttggggaaatgaccgataagtttgtggataccgctggtaacttttcgttccccgtgaactttagcctctcgctgctcaaccctggcaaaattctggaggaggaaatgaccagatatgcctactattacagcggactgggagcaggtgtcctggtggcggcatacattcaagtgtccttttggactctcgccgcggggaggcaaatccgcaagataagacaaaagttctttcatgccattctgcgacaggaaatcgggtggtttgatatcaatgatacgaccgaacttaataccagattgaccgacgatatttccaaaatctcagagggcattggtgacaaggtagggatgttttttcaagccgtcgcaaccttttttgcaggttttatcgtgggatttatcagaggctggaaacttactttggtgattatggccatttcaccaattctcggtctgtcggcagcagtttgggcaaagatcctgtcggctttttcggataaggaactggcagcttacgcaaaagcaggcgccgtggcagaagaagcgctcggagcaatcaggactgtcatcgcatttggtggacagaataaggagctcgaacgctaccagaagcatctcgaaaatgccaaggaaatcggaattaagaaggcaatttcggcaaacatctcgatgggaattgcatttctgctcatttacgcatcgtacgctctggcattctggtacggatccaccctggtgatctcaaaggaatacaccataggcaacgccatgaccgtctttttctcgattcttatcggagcattttcagtggggcaggcagcaccctgtatagatgcttttgccaacgcaagaggagcagcttacgtgatttttgacattatcgacaataaccctaagattgactcctttagcgaaagaggtcataagccagactccatcaagggcaacctcgaattcaatgatgtgcacttttcctacccctcacgcgctaatgtcaagattctcaagggactgaatttgaaggtccaatccggccagacggtggctttggtcggttcctcgggttgtggaaagtcaaccactgtgcagcttatccaaagactttacgatcctgacgaaggtactattaacattgatgggcaggacatcagaaacttcaacgtgaactacttgcgcgaaatcataggtgttgtgtcgcaagaacccgtcctttttagcactaccatcgctgaaaacatatgctacggacgtggtaacgtcactatggacgagatcaaaaaagccgtgaaggaagccaatgcctacgagtttatcatgaagctgccgcagaaatttgatactttggtgggggaacggggcgcacagctgtcaggcggtcaaaagcaaaggatagccatcgcaagggctcttgtgcggaatcctaagatccttcttctcgacgaggcaacgtcggccctcgacaccgaaagcgaagcagaagtgcaggcagcactggacaaagcccgggaagggcggactactatagtgatagctcaccgcctgtcgactgtgcggaatgcggatgtgatcgcaggattcgaggatggtgtgattgtcgaacagggtagccatagcgaactgatgaagaaggagggtgtgtacttcaagctggtgaatatgcagacttcaggcagtcagattcagtccgaggaatttgagctcaacgatgagaaagcggccaccaggatggcacctaatggttggaagtccagacttttcagacactccacccagaagaatctcaagaattcgcaaatgtgtcaaaagtcgcttgatgtcgagacggacggacttgaagcaaatgtgcctcctgtctctttccttaaagttctcaaactgaataagaccgagtggccatactttgtggtcgggactgtgtgcgcaattgcaaatgggggtttgcagccggcattttcggtcatcttttcggaaatcattgcaatctttggacccggagatgatgcggtgaagcagcaaaagtgtaacatcttctccctcatatttctgtttctgggaataatcagctttttcacgttttttctgcaaggctttacttttggtaaggccggagagatcctcactcgacgcttgcggtccatggcgtttaaagcaatgctcagacaggatatgtcctggttcgatgatcataagaatagcactggtgccctttccaccaggttggcaactgacgctgcgcaggtgcaaggagcaaccggaacccgcctcgcactgatagcccaaaacattgccaatctggggactgggattatcatttccttcatctacggatggcaacttaccctgctcctgcttgcagtggtccctattatcgccgtgtccggaattgtggagatgaaacttctcgcaggaaacgccaagcgcgataagaaagagctggaagcggcaggaaagatcgcaaccgaagcgattgagaacatccggaccgtggtcagccttacccaagagaggaagtttgagtcgatgtacgtggagaaactgtacggtccataccgaaacagcgtgcaaaaggcacatatctacggaatcacgttttcaatctcgcaagcattcatgtacttctcgtacgcaggctgttttagattcggagcatacctgatcgtgaacggacatatgcggtttcgtgatgtcattcttgtcttttcagcgattgtgtttggtgccgttgccctgggccatgcgtcgtcctttgcaccagattacgcaaaggcaaaactttcggcagcacacctgttcatgctctttgaacgacagccactgatagattcgtattcggaggaaggccttaagcccgataagttcgaaggtaatatcacttttaacgaggtggtctttaactatcctactagagctaatgtccctgttctgcaaggtctgagcctggaagtgaagaaggggcagaccctggcactggtgggatcgagcgggtgcggaaagtcaacggtggtgcagctgctggaaaggttctacgatcccctcgcaggtactgtctttgtcgactttggatttcagctgctcgatggccaggaagcgaaaaaacttaacgtccagtggctcagggcacaacttggcatagttagccaggaacccatcctttttgattgttcaattgcagaaaacatcgcatacggcgacaacagccgggtggtgtcacaagatgaaattgtgtcagcggcaaaggcagcaaacatacatccatttatcgaaactctgccacataagtacgagactagagtgggtgataagggtacccaactttcaggtggccagaagcaaagaatcgctattgcaagagcactcattaggcagccccagattttgctgttggacgaagcaacttctgcacttgatactgaaagcgaaaaggtggtgcaagaagcccttgacaaggccagggaggggcgcacttgtatcgtaattgcacatagactgtcaaccatccagaacgcagatctgattgtcgtgtttcagaatggaagagtgaaagaacatgggacccatcaacaacttctcgcccagaagggtatctacttttcaatggtgtcggtgcaggcaggaacgcaaaacctt

SEQ ID NO: 200316 - DNA, 3858 bp, Artificial Sequence
  derived and/or modified sequence
atggatctagaggccgcaaagaacggtaccgcgtggcgaccaactagcgctgagggagacttcgaactgggaatctcctctaaacagaaacggaagaaaaccaagaccgttaaaatgattggcgtgctcacattgtttcggtactctgactggcaggacaaactttttatgtcactgggaaccattatggccattgctcatggatcgggcctgccactaatgatgatcgtgtttggggagatgaccgataagtttgtcgatacagccggtaatttttcttttccagtcaattttagcctgtctcttttgaaccctggcaagatcctggaagaggagatgacccgatacgcctattactattccggattgggcgccggtgtgctggtagcagcctacatccaggtttccttctggactttggcagccggaaggcagattcggaaaatccgccagaaatttttccacgcgatcctcagacaggagattggatggtttgatattaatgataccacggaactcaatactagactgactgatgatatttccaaaatatccgagggcattggcgataaagtgggaatgttttttcaggcggttgccactttttttgcagggtttatagttggtttcatccgcggatggaagctgacgcttgtaattatggctatctccccgatcttggggctcagcgctgccgtgtgggctaagatcctgtctgctttttcagataaagagctggccgcttacgccaaagcaggagcagtcgcagaggaggctttgggtgcaattaggacagtgatagctttcggaggtcagaataaggaactagaaaggtaccagaagcatcttgagaacgctaaggagatcggtataaaaaaagctatatccgcaaacattagtatgggaatagctttcctcctgatttacgcaagctatgcgctggctttttggtatggctcaactctcgtaatctccaaagaatataccataggcaacgctatgaccgtgtttttcagcattctgatcggagcttttagtgttggccaagctgcaccctgtattgatgccttcgcgaatgctcgtggggccgcatatgtgatctttgacattatagacaataatcctaagattgactctttcagtgaacgcggacacaaacccgattccatcaagggtaatctcgaattcaacgatgtacactttagctacccaagccgcgcgaacgtgaaaatcttaaaaggccttaacctgaaagtgcagtctggtcaaacagtcgctctggtcggcagctctggatgtggcaaatcaactaccgtgcaactaattcagaggctgtatgaccctgacgagggaacaattaacattgacggccaggacatcaggaacttcaatgtcaattacttgcgtgaaataataggtgtcgtttcacaggagcccgtgcttttctcgacaactatcgctgagaacatctgttatggcagaggaaatgtgacgatggatgagatcaagaaggctgtcaaggaagcaaatgcatacgagttcatcatgaagctccctcaaaaattcgatactctggtgggcgagaggggtgcccagctgagcgggggtcagaagcagaggatagccatcgctagggctctcgtccggaaccctaagattctcctgctcgatgaagccactagcgctctcgacactgaatcggaggccgaggtccaggcagctctggacaaggcccgtgaaggcaggaccactatagtgatcgcccaccgcctgagcaccgtccggaacgcagacgtaatcgccggctttgaggacggtgttatcgtggagcagggtagtcattccgagctgatgaaaaaggagggggtttactttaagttagtgaatatgcagacctctggctctcaaattcagagtgaggagtttgaattaaacgacgaaaaagccgcaacaagaatggctcccaatggatggaaatccaggctgttcaggcactccacccagaagaacctaaagaatagccaaatgtgtcaaaagagcctggatgtggaaactgatgggttagaagccaacgtgccacccgtttctttcttaaaggtgctgaagctcaataagaccgaatggccatactttgtcgtgggtacggtctgcgctattgccaacggaggcctgcagccagcctttagtgtcatcttctccgagattattgccatctttggaccaggggacgatgcggtcaagcagcagaaatgtaacattttctcgctgattttcctgttcctgggcattatctccttcttcacattcttcctgcagggttttactttcggcaaagcgggggagattctgacccgcaggctacgttcaatggccttcaaagcaatgctcaggcaggatatgagttggttcgatgaccacaaaaatagtactggagcactttccacgaggctggctactgacgccgctcaggtacaaggtgctaccggaacccggctcgctctcattgctcagaacatagcaaatctcggcactgggatcatcatcagtttcatttacgggtggcaattgacactgctgctgcttgcggtcgtgcccattattgctgtgagcgggattgtcgagatgaaactgctggccgggaatgctaagcgggacaaaaaggagttggaagccgccggtaagatcgcaactgaggctattgaaaacatcaggacagtggtgtccttgacccaggaacggaaatttgaaagtatgtacgtggagaagctctacggcccatatcggaactctgttcagaaggcacatatctatggtattacctttagtatttcgcaggcctttatgtacttttcctatgcaggctgtttccggtttggggcctatctgatcgtgaatggacacatgcgtttcagagacgtgatcctggtcttctctgccatcgttttcggggcagtggccctgggtcacgcaagctcattcgcccccgattatgccaaagccaaattgtccgccgctcacctgttcatgctgtttgagcgtcagccactgatcgacagctactcagaggagggtctgaagcccgataagttcgaaggtaacatcacattcaacgaggttgtgttcaattatcccacccgggctaacgtacctgtgctgcaggggctctcccttgaggtgaaaaagggacagacgctggccctggtcggcagcagtggatgtggcaagtctaccgtagtgcagctactcgaacgcttttacgatcctttggccgggactgtgttcgtggactttggctttcagctactggacggccaagaagccaagaagcttaatgtccagtggctgagagctcaactgggtattgtgagtcaggagcccattctttttgactgtagcatagccgaaaatatcgcctatggagacaactcaagggtagtgagccaggacgaaatagtctcagcggcaaaggctgcgaacattcacccatttatagaaacgctgccccataagtatgaaactagggtgggcgacaagggcacccagttatctggcggacagaagcagcgcatcgcgattgcgagagcgttgatccgtcaaccacagattcttctcctggatgaggccacttctgcccttgatactgaaagtgaaaaggtggtccaggaggccctggacaaggcccgcgagggtcgaacttgtatcgttatagcccatcggctgagcaccatccagaatgccgacctcatagttgtgttccagaacggtagggtaaaggaacacgggacacatcagcaattgctcgcacagaaaggtatttacttttctatggtcagtgtgcaagccggtacacagaatttg

SEQ ID NO: 200317 - DNA, 3858 bp, Artificial Sequence
  derived and/or modified sequence
atggacctggaagccgcaaagaacggtaccgcatggagacctacttccgctgaaggcgacttcgagctgggtatctcaagtaaacagaaaagaaagaagaccaaaacagttaagatgataggcgttctgacacttttcaggtacagcgattggcaggacaaactcttcatgtctctgggcaccatcatggctattgctcacgggtcaggcttgcccctcatgatgatagtgttcggggagatgacagataaatttgtcgacaccgctgggaatttcagcttccctgtgaacttcagcctatcattgctgaatcctggcaagatcctggaagaggagatgactaggtatgcatactactattctggacttggagccggggtactggtggccgcttacattcaggtgagcttctggacgctggccgccggcagacagatcagaaaaatccgccaaaaattttttcacgccattctcagacaggagatagggtggtttgacataaacgatacaaccgagctcaatacaagactgactgacgatatctcgaaaatttctgaaggcattggggataaggtaggcatgtttttccaggcagttgccaccttcttcgccggattcatcgtgggcttcatccgcggctggaagttgactctcgtgattatggccatctcgccaattctgggactttcagccgccgtgtgggcaaaaatcttaagtgcattcagcgacaaggagctggctgcatacgccaaggcaggtgccgtcgcggaagaggccctgggagccattaggactgtgatcgccttcggaggccaaaacaaggaactcgagcgttatcagaagcacctggaaaacgccaaggagatcggcatcaagaaggcaatctcagcgaatataagcatgggcatcgcattcctattaatctatgcctcgtatgctttagccttttggtatgggagcactctggtcatttctaaggaatacactataggtaatgcgatgactgtgttcttcagcattctgattggggcgttttcggtaggacaagcggctccctgtattgacgcttttgctaacgcaaggggtgcagcctacgttattttcgacatcatcgacaataatccaaagatcgactccttctcagagagggggcacaagcccgattctattaaggggaatttggagtttaacgacgtgcattttagctatccgtcaagagcaaatgtcaagattctgaaaggcctcaacctcaaagtgcaatccggacagaccgttgcgttggtagggtcgtcggggtgtggaaagtccaccactgtgcagcttatccagcggctgtatgatcctgacgagggtacaatcaatattgacgggcaagacattaggaatttcaatgttaattacctgcgagagattatcggcgtcgtatctcaggaaccggtactgttctccacaacaatagcagaaaacatctgctacgggcgcgggaacgtgactatggatgagattaaaaaagcagttaaggaagccaatgcctatgaattcattatgaagttaccacagaaatttgatacgttggtaggagaaagaggcgcccagttatctggcgggcagaagcaacgcatagccattgcccgcgcccttgttcgaaatccaaagattctgttgctggatgaggctacctctgccttagataccgagtcggaggccgaagtacaagcagcgctcgataaggcacgagagggcaggacgacgatcgttattgcccaccggttgtccaccgttaggaatgctgatgtcattgccggctttgaagacggggtcattgttgagcagggctctcactcagaacttatgaaaaaagagggagtgtacttcaaactggtgaacatgcaaacttcaggaagccagattcagagcgaggaattcgagctgaacgatgaaaaggccgcaaccagaatggcccccaatggctggaagtccaggctttttagacactcaacccagaagaatctgaagaactcccagatgtgccaaaagagtctggatgtggagaccgacgggttagaagccaatgtccctccagtgtcatttttgaaggtgttgaagctgaacaaaaccgaatggccctattttgtcgtgggcacagtctgcgcgattgctaatgggggcctacagcccgcattttccgtgatattcagcgagataattgccatatttggccctggtgacgatgccgtgaaacagcaaaagtgtaatatattttcactaatattcctgtttcttgggattatctccttctttacattctttttgcaggggtttacgtttggtaaagcaggcgaaattctgactagacgccttaggagcatggcgttcaaggcgatgttgagacaggatatgtcctggttcgacgaccacaaaaattccaccggtgcactgagcacaaggctggccaccgatgccgcgcaggttcagggcgcaacaggaaccagactggctctaattgcccagaacatcgccaatttagggaccggcattatcatatccttcatatatgggtggcagttaactctattgcttttggctgtggtgcctattatagccgtgtctggcattgttgagatgaagctgctagccggaaacgccaaacgggacaaaaaggaacttgaggcggctgggaagatcgctacagaggctattgagaacataaggacagtggtgtcgcttactcaggagcgcaagttcgaatcaatgtacgtggagaaattgtatgggccttacagaaactctgtgcagaaagcccacatctatgggatcacttttagcatcagtcaggctttcatgtacttctcgtatgccggttgctttcgctttggggcctatctgatcgtcaatggtcatatgagattcagggatgttatcctggtcttctcagcgatcgtgtttggagcagtggccttgggtcatgcttcttctttcgcaccagactacgccaaagctaagttgagtgctgcgcatctgtttatgttattcgagaggcaacccctgattgacagctattctgaagaaggcttgaaacctgataaattcgaggggaatatcacattcaacgaggtggtgttcaactaccccacacgcgcaaatgtacccgtcttgcaaggtctgtcactcgaggttaaaaagggacaaacgctcgccctggtgggctcaagtggctgtggcaagagtacggtggtacagctgttggagaggttctacgatcccctagcaggaactgtgttcgtggacttcggatttcagcttctagacggccaggaggctaaaaagctcaatgtgcagtggctgagggcacagctgggaattgtctcacaagaacctatcctgttcgactgtagcattgctgagaacatagcctacggagacaattcgcgcgtggtatcccaggacgagattgtgagcgccgcaaaagccgccaacattcaccccttcatcgagacgcttccgcataaatacgagacgcgtgttggggataaggggacgcagctgagcggcggccagaaacaacggattgcaatcgcaagagccctgatacggcagccccagattctgctgcttgacgaggccacttctgctcttgatactgaatcagagaaggtggttcaggaggcgctggacaaggcgcgtgagggaaggacttgcattgtgatcgcccaccgcctgtctactatccagaatgcagacctgattgtggtcttccagaatggccgggtgaaggagcacggtacccaccagcagctcctggcccagaagggcatttacttttcaatggtttccgtgcaggccgggacacagaatctg

SEQ ID NO: 200318 - DNA, 3858 bp, Artificial Sequence
  derived and/or modified sequence
atggacttggaggctgcaaagaatgggactgcttggaggccgacatccgccgaaggggactttgagctgggaataagctctaagcagaaaaggaagaaaactaagactgtgaagatgatcggcgtgttaaccctgttcagatactccgactggcaggacaagttattcatgtcactggggacaattatggctatcgcacatgggtcaggcttgccactgatgatgattgttttcggggaaatgactgataaatttgtggacactgccgggaacttttcttttcctgtcaatttctcgctcagccttcttaatcccggcaaaatcctcgaggaggagatgacacggtatgcctattattatagcggactgggggccggggtgctagtggccgcctatatccaggtatcattctggacacttgcagctggccgtcaaatccgcaagatacggcaaaagtttttccacgctatattgaggcaggagataggatggttcgatattaacgacactactgaactgaacaccagactgacagatgatatctccaagatcagcgagggtatcggcgataaggtgggcatgtttttccaggctgtggcaactttcttcgccgggttcatagtcgggtttatcagaggctggaagcttaccctcgtcatcatggccatctctcccatactcggtctctccgcagcggtgtgggccaagatactgagtgcgttctccgataaagagctcgcagcctacgctaaagctggagcggtagccgaagaagcattgggagcaatccgcaccgtgatagccttcggaggacagaacaaagagttagagcgctaccagaagcacttggaaaacgccaaggagatcgggatcaagaaggcaatttccgctaacatatctatgggcatcgcttttctgctgatttatgcttcctacgcattggcattttggtatggcagtacgcttgtgatctccaaagagtacaccataggtaacgccatgactgtgttctttagtatcctgataggggccttttcagtaggtcaggccgcaccgtgtatagatgcatttgcaaacgcccgcggcgctgcgtatgtgatattcgatatcattgacaacaaccctaagattgattcattctcggagagaggacacaaaccggattcgatcaaagggaatcttgagttcaacgatgtgcattttagttatccatctcgggccaacgtgaaaattctcaagggtctcaacctgaaagttcagtccggccagacagtggcactggtgggcagcagcggctgtggcaaatccactacagtgcagctgatccaaagactttatgaccccgatgaaggcactatcaatattgacggtcaggacattcggaactttaacgtaaattatttgcgtgagatcattggagtggtgtcgcaggagcccgtgctcttctccactacaatagcagaaaatatatgttatggaaggggtaacgtgaccatggacgagataaagaaggccgttaaggaagccaatgcatatgagttcataatgaagttaccacagaagttcgacacgctggtcggagagcggggagcacagctgtccggtggacagaagcagaggatcgcgatcgcgcgagcactggttcgtaaccctaaaatcctgctcctggatgaagccacatcagcactcgataccgaatccgaggccgaggtgcaggctgcattggacaaggcgagagaaggaagaactacaatcgtcatagcacaccgccttagcaccgtccgcaacgccgatgttatcgccgggtttgaagatggtgtgatcgtggagcagggtagccacagcgagttgatgaagaaagaaggtgtgtactttaaactggtgaacatgcagacatccggcagccagatacagtcagaggaattcgagctgaacgatgagaaagccgcgactcgcatggcacctaacgggtggaagtcaagactgttcaggcactccactcagaaaaaccttaaaaatagccagatgtgtcaaaagtccttggatgttgaaacagacggcttagaggctaacgtgcccccagtgtctttcctgaaagtacttaagctgaataagacggaatggccgtatttcgtggtcggcaccgtatgtgccatagctaacggaggcctccagccagcattctctgtgatcttcagcgaaataatcgctattttcggcccaggggacgatgcggtgaagcaacagaaatgcaacatcttttccctgatcttcctgtttctggggataatttctttcttcactttcttcctgcaggggttcaccttcgggaaggccggggagatcctgacccgcagactgagaagcatggcttttaaagccatgttgcgccaagatatgtcgtggttcgatgatcacaaaaacagtactggggcgctgagtacgaggctggccacggacgctgcccaggtgcaaggggccactggaacaaggctggcactgatagctcagaatatagcaaatctgggaaccggaataatcatttccttcatatacggatggcagcttacattattgcttctcgctgtggtgcccatcatcgccgtttccggtatcgtcgaaatgaaattgctcgcagggaacgcaaaaagagacaaaaaagaattggaagctgctggaaagatcgctacagaagccatcgagaatataagaacagtggtatcactgacccaggagaggaagttcgagtctatgtatgtcgaaaaactctacggcccataccggaactccgttcagaaagctcacatctacggaataacattttctattagtcaagcttttatgtacttttcctacgcaggctgcttccgctttggcgcttatctgatagttaacggccatatgcgatttcgtgacgtgatcttggttttttccgccattgtattcggggcagtagccctcggccacgccagttccttcgcaccagactacgctaaagctaaactaagcgcagcccatctattcatgttgtttgagcggcagccactgatagattcttactctgaggaaggcctgaagcctgacaagtttgagggtaatattaccttcaatgaggtggtctttaactaccctactcgagcaaacgtgcctgtcttgcagggactgtcactggaggtgaagaaaggccagaccctagccctcgttgggtcctctggctgcggcaagtccacagtggttcaactgctggaacggttttacgaccctcttgccggtacagtattcgtcgatttcggcttccaactcttggatgggcaggaggcaaagaagttgaacgtccagtggttgcgggcacagttagggatagtgtcacaggagcctattctcttcgactgctcaatcgccgagaacatcgcttacggggacaattccagagtagtgagccaggatgaaattgtgtctgccgcaaaagcagccaacatccatccctttatcgaaaccttgccacacaagtatgagactagggttggggacaagggcacccagctctccggcggacagaagcagcgcatagccatcgcaagagcactcatcaggcagccccagatcctgttgctggatgaggccacttccgctctggacacagaatcagagaaagtcgtgcaggaggcactcgacaaggctcgggaaggacgaacgtgtatagttatcgctcatagactgtctacgatccagaatgctgacctgattgttgtctttcagaatggacgagtaaaggagcacgggacacaccaacagttgctcgcccagaagggaatctacttctcaatggtgagcgtccaggccgggacacagaatctc

SEQ ID NO: 200319 - DNA, 3858 bp, Artificial Sequence
  derived and/or modified sequence
atggacctcgaggccgctaagaatggtaccgcctggcgccccacttcggccgagggggacttcgagcttggaataagcagcaagcagaaacgcaagaaaactaagaccgtgaagatgattggcgttctgacactattccgttactcagattggcaagacaaattgttcatgtctctgggaacaatcatggccatcgcccatggcagcggcctgcctttgatgatgatcgtgtttggagaaatgacggacaagtttgtcgataccgccggtaatttcagctttccggtgaatttttctctcagtctgctaaaccccgggaaaatcctggaggaggagatgacccgctacgcatactactactcgggactgggggcaggtgttctcgtggccgcttacatccaggtgtctttctggactctggccgcaggcaggcagataagaaaaatacgacaaaaattcttccacgccatacttcgccaggagataggatggttcgatataaacgacaccactgagctgaatacccggctgacagatgacatcagcaagatctctgagggcatcggcgataaagttggcatgttcttccaggcagtcgctactttcttcgcgggctttatcgtgggcttcattcgaggatggaaactgacgctcgtcattatggcaattagtccgattctgggattgtccgccgccgtgtgggcaaaaatcctttcagcattcagtgataaggagctcgccgcatacgccaaggccggtgcagtggctgaagaggccttgggcgccattcgcacagtgatcgcttttggtggccagaacaaggagttggagagatatcagaagcatctggagaatgctaaggagataggaattaagaaggccatcagcgctaacatatcaatgggcatcgcttttcttctaatctatgcctcttatgcgctggccttctggtacggatccactctggtcatctcgaaggagtacacgattggaaacgccatgacggtgttctttagtatcctaatcggagccttctccgttggccaggcggcgccgtgcatagacgctttcgccaatgctcgcggtgccgcctacgttatttttgacatcatcgacaacaatcctaaaatcgattcattctctgaacgtggccataaacccgatagcatcaagggtaacctggaattcaatgatgttcatttctcgtatcctagccgcgccaacgtcaaaatacttaagggtctgaacctgaaggtgcagagtggccaaacggtggccctcgtgggcagtagcggctgtggtaagtcgacaacggtacagctcattcagcgactgtatgatcccgatgaaggaacgatcaacatagacggccaggatatacgcaattttaacgtaaattatctgcgtgaaataatcggcgtcgtgagccaagaaccagttctgttcagcacgacgatcgccgagaatatttgttatggccggggtaacgtgacgatggatgaaataaagaaggcggtgaaggaagccaatgcttatgaattcattatgaaactgccacagaaatttgacacgctggtcggtgagcgaggtgcgcagctaagcggcggacagaaacagcggatcgccatcgcacgagcattggtgcgcaacccgaaaattctgctgctggacgaggcaacctcggccctcgataccgagtctgaggcagaggtccaggcggccctggataaggccagagagggtcgcacaaccattgtgatcgcgcatcgtctctcgactgtgcgtaatgcggatgtgattgccggatttgaagacggtgttattgtagagcaaggttcccacagcgagctgatgaaaaaagaaggtgtgtacttcaagctagttaacatgcaaactagcggctcacagattcagtcggaggagtttgagctgaacgacgaaaaggcggccactcgtatggctccgaatggctggaagagccgcctgtttcgccattccacacagaaaaatctgaagaacagtcaaatgtgccagaaatccttggacgtagagacggatggactggaggcgaacgttccgccagtgagcttcctgaaggtccttaaattaaacaagaccgagtggccctatttcgtagtcggcaccgtgtgcgctatcgccaatggcggcctgcagccggctttttccgtgatcttctccgaaatcatcgccatatttggccccggtgatgacgccgtcaagcagcagaaatgcaacatattttctctgattttcttattcttggggataatcagcttcttcactttctttcttcagggcttcaccttcggcaaggctggcgagatattgactcgacgcctccgtagtatggccttcaaagctatgttgaggcaagatatgagctggttcgatgatcacaagaactcgacgggcgccctctccactcgactggccacggacgccgcccaggtccagggcgcaacgggaactcgactggcgttgattgcccagaatattgccaatttaggaaccggcataatcattagcttcatttacggttggcagctgaccctgttgctgcttgctgtggtccccattatcgcggtatcgggcattgttgagatgaagcttcttgccggaaacgcgaagcgcgacaaaaaggaactggaggcagcgggcaagatcgcgacagaggccattgaaaacattagaacagttgtttcgctcacccaagagagaaagtttgaatccatgtacgtcgagaaactttatggcccgtacaggaattcggtgcaaaaggcccatatctatggcattacattttcgattagtcaagcgtttatgtacttttcatacgctggttgttttcgtttcggtgcctaccttatcgtcaacggtcacatgaggttcagggatgtgatcttggtgttctcagcaatagtcttcggcgccgttgccttgggacacgcttccagctttgctcccgattatgccaaggctaagctgtctgccgcccacctcttcatgctttttgaacgccagccactgattgattcctactcagaagagggccttaagccagataaatttgagggaaatataacgttcaatgaggtggtgtttaactatccgacgcgcgccaatgtcccggtgctgcagggtctgtcccttgaggtaaagaagggccagaccctcgccttggtgggcagttcgggttgcgggaagagcaccgtcgtacaattgctggagcgcttctacgatcccttggccggcacggtgtttgtggacttcggctttcaactgctagatggtcaagaggcaaagaagcttaatgtgcaatggctgcgtgctcagctcggaattgtgtctcaggagccgatcctgtttgactgctcaattgccgagaatatcgcctacggcgataatagccgagtggtgtcgcaggacgagattgtgtccgctgccaaggctgcgaatattcacccctttatcgaaacgctgccccataaatatgagacaagagtcggagataagggcacgcaactatcaggcggccagaaacagcgcatcgctatcgcgagagctctgatccgccaacctcaaatcctgctgctggacgaggcgacctccgccttggatacagagtccgagaaagtcgtgcaggaggccttggataaggcacgagagggccgcacgtgcatagtgatcgcacaccgactatccaccatccagaatgccgaccttattgttgtcttccagaatggtcgcgtcaaggagcatggtacccaccagcagttgctggctcaaaagggaatctacttttctatggtgtccgtacaggctggtacacagaatctt

SEQ ID NO: 200320 - DNA, 3858 bp, Artificial Sequence
  derived and/or modified sequence
atggatctggaagcggcaaagaatggcactgcatggaggccaacttccgcagaaggtgactttgaacttgggatttccagcaagcaaaaacgcaaaaagaccaagactgtcaagatgataggtgttctcaccctgtttagatattcagattggcaagacaaactctttatgtcactcgggactatcatggccatagcccatggttccggtctgccactgatgatgattgtgtttggagaaatgaccgacaaattcgtcgacacggctggaaacttttcctttcctgtcaatttctctctctctctgttgaacccaggcaaaatcctcgaagaagagatgactcgatacgcatactactacagcggccttggggctggcgtcctggtcgccgcatacatccaagtgtcgttctggaccctggcggcaggacgtcaaattcgaaagattcgtcaaaagttctttcatgctattctcagacaggaaatcggatggtttgatatcaacgacacgaccgaactcaataccagacttactgatgatatttcgaagatttcggagggcataggagataaggtgggaatgttttttcaagcggtcgcaaccttttttgctgggttcatcgtaggctttattcgcggatggaaactcactcttgtgataatggccatttcacctatactggggctgtccgctgcagtctgggctaagatactgtcggcattctcagacaaggaactcgcagcctacgcgaaggcaggtgctgtggcagaagaggccctgggtgcaattaggaccgtcattgcatttggtggtcagaacaaagagctcgaaagataccaaaagcatctggagaacgcaaaagagattggaatcaaaaaggcaatttcggcaaacatatcaatgggaattgcattcctgcttatctacgcatcgtacgcgctggctttttggtacgggagcactttggtgatttcgaaggagtataccattggaaacgcgatgaccgtattctttagtattctgataggtgctttctccgtcggtcaggctgccccttgtattgacgcatttgcaaacgcgaggggcgccgcatacgtgatctttgatatcattgacaataaccctaagatcgactccttcagcgagaggggacacaaacctgattccattaaagggaatctggaattcaatgatgtgcatttttcttacccgtcgcgagcaaacgtgaagattctgaaaggactgaatcttaaagtgcaaagcggacaaaccgtggccctcgtcggatcgagcggctgcggaaaatctaccactgtgcaactgattcaacggctgtacgatccggatgagggaacgatcaatatcgacggccaggacattcgcaatttcaacgtgaactacctgcgggagatcatcggtgtagtctcacaagaacccgtgctgttcagtaccactattgcggagaatatctgctacggaagagggaatgtgaccatggacgaaatcaagaaggcagtgaaggaagctaacgcatatgagttcatcatgaagctccctcaaaagtttgatacccttgtcggtgaaagaggtgcccagctgtcgggtgggcagaagcagagaatcgcaatcgcccgagcgcttgtgagaaaccctaagattcttcttcttgatgaggcaaccagcgccctcgacaccgagtcggaagcagaagtccaagccgcattggacaaggcgcgcgaggggcggactactatcgtgattgcacaccggctttctactgtacgcaacgccgatgtgatcgcaggttttgaagatggcgtgattgtggaacaaggaagccactccgaacttatgaagaaagagggagtgtactttaaactggtgaacatgcagacttcggggtcacaaattcagtcggaggaatttgaactgaacgacgaaaaagcagcgactagaatggcgcccaatggatggaaatccagacttttccggcattccacccagaagaatctgaagaactcccagatgtgtcaaaaatcgcttgatgttgaaactgatggtcttgaagccaatgtgccacctgtctcctttttgaaagtgctcaagctcaacaaaaccgaatggccatactttgtagtcggcaccgtgtgtgcgattgcaaacggaggccttcagcccgcattttcggttatcttctccgagataatcgcgattttcggccccggtgacgatgcagtgaagcagcagaagtgcaacatcttttcgcttatcttcttgtttttggggataatcagctttttcacctttttcctgcagggctttactttcggtaaggccggggaaatccttacccgacgtttgcggtcgatggcctttaaagcgatgctgcgccaagacatgtcctggtttgatgaccacaagaattcgactggagcactctcaactagactcgctactgatgccgcacaggtccaaggggccactggaaccagactcgcgctgatcgcgcagaatattgcaaatcttggaacgggcatcatcatttccttcatctacggttggcagcttacgctcctgttgctcgcagtggtgcctattatcgccgtgtcgggaatcgtcgaaatgaagctgctggcagggaatgctaagcgggataagaaagaactggaagccgcaggaaagatagcaaccgaagcgatagagaatatcagaaccgtcgtcagccttacccaagaacgcaagtttgagtccatgtacgtggaaaaactttacggaccttatcgcaacagcgttcagaaggcacatatctatggaataacttttagcatttcacaggcctttatgtacttttcctacgcaggatgttttaggttcggcgcctaccttattgtgaacggtcatatgcggttccgcgatgtgatacttgtgttcagcgctattgtgtttggcgcagtggcactgggacatgcgagcagttttgcacccgactacgcaaaggcaaagctgagcgcggcacatctgttcatgctgttcgaacgtcagcccctgatagattcctactcggaggaaggccttaagcctgataagtttgaagggaacattacttttaacgaagtcgttttcaactaccctacccgcgctaacgtaccagttcttcagggtctgtcactggaagtgaagaaggggcaaactctcgcattggtcggaagctcggggtgtggaaagagtactgtggttcaactgcttgagagattttacgacccacttgctggaaccgtgtttgtggattttggtttccaactgctggatggtcaggaggccaagaaacttaacgtgcagtggctccgggcacaactcggtattgtctcccaagaaccgattctgtttgactgctcaattgcagagaacattgcatacggtgataacagcagagtggtgtcccaggatgagattgtgagcgcagcaaaggcggctaacattcacccattcattgagactcttccgcataagtacgagactcgagtgggtgataagggaacccaactttcgggaggtcagaagcaacgcattgctattgcaagggcactgatcaggcaaccacaaatactgctgctggacgaagcaacgtcagctctcgatacggaatccgagaaggtggtgcaagaagcactggataaggcacgggaaggaaggacgtgtatcgtgatcgcccatcggctttcaaccattcaaaatgcagatcttatagttgtgtttcaaaacggcagagtgaaggaacacgggactcaccaacagcttcttgcccagaagggtatatacttttcgatggtcagcgtgcaagccgggacccagaacctc

SEQ ID NO: 200321 - DNA, 3858 bp, Artificial Sequence
  derived and/or modified sequence
atggacctggaggcggcgaagaacggaactgcctggaggcccacctcggcagaaggcgacttcgaactgggcatctcgagcaagcagaagagaaagaaaaccaagaccgtgaagatgataggagttctcaccctgttcagatacagcgattggcaagacaagctgttcatgtcgctgggaactatcatggcaatcgctcatggatcaggacttcctctcatgatgatcgtctttggagagatgaccgataaattcgtggacaccgctggcaacttctcgtttccagtgaatttctcattgagcctgttgaacccaggaaagatcctcgaagaggaaatgaccaggtacgcgtactattactcgggactgggagcaggcgtgctggtggccgcctacatccaggtatccttttggactctggctgccgggcgtcagattagaaaaatccgacagaaattcttccacgctatcctgcgtcaggaaattggctggttcgacatcaatgacactactgagctgaataccagactgactgacgacatcagcaagatctcagaaggtattggcgataaggtcggcatgttcttccaggctgtggcgaccttctttgcaggcttcattgtcggttttatcagaggatggaagttgactctggtgatcatggctatcagcccgattcttggactgtccgcggcggtgtgggccaagatccttagcgcattttcggacaaggaacttgccgcgtacgctaaggcgggagccgtggcagaagaagcactgggagcgatccgcaccgttattgcgttcggcggacagaataaggaactggaaaggtaccaaaagcatctggagaacgcaaaggaaatcggaatcaaaaaggcaatctccgccaacatctccatgggaatcgcattccttttgatctacgcgtcatacgctcttgctttctggtacggttcaaccctcgtgatctcaaaagagtacaccatcgggaacgctatgactgtgttcttctcgatactcatcggagcttttagcgtgggacaagctgccccttgcatcgacgcctttgccaacgcacgaggtgccgcttacgtcatcttcgacatcatcgacaataacccgaagattgattccttcagcgagcggggccataaaccggattctatcaaaggaaacctggagttcaatgacgtacacttttcctatccgtcgcgcgctaatgtgaagatcctgaaggggctcaacctgaaggtgcagtcgggtcagaccgtggccctcgttggatcctcggggtgtggaaaatcaactaccgtgcagctgatccagaggctgtacgacccggatgaaggcacgattaacatcgacggccaggacatccgcaacttcaatgtgaattacctgcgcgagatcatcggagtggtgtcgcaagaaccggtgctgttctcaactactatcgcggagaacatctgctacggccgcggtaatgtcacgatggacgagatcaaaaaagcagtgaaagaagccaacgcatacgagttcatcatgaaactgccacaaaagtttgataccctggtcggggaacggggcgcacaactgtcaggaggacaaaagcaacgcatcgcgattgccagagcgttggtgcggaacccgaagatcctcctgctggatgaagccaccagcgcgctcgacaccgaatccgaagccgaagtgcaggcggccctggataaagcccgggaggggcgaactaccatcgtgatcgcccaccgcctttccactgtgcggaacgcggatgtcatcgctgggttcgaagacggcgttatcgtggaacagggatcccactccgaactgatgaagaaagagggtgtctacttcaagttggtgaatatgcagacgtcaggatcacaaatccaatccgaggagtttgaactgaatgacgaaaaagccgccactagaatggcgcccaacggctggaagtctcggctcttcaggcacagcacccaaaagaaccttaagaactcgcagatgtgccagaagagcttggatgtcgaaactgatggcctcgaagctaacgtaccgccggtgagcttcctgaaggttctgaaactgaacaagactgaatggccttacttcgtggtggggactgtctgcgcaatcgctaacggtggcctccagccggcttttagcgtcattttctctgaaatcattgccatcttcggcccgggagatgatgccgtgaagcaacagaaatgtaatatcttctccttgatcttcctcttcctcggcattatatcgttcttcactttcttcctccagggatttacctttggtaaagcgggcgagatcctcactcggcgcctccggtccatggcgttcaaggcaatgttgcggcaagatatgtcatggttcgacgatcacaagaattccacgggcgctctgagtactcgccttgcgactgacgcagcacaggtgcagggcgccaccggcacccggttggcgctcattgcacaaaacattgcaaacctgggaacgggcatcatcatctccttcatctacggatggcagcttactctgctgctgctggcagtcgtgccaattattgccgtctcagggatcgtcgagatgaagctcctcgcgggaaatgcgaagcgggataagaaggagctggaggcagcgggaaagatcgcaaccgaggctatcgaaaacatccgaactgtggtgtccctgacccaagaacggaaatttgagtcaatgtacgtggagaagctgtacggcccataccgcaattcggtgcaaaaagcccacatttacggtatcaccttctcaatctcccaagccttcatgtattttagttacgccggatgtttccgcttcggagcctatttgatcgttaacggacatatgagattccgcgacgtgatcctcgtcttctccgccatcgtgttcggggcagtggcacttgggcacgccagctcgttcgcacctgactacgccaaggcgaagctgtccgctgcccatctgttcatgctgttcgagaggcagccactcatcgactcctactcggaggaagggttgaaaccagacaagtttgagggtaatatcacgtttaacgaagtcgtgtttaactacccgacccgggcgaacgtgcctgtgctgcaaggactgtcactcgaagtcaaaaagggtcagactctggcgctggtgggaagctcagggtgcggaaagtcgactgtggtccaacttcttgaacgcttctacgaccccctggctgggaccgtcttcgtggattttggattccagctgttggatggacaggaggcaaagaagctcaacgtgcagtggttgcgggcccagctcggaattgtgtcgcaggagcccattttgttcgattgctctatcgctgagaatattgcatatggggacaactcaagggtggtatctcaggatgagattgtgagcgcggccaaggccgcaaatatacacccgtttatcgaaactctccctcataagtacgaaacgcgtgtgggagataagggcacgcagctcagtggaggacagaagcagagaatcgccattgccagagccctgatccggcagccacaaatcttgctgcttgacgaagcgaccagcgcgcttgacactgagtccgaaaaggtcgtccaggaggctctcgacaaagctcgtgaaggtcggacctgcattgtgatcgcccatcgcctctcgaccatccagaatgccgacctgatcgtggtcttccagaacggcagggttaaggaacacggaacccaccagcaacttctcgcccaaaaaggaatatacttttccatggtcagcgtccaagccggaacccaaaacctg

SEQ ID NO: 200322 - DNA, 3858 bp, Artificial Sequence
  derived and/or modified sequence
atggacctggaggccgctaaaaatggaacggcctggcgccccacctcagcagagggcgatttcgagctaggtatcagcagcaagcaaaaaagaaagaagactaagacggtgaaaatgataggcgtgctgacactgtttcggtactctgattggcaggataaactgtttatgagtctaggaacaataatggccattgcacacggttcaggtttgcccttgatgatgattgtgttcggcgagatgaccgataagttcgtggatacggctgggaactttagcttccctgtcaactttagtctcagcctgctcaaccctggaaagatattagaagaggaaatgactcggtacgcctattattattccggcctaggtgctggagtgcttgtcgctgcttatattcaggtcagtttttggactctggccgccggtaggcaaatccgaaaaatccggcagaaattcttccacgcaattcttcggcaggagatcggttggtttgacataaacgatacaactgagttgaataccaggctgaccgacgacatctccaagatctctgaaggcatcggagacaaggttggcatgttcttccaggctgtagccacattctttgccggctttatcgtgggattcatccggggctggaaactcaccctcgttattatggccatctccccaatcctgggactgtccgctgcggtctgggctaaaatccttagcgcattttccgataaggaactggcagcatacgcaaaggccggcgccgtagctgaggaagcgcttggggccatcaggaccgtgatcgcctttggaggccaaaacaaagagctggaacgttatcagaagcatctggagaacgctaaagagataggaattaaaaaggccatctcagccaatatctctatgggtattgcgtttctgctgatatacgcgtcctacgcgttagctttttggtatggctcaactctcgttatttccaaggaatatacaatcggcaacgcgatgaccgtctttttttctatactcataggagcctttagcgtgggtcaagctgcaccctgcatcgacgccttcgctaacgcccggggtgcggcgtacgtgatatttgacatcatcgacaataatccaaaaatagactccttctcagaaaggggacataagcccgacagtataaagggtaacctcgaattcaacgatgtgcacttctcatatccttctcgagccaatgtgaagattttgaagggcctgaatttgaaggttcagtcaggtcagacagtggcactggtggggtctagcgggtgcggaaagtccactaccgtgcagttaattcaaaggctgtacgaccctgatgagggaacgatcaatattgatggccaggacatccgcaattttaatgtgaactatttacgcgaaataataggagtggtgtcacaagagccagtgctgttttccaccaccatcgccgaaaacatatgctatggcagggggaatgtgacaatggatgaaattaagaaagcagtgaaagaggctaatgcctatgagttcatcatgaaactacctcagaaatttgacaccttagtcggagagcgaggtgcacagctcagcggggggcagaaacagcggatagcaatcgcaagggccctggtccgcaatccgaagatcttattgctggatgaggctactagtgctctggataccgagtctgaagccgaagtgcaggcagctctcgataaggctcgggaaggacgcacgactattgtaatcgctcatcggctttcaactgtgaggaacgccgacgtcatagccggttttgaggacggggtaatagtagagcagggcagtcactctgaacttatgaagaaggagggggtctatttcaagctggtgaatatgcagacctcaggtagtcagattcagagcgaagaatttgaactgaacgacgaaaaagccgcaacccgtatggcaccgaatggatggaaatcacggctgttcagacactccacacagaagaatctcaagaacagccagatgtgccagaagtcactcgacgtcgagacagatggcctggaggctaatgtgccgcctgtatcattccttaaggtactcaaactcaataagaccgagtggccttatttcgtggtgggcactgtttgcgcgatcgctaacggaggcctgcagcctgctttcagtgtcattttctcagaaattatagccatcttcggccctggagacgacgctgtcaagcagcagaagtgcaatatttttagcttgatttttctgttcctgggaatcatcagcttttttacttttttcctgcaaggctttactttcggtaaggccggcgaaatcctcacccggaggttacgttcaatggcatttaaagccatgttgagacaggatatgtcttggtttgatgatcacaagaatagcacgggggctctctctacacgtcttgcaaccgacgcggcccaagtgcagggtgctacagggacgcgcttggctctgatcgcacagaatatagcaaacctgggaactgggattattatctcatttatctatggatggcagttgaccctcctgctacttgctgtggtccctatcatcgctgtctcagggatagtggagatgaaacttttagcgggcaatgctaaaagagacaagaaggaacttgaggccgctggcaaaatcgctaccgaggcgatagaaaacatccggactgtggtgtctctcacacaagagcgcaaatttgagtctatgtacgtggaaaaactttacggaccttatagaaactcagtccagaaggctcatatctatggcatcacgttttcaatctcacaggcgtttatgtatttctcttatgccggatgcttcagatttggagcctatttgattgtgaacgggcacatgagattcagagacgtaatcttagtattctctgcgattgtatttggggcagtggccttggggcacgcttcctccttcgcccccgactatgctaaagctaaactttccgctgctcatctgttcatgttgtttgaaaggcaacctctgattgacagttactctgaagagggattaaagcctgacaagttcgagggtaacatcacttttaacgaggtggtgttcaattaccctactagggccaacgtgccggtgttacaggggctatccctggaagtgaagaaagggcagactttggctctggtgggttcttctggatgcggcaagtcaacggtggtccagctgctggagcgcttttatgatccactggccggaaccgtgttcgtcgactttgggtttcagctgctggacggacaagaggctaagaagttgaatgtgcagtggcttagggcgcagctcggcatcgtatctcaggaacccatactgtttgactgttccattgccgaaaacattgcgtacggcgacaatagtcgggtggtgtctcaggacgaaatcgtatctgccgcgaaagccgccaatattcatccctttattgaaactctgccacataagtatgagacccgagttggcgataagggaacgcagctgagcggggggcaaaagcagagaattgccattgcaagagctctgattcggcagcctcagatcttattgttggatgaagccacaagcgctttagacacagaatcggagaaggtggtacaggaggctctggacaaggctcgcgaaggcaggacatgcattgtgatcgcccatcgcctgagcacgatccaaaatgcagacctgatcgtggtttttcaaaacggcagggttaaggaacatggcacgcaccagcaactcctggcccagaagggcatttacttcagcatggtaagtgttcaggccggaactcaaaatctc

SEQ ID NO: 200323 - DNA, 3858 bp, Artificial Sequence
  derived and/or modified sequence
atggatctggaagccgctaagaatggtaccgcatggcgacctacttccgccgaaggtgattttgaactgggcattagctccaaacaaaaacgaaaaaagaccaagacggtcaagatgattggagtgctcaccctgtttcgctactcggattggcaggataagctgttcatgtctctcgggaccatcatggcaatcgcacatggttccggactgccccttatgatgattgtttttggggaaatgactgataagtttgttgacactgcaggaaacttttcgttcccggtcaacttctccctgtcgcttcttaatcctggtaagattcttgaagaagagatgacccggtacgcgtactactacagtggcctgggagcaggggtgcttgtggcagcatacatccaggtgtcgttctggactcttgccgccggcagacagattagaaagattaggcaaaagtttttccatgcaatcctgcggcaggagattggatggtttgacattaatgataccactgaacttaacaccagactgactgatgatatctccaagattagcgaggggataggggacaaagtgggcatgttcttccaggcagtggcaaccttttttgcaggttttatcgtgggctttattcgagggtggaaactcacccttgtgattatggccatttcacctattcttggcttgtcggcggcggtctgggccaaaatactgtcggctttttcagacaaagaactcgccgcctacgccaaagcaggggcagtcgccgaagaagcgctgggagccattcgtactgtgatcgctttcggtggacagaataaggagctcgaacgataccaaaaacatcttgaaaacgctaaggaaattggaatcaaaaaagcaatctccgccaacatttcgatgggaattgcattcctgctgatttacgcaagctacgcactggctttttggtacggtagcactcttgtcatctcaaaggaatacactataggaaatgcaatgactgtgtttttctcgattcttattggtgccttttccgtgggacaagcagcaccctgtatcgatgcgtttgcaaatgctcgcggcgcagcttacgtgatctttgacataatagataacaaccccaagatcgattccttttcagaaagaggtcataaacctgatagcatcaaaggtaaccttgagttcaatgatgtgcatttctcgtacccgtcacgtgcgaacgtaaagatactcaagggtctgaatctgaaggtgcaatctgggcaaactgtggcccttgtggggtctagcggttgtggcaagagcaccactgtgcaactgatacaaagactgtacgatcctgatgagggcacgatcaatattgacgggcaggacatccggaactttaacgtgaactaccttagagaaatcattggagtggtgagccaggaaccagtactgttctccactaccattgcagaaaacatttgttacgggcgcggaaatgtgaccatggatgagattaagaaggccgtcaaggaagcaaacgcgtacgagttcattatgaagctgccgcaaaagtttgatactcttgtcggcgagaggggtgcccaactcagtggtggacaaaagcagcgtattgcaatagcacgggcgctcgtgcgaaatcccaagatcttgctgctcgatgaggcaacttcggccttggataccgaatcggaagcggaagtccaggccgctctcgacaaggccagagagggcagaactaccatcgtcatcgcacacagactgtcgactgtgagaaatgcagatgtgatagctggatttgaagatggagttattgtggagcaaggatcacatagtgagcttatgaaaaaggaaggagtctactttaagctcgttaacatgcaaacctcaggatctcaaattcagtcagaagagtttgaacttaatgacgaaaaggcggccacgaggatggcaccaaatggatggaagtccaggttgtttcgtcattcgacccaaaagaacttgaagaactcgcagatgtgccagaagtcgctggacgtggagactgacgggctggaagcaaacgtgccgccagtgtcgtttctcaaggtgctcaaactcaataagactgagtggccttactttgtggttggaactgtgtgcgcaattgcaaacggtgggctccaacctgcattcagcgtcatattctcggaaatcatagccatctttggtccaggtgacgatgcagtgaagcaacagaagtgtaatatcttttcgctgatttttcttttcctgggcatcattagcttctttaccttttttcttcaaggctttacctttggaaaagcaggtgaaatcttgacgcggagactgaggtccatggcatttaaggcaatgctccgccaggacatgtcgtggtttgatgatcacaagaatagcaccggagcactttctacccggctggccacggatgccgcgcaagtgcagggggcaaccggaactcgcttggctctgattgcccagaacattgcaaatctgggaacgggcatcattatctcgttcatttacgggtggcaacttacccttctgctgctcgcggtagtgccaatcatcgcagtcagtggaatagtggaaatgaagctgctcgcaggcaacgcaaaacgggacaaaaaagaactggaagcagctggcaagatcgcgactgaagcgatagagaatattcgaaccgtggtgtcactcactcaggaaaggaaattcgagagcatgtacgtggaaaagttgtacggaccctatagaaacagcgtgcaaaaggcacacatatacggcatcaccttctccatttcacaggcttttatgtatttctcctacgcgggttgttttcgcttcggtgcctaccttatcgtcaacgggcacatgcgtttcagggacgtcatcctcgtcttttccgccattgtgtttggagcagtggcactcggacacgcctcctcgtttgcacctgattacgctaaggctaagctgtccgcagctcaccttttcatgctttttgaacgccaaccactgatagattcctactctgaggagggtcttaagccagacaagttcgagggaaacattaccttcaacgaagtcgtctttaactatccgactcgcgccaacgtgccagttctgcagggtttgagcctggaagtgaagaagggccaaaccctcgcgctggtgggttccagcggttgcggaaaatccaccgttgtccaactgctcgagcgcttttacgacccactggccggaactgttttcgtcgactttggatttcagctgctggatggtcaagaagcgaagaagttgaacgtgcagtggctgcgggctcaacttggaattgtgagtcaagaacccattcttttcgactgctccatagcagagaacatcgcctacggagataactcgagagtggtgtcacaggatgagatcgtcagcgcggccaaagcggctaacatacatcctttcattgaaacccttcctcacaagtacgagactcgggtgggggataaaggaacgcaattgtccgggggacaaaaacaaaggattgccattgcgagagcacttatcaggcagcctcaaatcctgctcttggacgaggcaacgtccgccctggacaccgaatcagaaaaggtggtgcaggaagcacttgataaagcaagagagggtagaacctgtattgtgattgcccatcgccttagcaccattcaaaacgcggacctgattgtcgtgtttcaaaatggaagggtcaaagaacatgggactcatcagcaactgcttgcccagaaggggatctatttctcaatggtatccgttcaggcaggcacgcagaacctt

SEQ ID NO: 200324 - protein, 1232 aa, Artificial Sequence
  derived and/or modified sequence
MDLEAAKNGTAWRPTSAEGDFELGISSKQKRKKTKTVKMIGVLTLFRYSDWQDKLFMSLGTIMAIAHGSGLPLMMIVFGEMTDKFVDTAGNFSFPVNFSLSLLNPGKILEEEMTRYAYYYSGLGAGVLVAAYIQVSFWTLAAGRQIRKIRQKFFHAILRQEIGWFDINDTTELNTRLTDDISKISEGIGDKVGMFFQAVATFFAGFIVGFIRGWKLTLVIMAISPILGLSAAVWAKILSAFSDKELAAYAKAGAVAEEALGAIRTVIAFGGQNKELERYQKHLENAKEIGIKKAISANISMGIAFLLIYASYALAFWYGSTLVISKEYTIGNAMTVFFSILIGAFSVGQAAPCIDAFANARGAAYVIFDIIDNNPKIDSFSERGHKPDSIKGNLEFNDVHFSYPSRANVKILKGLNLKVQSGQTVALVGSSGCGKSTTVQLIQRLYDPDEGTINIDGQDIRNFNVNYLREIIGVVSQEPVLFSTTIAENICYGRGNVTMDEIKKAVKEANAYEFIMKLPQKFDTLVGERGAQLSGGQKQRIAIARALVRNPKILLLDEATSALDTESEAEVQAALDKAREGRTTIVIAHRLSTVRNADVIAGFEDGVIVEQGSHSELMKKEGVYFKLVNMQTSGSQIQSEEFELNDEKAATRMAPNGWKSRLFRHSTQKNLKNSQMCQKSLDVETDGLEANVPPVSFLKVLKLNKTEWPYFVVGTVCAIANGGLQPAFSVIFSEIIAIFGPGDDAVKQQKCNIFSLIFLFLGIISFFTFFLQGFTFGKAGEILTRRLRSMAFKAMLRQDMSWFDDHKNSTGALSTRLATDAAQVQGATGTRLALIAQNIANLGTGIIISFIYGWQLTLLLLAVVPIIAVSGIVEMKLLAGNAKRDKKELEAAGKIATEAIENIRTVVSLTQERKFESMYVEKLYGPYRVFSAIVFGAVALGHASSFAPDYAKAKLSAAHLFMLFERQPLIDSYSEEGLKPDKFEGNITFNEVVFNYPTRANVPVLQGLSLEVKKGQTLALVGSSGCGKSTVVQLLERFYDPLAGTVLLDGQEAKKLNVQWLRAQLGIVSQEPILFDCSIAENIAYGDNSRVVSQDEIVSAAKAANIHPFIETLPHKYETRVGDKGTQLSGGQKQRIAIARALIRQPQILLLDEATSALDTESEKVVQEALDKAREGRTCIVIAHRLSTIQNADLIVVFQNGRVKEHGTHQQLLAQKGIYFSMVSVQAGTQNL

SEQ ID NO: 200325 - protein, 61 aa, Artificial Sequence
  derived and/or modified sequence
MDLEAAKNGTAWRPTSAEGDFELGISSKQKRKKTKTVKMIGVLTLFRYSDWQDKLFMSLGT

SEQ ID NO: 200326 - DNA, 3696 bp, Artificial Sequence
  derived and/or modified sequence
atggacctggaggccgccaagaacggcaccgcctggcgccccaccagcgccgagggcgacttcgagctgggcatcagcagcaagcagaagcgcaagaagaccaagaccgtgaagatgatcggcgtgctgaccctgttccgctacagcgactggcaggacaagctgttcatgagcctgggcaccatcatggccatcgcccacggcagcggcctgcccctgatgatgatcgtgttcggcgagatgaccgacaagttcgtggacaccgccggcaacttcagcttccccgtgaacttcagcctgagcctgctgaaccccggcaagatcctggaggaggagatgacccgctacgcctactactacagcggcctgggcgccggcgtgctggtggccgcctacatccaggtgagcttctggaccctggccgccggccgccagatccgcaagatccgccagaagttcttccacgccatcctgcgccaggagatcggctggttcgacatcaacgacaccaccgagctgaacacccgcctgaccgacgacatcagcaagatcagcgagggcatcggcgacaaggtgggcatgttcttccaggccgtggccaccttcttcgccggcttcatcgtgggcttcatccgcggctggaagctgaccctggtgatcatggccatcagccccatcctgggcctgagcgccgccgtgtgggccaagatcctgagcgccttcagcgacaaggagctggccgcctacgccaaggccggcgccgtggccgaggaggccctgggcgccatccgcaccgtgatcgccttcggcggccagaacaaggagctggagcgctaccagaagcacctggagaacgccaaggagatcggcatcaagaaggccatcagcgccaacatcagcatgggcatcgccttcctgctgatctacgccagctacgccctggccttctggtacggcagcaccctggtgatcagcaaggagtacaccatcggcaacgccatgaccgtgttcttcagcatcctgatcggcgccttcagcgtgggccaggccgccccctgcatcgacgccttcgccaacgcccgcggcgccgcctacgtgatcttcgacatcatcgacaacaaccccaagatcgacagcttcagcgagcgcggccacaagcccgacagcatcaagggcaacctggagttcaacgacgtgcacttcagctaccccagccgcgccaacgtgaagatcctgaagggcctgaacctgaaggtgcagagcggccagaccgtggccctggtgggcagcagcggctgcggcaagagcaccaccgtgcagctgatccagcgcctgtacgaccccgacgagggcaccatcaacatcgacggccaggacatccgcaacttcaacgtgaactacctgcgcgagatcatcggcgtggtgagccaggagcccgtgctgttcagcaccaccatcgccgagaacatctgctacggccgcggcaacgtgaccatggacgagatcaagaaggccgtgaaggaggccaacgcctacgagttcatcatgaagctgccccagaagttcgacaccctggtgggcgagcgcggcgcccagctgagcggcggccagaagcagcgcatcgccatcgcccgcgccctggtgcgcaaccccaagatcctgctgctggacgaggccaccagcgccctggacaccgagagcgaggccgaggtgcaggccgccctggacaaggcccgcgagggccgcaccaccatcgtgatcgcccaccgcctgagcaccgtgcgcaacgccgacgtgatcgccggcttcgaggacggcgtgatcgtggagcagggcagccacagcgagctgatgaagaaggagggcgtgtacttcaagctggtgaacatgcagaccagcggcagccagatccagagcgaggagttcgagctgaacgacgagaaggccgccacccgcatggcccccaacggctggaagagccgcctgttccgccacagcacccagaagaacctgaagaacagccagatgtgccagaagagcctggacgtggagaccgacggcctggaggccaacgtgccccccgtgagcttcctgaaggtgctgaagctgaacaagaccgagtggccctacttcgtggtgggcaccgtgtgcgccatcgccaacggcggcctgcagcccgccttcagcgtgatcttcagcgagatcatcgccatcttcggccccggcgacgacgccgtgaagcagcagaagtgcaacatcttcagcctgatcttcctgttcctgggcatcatcagcttcttcaccttcttcctgcagggcttcaccttcggcaaggccggcgagatcctgacccgccgcctgcgcagcatggccttcaaggccatgctgcgccaggacatgagctggttcgacgaccacaagaacagcaccggcgccctgagcacccgcctggccaccgacgccgcccaggtgcagggcgccaccggcacccgcctggccctgatcgcccagaacatcgccaacctgggcaccggcatcatcatcagcttcatctacggctggcagctgaccctgctgctgctggccgtggtgcccatcatcgccgtgagcggcatcgtggagatgaagctgctggccggcaacgccaagcgcgacaagaaggagctggaggccgccggcaagatcgccaccgaggccatcgagaacatccgcaccgtggtgagcctgacccaggagcgcaagttcgagagcatgtacgtggagaagctgtacggcccctaccgcgtgttcagcgccatcgtgttcggcgccgtggccctgggccacgccagcagcttcgcccccgactacgccaaggccaagctgagcgccgcccacctgttcatgctgttcgagcgccagcccctgatcgacagctacagcgaggagggcctgaagcccgacaagttcgagggcaacatcaccttcaacgaggtggtgttcaactaccccacccgcgccaacgtgcccgtgctgcagggcctgagcctggaggtgaagaagggccagaccctggccctggtgggcagcagcggctgcggcaagagcaccgtggtgcagctgctggagcgcttctacgaccccctggccggcaccgtgctgctggacggccaggaggccaagaagctgaacgtgcagtggctgcgcgcccagctgggcatcgtgagccaggagcccatcctgttcgactgcagcatcgccgagaacatcgcctacggcgacaacagccgcgtggtgagccaggacgagatcgtgagcgccgccaaggccgccaacatccaccccttcatcgagaccctgccccacaagtacgagacccgcgtgggcgacaagggcacccagctgagcggcggccagaagcagcgcatcgccatcgcccgcgccctgatccgccagccccagatcctgctgctggacgaggccaccagcgccctggacaccgagagcgagaaggtggtgcaggaggccctggacaaggcccgcgagggccgcacctgcatcgtgatcgcccaccgcctgagcaccatccagaacgccgacctgatcgtggtgttccagaacggccgcgtgaaggagcacggcacccaccagcagctgctggcccagaagggcatctacttcagcatggtgagcgtgcaggccggcacccagaacctg

SEQ ID NO: 200327 - DNA, 183 bp, Artificial Sequence
  derived and/or modified sequence
atggacctggaggccgccaagaacggcaccgcctggcgccccaccagcgccgagggcgacttcgagctgggcatcagcagcaagcagaagcgcaagaagaccaagaccgtgaagatgatcggcgtgctgaccctgttccgctacagcgactggcaggacaagctgttcatgagcctgggcacc

SEQ ID NO: 200328 - DNA, 3699 bp, Artificial Sequence
  derived and/or modified sequence
atggacctggaggccgccaagaacggcaccgcctggagacccaccagcgccgagggcgacttcgagctgggcatcagcagcaagcagaagagaaagaagaccaagaccgtgaagatgatcggcgtgctgaccctgttcagatacagcgactggcaggacaagctgttcatgagcctgggcaccatcatggccatcgcccacggcagcggcctgcccctgatgatgatcgtgttcggcgagatgaccgacaagttcgtggacaccgccggcaacttcagcttccccgtgaacttcagcctgagcctgctgaaccccggcaagatcctggaggaggagatgaccagatacgcctactactacagcggcctgggcgccggcgtgctggtggccgcctacatccaggtgagcttctggaccctggccgccggcagacagatcagaaagatcagacagaagttcttccacgccatcctgagacaggagatcggctggttcgacatcaacgacaccaccgagctgaacaccagactgaccgacgacatcagcaagatcagcgagggcatcggcgacaaggtgggcatgttcttccaggccgtggccaccttcttcgccggcttcatcgtgggcttcatcagaggctggaagctgaccctggtgatcatggccatcagccccatcctgggcctgagcgccgccgtgtgggccaagatcctgagcgccttcagcgacaaggagctggccgcctacgccaaggccggcgccgtggccgaggaggccctgggcgccatcagaaccgtgatcgccttcggcggccagaacaaggagctggagagataccagaagcacctggagaacgccaaggagatcggcatcaagaaggccatcagcgccaacatcagcatgggcatcgccttcctgctgatctacgccagctacgccctggccttctggtacggcagcaccctggtgatcagcaaggagtacaccatcggcaacgccatgaccgtgttcttcagcatcctgatcggcgccttcagcgtgggccaggccgccccctgcatcgacgccttcgccaacgccagaggcgccgcctacgtgatcttcgacatcatcgacaacaaccccaagatcgacagcttcagcgagagaggccacaagcccgacagcatcaagggcaacctggagttcaacgacgtgcacttcagctaccccagcagagccaacgtgaagatcctgaagggcctgaacctgaaggtgcagagcggccagaccgtggccctggtgggcagcagcggctgcggcaagagcaccaccgtgcagctgatccagagactgtacgaccccgacgagggcaccatcaacatcgacggccaggacatcagaaacttcaacgtgaactacctgagagagatcatcggcgtggtgagccaggagcccgtgctgttcagcaccaccatcgccgagaacatctgctacggcagaggcaacgtgaccatggacgagatcaagaaggccgtgaaggaggccaacgcctacgagttcatcatgaagctgccccagaagttcgacaccctggtgggcgagagaggcgcccagctgagcggcggccagaagcagagaatcgccatcgccagagccctggtgagaaaccccaagatcctgctgctggacgaggccaccagcgccctggacaccgagagcgaggccgaggtgcaggccgccctggacaaggccagagagggcagaaccaccatcgtgatcgcccacagactgagcaccgtgagaaacgccgacgtgatcgccggcttcgaggacggcgtgatcgtggagcagggcagccacagcgagctgatgaagaaggagggcgtgtacttcaagctggtgaacatgcagaccagcggcagccagatccagagcgaggagttcgagctgaacgacgagaaggccgccaccagaatggcccccaacggctggaagagcagactgttcagacacagcacccagaagaacctgaagaacagccagatgtgccagaagagcctggacgtggagaccgacggcctggaggccaacgtgccccccgtgagcttcctgaaggtgctgaagctgaacaagaccgagtggccctacttcgtggtgggcaccgtgtgcgccatcgccaacggcggcctgcagcccgccttcagcgtgatcttcagcgagatcatcgccatcttcggccccggcgacgacgccgtgaagcagcagaagtgcaacatcttcagcctgatcttcctgttcctgggcatcatcagcttcttcaccttcttcctgcagggcttcaccttcggcaaggccggcgagatcctgaccagaagactgagaagcatggccttcaaggccatgctgagacaggacatgagctggttcgacgaccacaagaacagcaccggcgccctgagcaccagactggccaccgacgccgcccaggtgcagggcgccaccggcaccagactggccctgatcgcccagaacatcgccaacctgggcaccggcatcatcatcagcttcatctacggctggcagctgaccctgctgctgctggccgtggtgcccatcatcgccgtgagcggcatcgtggagatgaagctgctggccggcaacgccaagagagacaagaaggagctggaggccgccggcaagatcgccaccgaggccatcgagaacatcagaaccgtggtgagcctgacccaggagagaaagttcgagagcatgtacgtggagaagctgtacggcccctacagagtgttcagcgccatcgtgttcggcgccgtggccctgggccacgccagcagcttcgcccccgactacgccaaggccaagctgagcgccgcccacctgttcatgctgttcgagagacagcccctgatcgacagctacagcgaggagggcctgaagcccgacaagttcgagggcaacatcaccttcaacgaggtggtgttcaactaccccaccagagccaacgtgcccgtgctgcagggcctgagcctggaggtgaagaagggccagaccctggccctggtgggcagcagcggctgcggcaagagcaccgtggtgcagctgctggagagattctacgaccccctggccggcaccgtgctgctggacggccaggaggccaagaagctgaacgtgcagtggctgagagcccagctgggcatcgtgagccaggagcccatcctgttcgactgcagcatcgccgagaacatcgcctacggcgacaacagcagagtggtgagccaggacgagatcgtgagcgccgccaaggccgccaacatccaccccttcatcgagaccctgccccacaagtacgagaccagagtgggcgacaagggcacccagctgagcggcggccagaagcagagaatcgccatcgccagagccctgatcagacagccccagatcctgctgctggacgaggccaccagcgccctggacaccgagagcgagaaggtggtgcaggaggccctggacaaggccagagagggcagaacctgcatcgtgatcgcccacagactgagcaccatccagaacgccgacctgatcgtggtgttccagaacggcagagtgaaggagcacggcacccaccagcagctgctggcccagaagggcatctacttcagcatggtgagcgtgcaggccggcacccagaacctgtag

SEQ ID NO: 200329 - DNA, 186 bp, Artificial Sequence
  derived and/or modified sequence
atggacctggaggccgccaagaacggcaccgcctggagacccaccagcgccgagggcgacttcgagctgggcatcagcagcaagcagaagagaaagaagaccaagaccgtgaagatgatcggcgtgctgaccctgttcagatacagcgactggcaggacaagctgttcatgagcctgggcacctag

SEQ ID NO: 200330 - DNA, 3699 bp, Artificial Sequence
  derived and/or modified sequence
atggaccttgaggccgctaagaatggaactgcatggcggcctaccagtgctgagggcgactttgaattggggatttcaagcaagcaaaaaagaaaaaagacaaaaactgtaaagatgatcggtgtcctgaccctctttcgctattcagactggcaggacaagttgtttatgtccctgggcactattatggcaatagcacatggctctggccttcccttgatgatgattgtatttggcgaaatgaccgacaagtttgtagacacggcagggaatttctcttttcctgtcaatttctcactgtcgctgctcaaccctggcaaaattcttgaagaggaaatgactcggtacgcttattactatagcggactgggcgctggagtcctggtagccgcatatattcaagtgagcttctggaccctggcagctggcagacagatcaggaaaatccgtcagaaattttttcacgccatcttacgtcaagagatcggctggttcgatattaatgatactaccgagctcaacacgagacttacagacgatatttcgaagatcagtgagggaatcggagataaagtcggaatgtttttccaggctgtcgccacctttttcgcaggttttatcgtgggatttatccgggggtggaagctgaccctggtgattatggcaatcagtccgattctagggctgagcgccgctgtgtgggcgaaaatcctgagcgcatttagcgacaaagagttagcagcctatgccaaagccggagccgtggccgaggaggctctgggcgccatcagaaccgtgatcgctttcgggggacagaataaggagctggaacgctaccaaaagcacttggaaaatgcgaaggaaattggtattaagaaggccatttccgccaatatcagcatgggaatcgccttcctgctaatctacgcttcctatgcccttgcattttggtatggatcaacactggtgatatccaaggagtacactatcggtaacgccatgacagtcttcttcagcatactaattggggcttttagcgtagggcaggctgccccctgcatagatgcattcgccaatgctcgaggggccgcctacgttatcttcgacattattgacaacaatcctaagatcgatagtttctctgagcggggtcataagcctgattctattaaagggaatctcgagtttaacgacgtccattttagttaccccagccgcgccaatgttaagatattgaagggcctgaacctcaaagtgcagagtggtcagactgtcgcacttgtgggatcatcaggctgtggtaaatcaacgaccgtccaactgatccagcgcctgtatgaccccgacgagggcacgattaacattgacgggcaggatatacgcaattttaatgtgaactatctccgggaaattatcggcgtggtgtcccaggagcctgtgctcttctccacgacgatcgccgaaaatatatgctatggtcgcggcaacgtgacaatggacgagattaaaaaagcagtcaaggaagccaatgcctacgaatttatcatgaagttgccccaaaagttcgatacactggtaggagaaagaggggctcagcttagcggaggccagaaacaacggattgccatcgctagagccttggtgcggaatccgaagatcctgctgctggatgaggctacaagtgccctggatacagagagtgaagcagaggttcaggcagctctggacaaagccagggaagggcgcacaactatcgtgattgcccaccggctcagtaccgttcgcaatgccgacgtgattgctggcttcgaggacggagttatagtagagcagggcagtcactcggagctgatgaaaaaagaaggcgtgtactttaagctcgttaacatgcagacgtcgggttcgcaaatacagtcagaggagtttgagcttaatgacgaaaaggcagctactcggatggctcctaacggctggaaaagtcgcctgtttcggcacagtacacaaaagaacctgaagaattctcagatgtgtcaaaagtccctggacgtagaaaccgatgggctagaggcgaatgttccacctgtgtcctttctaaaggtgctaaaattgaacaaaaccgaatggccgtacttcgttgtgggcacagtctgcgctatcgctaacggtgggctgcagcccgcattctctgtcatcttttccgagatcatcgcaatctttgggcccggtgacgatgcagtcaaacagcagaagtgtaatattttttcccttatttttctatttctgggaatcatcagtttctttacattcttcctgcagggtttcactttcggaaaagccggggaaatcctaaccaggcgactcaggtctatggccttcaaggctatgttaagacaggatatgagctggtttgacgaccacaagaattctaccggggccctgagcactaggctggccacggacgccgctcaggtccagggcgcaacaggcacaagactggcccttattgcccagaacatcgccaaccttggaacaggcattatcatctctttcatctatggttggcaacttacccttttgctattagccgtcgtgccgattattgcagtttcaggtattgtggagatgaaactcctggcgggaaatgcaaaaagggataagaaggaactcgaggctgcaggcaagattgcaacagaagcgattgaaaacatcaggacagtggtgagcctgacgcaggagcggaagttcgagagcatgtatgtggaaaaactgtatgggccttacagggtgttcagcgctatcgtgtttggtgcggtggctctgggccacgcgagttcgttcgcaccggattatgctaaggcaaagctgagcgctgcccacctctttatgctttttgagcggcagcctctgatagactcctatagcgaagaaggcctgaaacccgataaattcgagggaaacataacgttcaacgaggtggtttttaattacccaactcgagccaatgtccccgtactacagggcctctcacttgaagtcaagaaaggacagacgctggcacttgtgggatcttcagggtgcggtaagagcacggtggtgcaactcctagaacggttttatgacccactggcagggacggtgctcctagacgggcaggaggccaaaaagcttaacgtgcaatggctgcgggctcagttagggatcgtctcccaggaacccatcctgtttgactgttccatagccgagaatattgcctacggcgacaattcccgcgtggtgtcacaggatgagattgtgtcagccgccaaggccgccaacattcatcctttcatcgagaccctgccgcacaagtacgagactagagtgggggacaagggcacccagctgagcggaggccagaaacagagaatcgccattgctagggcactgatccggcagcctcagattctactcctagacgaggcaacttctgccctggacacagaatcggagaaggttgtgcaagaagctctggacaaggcccgagaaggccgcacttgtatcgtgatagcacacagactctcaaccatccaaaatgccgatttgattgtcgttttccaaaatggtcgggtgaaggaacatggcacacatcagcagttgctcgctcagaaaggaatctactttagcatggtgtctgtgcaagcgggaacccagaatctctag

SEQ ID NO: 200331 - DNA, 186 bp, Artificial Sequence
  derived and/or modified sequence
atggatctggaggcagccaaaaacggtacggcttggcgacctactagcgctgaaggggacttcgaactgggaatttcctcaaaacaaaaacgaaagaaaaccaagaccgtaaaaatgataggggtcctgactctgtttcgctattccgattggcaggacaagttgttcatgtcactcggcacatag

SEQ ID NO: 200332 - DNA, 3699 bp, Artificial Sequence
  derived and/or modified sequence
atggaccttgaagccgccaaaaacgggaccgcctggcggcccacttccgccgagggagattttgaacttggaatcagcagtaagcaaaaacgaaaaaaaacgaagacggtgaaaatgatcggagtgctgacactgtttcggtatagcgattggcaggacaagctgtttatgagtttaggaacgataatggccatcgcccatggcagtggcttaccactgatgatgatagtattcggagagatgaccgacaaattcgtggacaccgctggaaacttctcatttcccgtgaacttttctttgtccttacttaacccagggaaaatactggaggaggagatgacacgctacgcttactactatagcgggctgggcgctggcgtgctcgtcgctgcatacatccaggtgtccttttggacgctcgcagctggacgccagattaggaaaatccgccagaaattcttccacgcaatcctgagacaagaaattgggtggttcgacatcaatgataccaccgaactgaacaccagactgaccgacgacattagtaagatttccgaaggcatcggggataaagtggggatgtttttccaggcggttgccactttctttgccgggttcatcgtggggttcatccgaggctggaagcttactctggtgatcatggcgatatctccaattttaggactttcagcagccgtatgggccaaaattctatcagctttctccgataaagagcttgcagcctatgccaaagcaggcgctgtcgcagaagaagcattaggtgcaatcaggacagtaattgcattcggtggccagaacaaggaactggagcgataccagaagcatctggagaacgccaaggagatcggcattaagaaagccatcagcgctaatatcagcatgggaatagccttccttctcatctatgcttcctacgcgctggccttttggtacggctcaaccctcgtgatcagtaaggagtacacgatcggtaacgccatgactgtctttttctccatcttgattggtgctttcagcgtcgggcaggctgctccatgcattgacgccttcgcaaatgctcgtggcgccgcctacgttattttcgatattatagataacaaccccaagatcgattccttcagtgagaggggccataaacccgacagtattaagggcaacttagagtttaatgatgtgcacttttcttacccatctagagctaacgtgaagattctgaagggactgaacctcaaagtgcaaagcgggcagacagtggcgctagttggctcaagcggttgtgggaagagcaccacagtccagcttattcagcgcctgtatgatcccgatgagggcacaattaatatcgacgggcaagacattcggaactttaacgtgaattatctaagggagatcattggcgtggtctctcaagaacctgtgctgttttcaacaacaatcgccgaaaatatctgctacggacgcgggaacgtgacgatggatgaaataaaaaaagccgtcaaggaggctaatgcctatgagtttattatgaagctccctcagaaattcgacaccctagtgggggaaagaggggctcagctgagtggtggacagaagcagaggatagccattgccagagctcttgttaggaacccgaaaattttgctactcgatgaagccacaagcgccttggacactgagtctgaagctgaggtgcaggccgctctagataaagccagggagggacgcacgaccatcgtgatagcccaccgcctttccacagttcggaatgcggacgtgatcgccggattcgaagatggtgtaatcgtggagcagggatctcatagcgaattgatgaagaaagaaggagtctatttcaagctcgtgaacatgcagacctcaggctcccagatccagtctgaagagttcgaactgaatgatgaaaaggccgccacccgtatggctcccaacgggtggaaatcccggctttttaggcactctacgcaaaagaatcttaagaacagccagatgtgccaaaagtccctcgatgtcgaaacagacggcttagaagcaaacgtgcctccagtgtcatttcttaaggttctaaagctgaacaaaaccgagtggccttactttgtcgtgggcactgtgtgtgctatcgccaatggtggcctgcagcccgcctttagcgtcatcttttcggagattatcgccatcttcggacctggggatgatgccgtgaaacaacaaaaatgcaacattttctctctgatatttctgtttcttggaataatctctttttttaccttttttctgcaaggcttcaccttcggaaaagcaggcgagatcctgacgaggaggctgcgaagcatggcattcaaagctatgctccgtcaggatatgtcctggtttgatgaccacaagaactcaacgggcgctctgtcgacaaggttggcaactgacgcagctcaagttcagggagcaactggcacacgcttggctttgatagcccaaaatatcgcaaacttgggcacagggatcatcatatcatttatctacggatggcagttgacactgctgctgttagctgtggtgcctatcatagccgtctcaggtattgtggagatgaaattgctggccggtaacgccaaaagagacaaaaaggaattggaggcagccggcaagattgccactgaagcgatcgagaatattcgtacagtggttagcctgacacaggagcgtaagtttgaaagtatgtatgtcgagaagctatacgggccttatcgggtgttcagcgccatcgtctttggagcagttgccttgggccacgcttcttcattcgcccctgactacgcaaaggcgaagctatctgccgctcacctgtttatgctcttcgagagacagcctctgatagactcttattccgaagaaggcctaaagcctgacaagttcgagggaaatattacatttaatgaggtggtctttaattatcccaccagagctaatgtacccgtgctgcaagggctctcactggaggtaaagaaaggacagactttagccctggtagggagctctgggtgcgggaagagcactgtcgtccagctcctggaacgattctatgaccctctggccgggacagttcttctggatgggcaagaagcaaagaaactgaacgtgcagtggctgagggcacagcttggaatcgtgtcccaagaaccgatcctattcgactgttcaatcgcagaaaacattgcctatggagataattcgagggtagtgtcgcaggatgagattgtgagcgctgctaaagccgcaaacatccacccctttattgagacactgccccacaagtacgagacccgtgttggggacaaaggaacccaacttagcggtgggcaaaaacagcggatcgccatcgcccgcgcattgatccgacagcctcagatcctgctgctcgacgaggcaacctctgcactcgacactgaatctgaaaaggtcgtgcaggaagcacttgacaaggcacgcgagggcaggacatgtattgtcattgcccacagactgtccaccatccaaaatgccgatctaatagtggtcttccagaatggacgagtcaaggagcatggcacccatcagcagctactggcccaaaaaggcatatacttcagcatggtctccgttcaggctggcactcagaacctctag

SEQ ID NO: 200333 - DNA, 3826 bp, Artificial Sequence
  derived and/or modified sequence
caaagtccaggcccctctgctgcagcgcccgcgcgtccagaggccctgccagacacgcgcgaggttcgaggctgagatggatcttgaggcggcaaagaacggaacagcctggcgccccacgagcgcggagggcgactttgaactgggcatcagcagcaaacaaaaaaggaaaaaaacgaagacagtgaaaatgattggagtattaacattgtttcgatactccgattggcaggataaattgtttatgtcgctgggtaccatcatggccatagctcacggatcaggtctccccctcatgatgatagtatttggagagatgactgacaaatttgttgatactgcaggaaacttctcctttccagtgaacttttccttgtcgctgctaaatccaggcaaaattctggaagaagaaatgactagatatgcatattactactcaggattgggtgctggagttcttgttgctgcctatatacaagtttcattttggactttggcagctggtcgacagatcaggaaaattaggcagaagttttttcatgctattctacgacaggaaataggatggtttgacatcaacgacaccactgaactcaatacgcggctaacagatgacatctccaaaatcagtgaaggaattggtgacaaggttggaatgttctttcaagcagtagccacgttttttgcaggattcatagtgggattcatcagaggatggaagctcacccttgtgataatggccatcagccctattctaggactctctgcagccgtttgggcaaagatactctcggcatttagtgacaaagaactagctgcttatgcaaaagcaggcgccgtggcagaagaggctctgggggccatcaggactgtgatagctttcgggggccagaacaaagagctggaaaggtatcagaaacatttagaaaatgccaaagagattggaattaaaaaagctatttcagcaaacatttccatgggtattgccttcctgttaatatatgcatcatatgcactggccttctggtatggatccactctagtcatatcaaaagaatatactattggaaatgcaatgacagtttttttttcaatcctaattggagctttcagtgttggccaggctgccccatgtattgatgcttttgccaatgcaagaggagcagcatatgtgatctttgatattattgataataatcctaaaattgacagtttttcagagagaggacacaaaccagacagcatcaaagggaatttggagttcaatgatgttcacttttcttacccttctcgagctaacgtcaagatcttgaagggcctcaacctgaaggtgcagagtgggcagacggtggccctggttggaagtagtggctgtgggaagagcacaacggtccagctgatacagaggctctatgaccctgatgagggcacaattaacattgatgggcaggatattaggaactttaatgtaaactatctgagggaaatcattggtgtggtgagtcaggagccggtgctgttttccaccacaattgctgaaaatatttgttatggccgtggaaatgtaaccatggatgagataaagaaagctgtcaaagaggccaacgcctatgagtttatcatgaaattaccacagaaatttgacaccctggttggagagagaggggcccagctgagtggtgggcagaagcagaggatcgccattgcacgtgccctggttcgcaaccccaagatccttctgctggatgaggccacgtcagcattggacacagaaagtgaagctgaggtacaggcagctctggataaggccagagaaggccggaccaccattgtgatagcacaccgactgtctacggtccgaaatgcagatgtcatcgctgggtttgaggatggagtaattgtggagcaaggaagccacagcgaactgatgaagaaggaaggggtgtacttcaaacttgtcaacatgcagacatcaggaagccagatccagtcagaagaatttgaactaaatgatgaaaaggctgccactagaatggccccaaatggctggaaatctcgcctatttaggcattctactcagaaaaaccttaaaaattcacaaatgtgtcagaagagccttgatgtggaaaccgatggacttgaagcaaatgtgccaccagtgtcctttctgaaggtcctgaaactgaataaaacagaatggccctactttgtcgtgggaacagtatgtgccattgccaatggggggcttcagccggcattttcagtcatattctcagagatcatagcgatttttggaccaggcgatgatgcagtgaagcagcagaagtgcaacatattctctttgattttcttatttctgggaattatttctttttttactttcttccttcagggtttcacgtttgggaaagctggcgagatcctcaccagaagactgcggtcaatggcttttaaagcaatgctaagacaggacatgagctggtttgatgaccataaaaacagtactggtgcactttctacaagacttgccacagatgctgcccaagtccaaggagccacaggaaccaggttggctttaattgcacagaatatagctaaccttggaactggtattatcatatcatttatctacggttggcagttaaccctattgctattagcagttgttccaattattgctgtgtcaggaattgttgaaatgaaattgttggctggaaatgccaaaagagataaaaaagaactggaagctgctggaaagattgcaacagaggcaatagaaaatattaggacagttgtgtctttgacccaggaaagaaaatttgaatcaatgtatgttgaaaaattgtatggaccttacagggtgttttctgcaattgtatttggtgcagtggctctaggacatgccagttcatttgctccagactatgctaaagctaagctgtctgcagcccacttattcatgctgtttgaaagacaacctctgattgacagctacagtgaagaggggctgaagcctgataaatttgaaggaaatataacatttaatgaagtcgtgttcaactatcccacccgagcaaacgtgccagtgcttcaggggctgagcctggaggtgaagaaaggccagacactagccctggtgggcagcagtggctgtgggaagagcacggtggtccagctcctggagcggttctacgaccccttggcggggacagtgcttctcgatggtcaagaagcaaagaaactcaatgtccagtggctcagagctcaactcggaatcgtgtctcaggagcctatcctatttgactgcagcattgccgagaatattgcctatggagacaacagccgggttgtatcacaggatgaaattgtgagtgcagccaaagctgccaacatacatcctttcatcgagacgttaccccacaaatatgaaacaagagtgggagataaggggactcagctctcaggaggtcaaaaacagaggattgctattgcccgagccctcatcagacaacctcaaatcctcctgttggatgaagctacatcagctctggatactgaaagtgaaaaggttgtccaagaagccctggacaaagccagagaaggccgcacctgcattgtgattgctcaccgcctgtccaccatccagaatgcagacttaatagtggtgtttcagaatgggagagtcaaggagcatggcacgcatcagcagctgctggcacagaaaggcatctatttttcaatggtcagtgtccaggctgggacacagaacttatgaacttttgctacagtatattttaaaaataaattcaaattattctaccatttt

SEQ ID NO: 200334 - DNA, 3699 bp, Artificial Sequence
  derived and/or modified sequence
atggatcttgaggcggcaaagaacggaacagcctggcgccccacgagcgcggagggcgactttgaactgggcatcagcagcaaacaaaaaaggaaaaaaacgaagacagtgaaaatgattggagtattaacattgtttcgatactccgattggcaggataaattgtttatgtcgctgggtaccatcatggccatagctcacggatcaggtctccccctcatgatgatagtatttggagagatgactgacaaatttgttgatactgcaggaaacttctcctttccagtgaacttttccttgtcgctgctaaatccaggcaaaattctggaagaagaaatgactagatatgcatattactactcaggattgggtgctggagttcttgttgctgcctatatacaagtttcattttggactttggcagctggtcgacagatcaggaaaattaggcagaagttttttcatgctattctacgacaggaaataggatggtttgacatcaacgacaccactgaactcaatacgcggctaacagatgacatctccaaaatcagtgaaggaattggtgacaaggttggaatgttctttcaagcagtagccacgttttttgcaggattcatagtgggattcatcagaggatggaagctcacccttgtgataatggccatcagccctattctaggactctctgcagccgtttgggcaaagatactctcggcatttagtgacaaagaactagctgcttatgcaaaagcaggcgccgtggcagaagaggctctgggggccatcaggactgtgatagctttcgggggccagaacaaagagctggaaaggtatcagaaacatttagaaaatgccaaagagattggaattaaaaaagctatttcagcaaacatttccatgggtattgccttcctgttaatatatgcatcatatgcactggccttctggtatggatccactctagtcatatcaaaagaatatactattggaaatgcaatgacagtttttttttcaatcctaattggagctttcagtgttggccaggctgccccatgtattgatgcttttgccaatgcaagaggagcagcatatgtgatctttgatattattgataataatcctaaaattgacagtttttcagagagaggacacaaaccagacagcatcaaagggaatttggagttcaatgatgttcacttttcttacccttctcgagctaacgtcaagatcttgaagggcctcaacctgaaggtgcagagtgggcagacggtggccctggttggaagtagtggctgtgggaagagcacaacggtccagctgatacagaggctctatgaccctgatgagggcacaattaacattgatgggcaggatattaggaactttaatgtaaactatctgagggaaatcattggtgtggtgagtcaggagccggtgctgttttccaccacaattgctgaaaatatttgttatggccgtggaaatgtaaccatggatgagataaagaaagctgtcaaagaggccaacgcctatgagtttatcatgaaattaccacagaaatttgacaccctggttggagagagaggggcccagctgagtggtgggcagaagcagaggatcgccattgcacgtgccctggttcgcaaccccaagatccttctgctggatgaggccacgtcagcattggacacagaaagtgaagctgaggtacaggcagctctggataaggccagagaaggccggaccaccattgtgatagcacaccgactgtctacggtccgaaatgcagatgtcatcgctgggtttgaggatggagtaattgtggagcaaggaagccacagcgaactgatgaagaaggaaggggtgtacttcaaacttgtcaacatgcagacatcaggaagccagatccagtcagaagaatttgaactaaatgatgaaaaggctgccactagaatggccccaaatggctggaaatctcgcctatttaggcattctactcagaaaaaccttaaaaattcacaaatgtgtcagaagagccttgatgtggaaaccgatggacttgaagcaaatgtgccaccagtgtcctttctgaaggtcctgaaactgaataaaacagaatggccctactttgtcgtgggaacagtatgtgccattgccaatggggggcttcagccggcattttcagtcatattctcagagatcatagcgatttttggaccaggcgatgatgcagtgaagcagcagaagtgcaacatattctctttgattttcttatttctgggaattatttctttttttactttcttccttcagggtttcacgtttgggaaagctggcgagatcctcaccagaagactgcggtcaatggcttttaaagcaatgctaagacaggacatgagctggtttgatgaccataaaaacagtactggtgcactttctacaagacttgccacagatgctgcccaagtccaaggagccacaggaaccaggttggctttaattgcacagaatatagctaaccttggaactggtattatcatatcatttatctacggttggcagttaaccctattgctattagcagttgttccaattattgctgtgtcaggaattgttgaaatgaaattgttggctggaaatgccaaaagagataaaaaagaactggaagctgctggaaagattgcaacagaggcaatagaaaatattaggacagttgtgtctttgacccaggaaagaaaatttgaatcaatgtatgttgaaaaattgtatggaccttacagggtgttttctgcaattgtatttggtgcagtggctctaggacatgccagttcatttgctccagactatgctaaagctaagctgtctgcagcccacttattcatgctgtttgaaagacaacctctgattgacagctacagtgaagaggggctgaagcctgataaatttgaaggaaatataacatttaatgaagtcgtgttcaactatcccacccgagcaaacgtgccagtgcttcaggggctgagcctggaggtgaagaaaggccagacactagccctggtgggcagcagtggctgtgggaagagcacggtggtccagctcctggagcggttctacgaccccttggcggggacagtgcttctcgatggtcaagaagcaaagaaactcaatgtccagtggctcagagctcaactcggaatcgtgtctcaggagcctatcctatttgactgcagcattgccgagaatattgcctatggagacaacagccgggttgtatcacaggatgaaattgtgagtgcagccaaagctgccaacatacatcctttcatcgagacgttaccccacaaatatgaaacaagagtgggagataaggggactcagctctcaggaggtcaaaaacagaggattgctattgcccgagccctcatcagacaacctcaaatcctcctgttggatgaagctacatcagctctggatactgaaagtgaaaaggttgtccaagaagccctggacaaagccagagaaggccgcacctgcattgtgattgctcaccgcctgtccaccatccagaatgcagacttaatagtggtgtttcagaatgggagagtcaaggagcatggcacgcatcagcagctgctggcacagaaaggcatctatttttcaatggtcagtgtccaggctgggacacagaacttatga

SEQ ID NO: 200335 - DNA, 3699 bp, Artificial Sequence
  derived and/or modified sequence
atggacctggaggccgccaagaatggaacagcctggaggcccaccagcgctgagggggactttgagctgggcatcagcagcaagcagaagaggaagaagaccaagacagtgaagatgattggagtgctgaccctcttccgctacagcgactggcaggacaagctgttcatgagcctgggcaccatcatggccatcgcccacggcagcggcctgcccctgatgatgattgtgtttggagagatgacagacaagtttgtggacacagctggcaacttctccttccctgtgaacttcagcctgagcctgctgaaccctgggaagatcctggaggaggagatgaccaggtatgcctactactacagcggcctgggcgccggcgtgctggtggccgcctacatccaggtgtccttctggaccctggccgccggccggcagatcaggaagatccggcagaagttcttccacgccatcctgcggcaggagatcggctggtttgacatcaatgacaccacagagctgaacacccggctgacagatgacatcagcaagatcagcgagggcatcggggacaaggtgggcatgttcttccaggccgtggccaccttctttgctggcttcatcgtgggcttcatccggggctggaagctgaccctggtgatcatggccatcagccccatcctgggcctgtctgctgctgtgtgggccaagatcctgagcgccttcagtgacaaggagctggccgcctatgccaaggccggggctgtggccgaggaggccctgggcgccatcagaacagtgattgcctttggaggccagaacaaggagctggagcgctaccagaagcacctggagaatgccaaggagatcggcatcaagaaggccatcagcgccaacatctccatgggcatcgccttcctgctgatctatgccagctatgccctggccttctggtacggcagcaccctggtgatcagcaaggagtacaccatcggaaatgccatgacagtgttcttcagcatcctgattggagccttctctgtgggccaggccgccccctgcattgatgcctttgccaatgcccggggagctgcctacgtgatctttgacatcatcgacaacaaccccaagattgacagcttcagcgagcggggccacaagccagacagcatcaagggcaacctggagttcaatgatgtgcacttctcctaccccagccgggccaacgtgaagatcctgaagggcctgaacctgaaggtgcagagcggccagacagtggccctggtgggcagcagcggctgcggcaagagcaccaccgtgcagctgatccagaggctgtatgaccctgatgagggcaccatcaacattgatggccaggacatccggaacttcaacgtgaactacctgcgggagatcatcggcgtggtgtcccaggagcctgtgctcttcagcaccaccatcgccgagaacatctgctacggcagaggaaatgtgaccatggatgagatcaagaaggctgtgaaggaggccaatgcctatgagttcatcatgaagctgccccagaagtttgacaccctggtgggggagcggggggcccagctgagcggcggccagaagcagagaattgccatcgcccgggccctggtgaggaaccccaagatcctgctgctggatgaggccaccagcgccctggacacagaaagtgaagctgaggtgcaggccgccctggacaaggcccgggagggccgcaccaccatcgtgattgcccaccggctgagcacagtgagaaatgctgatgtgattgctggctttgaagatggagtcatcgtggagcagggcagccacagcgagctgatgaagaaggagggcgtgtacttcaagctggtgaacatgcagaccagcggcagccagatccagagcgaggagtttgagctgaatgatgagaaggccgccaccaggatggcccccaacggctggaagagccgcctcttccgccacagcacccagaagaacctgaagaacagccagatgtgccagaagagcctggatgtggagacagatggcctggaggccaacgtgccccctgtgtccttcctgaaggtgctgaagctgaacaagacagagtggccctactttgtggtgggcaccgtgtgtgccatcgccaatggaggcctgcagcctgccttcagcgtcatcttcagcgagatcatcgccatctttggacctggagatgatgctgtgaagcagcagaagtgcaacatcttcagcctcatcttcctgttcctgggcatcatctccttcttcaccttcttcctgcagggcttcaccttcggcaaggccggggagatcctgacccggcggctgcgctccatggccttcaaggccatgctgcggcaggacatgtcctggtttgatgaccacaagaacagcactggagccctgagcacccggctggccacagatgctgcccaggtgcagggcgccaccggcacccggctggccctgattgcccagaacatcgccaacctgggcaccggcatcatcatctccttcatctacggctggcagctgaccctgctgctgctggccgtggtgcccatcatcgctgtgtctggcatcgtggagatgaagctgctggccggaaatgccaagagggacaagaaggagctggaggccgccggcaagatcgccacagaggccatcgagaacatcagaacagtggtgtccctgacccaggagaggaagtttgagagcatgtatgtggagaagctgtatggcccctacagagtcttcagcgccatcgtgtttggagctgtggccctgggccacgccagcagctttgccccagactatgccaaggccaagctgtctgctgcccacctgttcatgctgtttgagcggcagcccctgattgacagctacagcgaggagggcctgaagccagacaagtttgagggcaacatcaccttcaatgaggtggtgttcaactaccccacccgggccaacgtgcctgtgctgcagggcctgagcctggaggtgaagaagggccagaccctggccctggtgggcagcagcggctgtgggaagagcacagtggtgcagctgctggagcgcttctatgaccccctggccggcaccgtgctgctggatggccaggaggccaagaagctgaatgtgcagtggctgcgggcccagctgggcatcgtgtcccaggagcccatcctgtttgactgcagcattgctgaaaatattgcctatggagacaacagccgggtggtgtcccaggatgaaattgtgtctgctgccaaggccgccaacatccaccccttcatcgagaccctgccccacaagtatgagaccagggtgggggacaagggcacccagctgagcggcggccagaagcagagaattgccatcgcccgggccctgatccggcagccccagatcctgctgctggatgaggccaccagcgccctggacacagagagcgagaaggtggtgcaggaggccctggacaaggcccgggagggccgcacctgcatcgtcatcgcccaccggctgagcaccatccagaatgctgacctgattgtggtgttccagaatggccgggtgaaggagcacggcacccaccagcagctgctggcccagaagggcatctacttctccatggtgtctgtgcaggccggcacccagaacctgtag

SEQ ID NO: 200336 - DNA, 186 bp, Artificial Sequence
  derived and/or modified sequence
atggacctggaggccgccaagaatggaacagcctggaggcccaccagcgctgagggggactttgagctgggcatcagcagcaagcagaagaggaagaagaccaagacagtgaagatgattggagtgctgaccctcttccgctacagcgactggcaggacaagctgttcatgagcctgggcacctag

SEQ ID NO: 200337 - DNA, 3699 bp, Artificial Sequence
  derived and/or modified sequence
atggacctggaggccgccaagaacggcaccgcctggcggcccaccagtgccgaaggagatttcgagttggggatctcaagcaagcagaagcgaaaaaaaaccaaaaccgtgaagatgataggcgtgttgacactgtttagatactccgattggcaagacaagctatttatgtcactcggcactatcatggccatagcccacgggagcgggctgccactgatgatgatcgtattcggggagatgacagataagttcgtagatacagccggaaacttctcattccccgtcaatttctctctgtctctgctcaatcctggcaagattctcgaagaagaaatgacaaggtatgcctactactattctggtctgggggcgggggtgctcgtcgcagcatacatccaagtcagcttctggactctcgcagccggtaggcaaatcaggaagattcgccagaaatttttccacgctatactgagacaggaaattggatggttcgatattaacgataccactgaactgaacacacgcctgacggacgatatttcgaagatcagcgaggggattggcgacaaggtaggcatgtttttccaagccgttgcaaccttcttcgctggattcattgttggtttcatccggggctggaaactgacactcgttatcatggctatcagtccgattctggggttatcagccgccgtgtgggccaagatactgtctgctttttccgataaggagctggctgcttatgctaaggccggtgccgtggctgaggaggccttaggagcgattcggaccgttatcgcgtttggtggacagaataaagagctcgagcgctatcagaagcaccttgagaatgcaaaagagattggtattaaaaaggccattagtgctaatattagcatgggaatcgcctttctattaatttacgccagctacgctctggctttttggtatggttccacgcttgtcattagcaaagagtacacaatcggcaacgccatgactgtgttcttttcaattctgataggcgcttttagcgttgggcaggccgccccctgcattgatgccttcgcaaatgctcgcggggccgcttacgtcattttcgacatcattgataacaatcccaagatcgacagcttttctgagcgagggcataaaccagatagcataaaaggtaacctcgaatttaatgatgtgcacttcagctatccctccagagctaacgtcaagatcctgaaggggctgaatttgaaggttcagtccggccaaaccgtcgctcttgtgggtagctctgggtgcggaaagagcactaccgtccagctgattcagcgcttgtatgatcctgacgaagggacaataaacatagatggccaggacattcggaatttcaacgttaattaccttcgggagataattggcgtggtttctcaggaacccgtccttttctccacaacaattgccgaaaatatctgctatgggcgaggtaacgtcactatggacgaaattaagaaggctgtaaaagaggccaacgcctatgagtttattatgaagctgcctcagaagtttgatacgctggtcggcgagaggggtgcgcaactgtctggcggacagaagcaacgcatcgctatcgcaagagctctagtgcggaatccgaaaatcttactgcttgatgaagccacctccgccctggatacggagagtgaggcagaagtgcaggcggctctagataaagctcgagagggaaggacaaccatcgtaattgcacacaggctgtctactgtccggaatgcggacgtcatcgccgggtttgaggacggtgtgatagtggagcaaggcagccactccgaactgatgaaaaaagaaggggtctactttaagctcgtgaatatgcagactagcggtagtcagattcagagcgaggaatttgagctgaacgacgaaaaggccgccacgagaatggcccctaacggttggaaatctagattgttccggcattcgacacagaaaaaccttaaaaattcccaaatgtgccaaaagtcactggacgtggagaccgatggcctggaggcaaacgtgcctcctgtgtcatttttaaaggtcctgaagctgaacaaaacagagtggccctactttgtcgtgggaaccgtgtgtgctatcgcaaacggtggccttcagcctgccttctctgtcatcttctctgagattatcgctatcttcggaccaggagacgacgccgtgaaacaacagaaatgcaatattttcagtctgatttttctatttctgggtattatttcattttttactttctttctgcaaggcttcacctttggaaaggctggggaaattttgactcgccgactgagaagtatggcattcaaggccatgttacgtcaggacatgagttggtttgacgaccacaaaaatagcacgggcgccctatctacccgcttggccaccgacgctgcccaggttcaaggagcgaccggtactagactggccctaatagcgcaaaacatcgcgaatctgggcaccggcattatcatctcttttatttatggctggcagctgaccctgctgttgttggcagtggttcctatcatcgcggtttcaggaattgtcgaaatgaaattactcgctggaaatgccaagcgagataaaaaggagcttgaggcagccggtaaaatcgctactgaagcgatcgagaacattcgaaccgtggtcagtctaactcaggaaaggaagttcgaaagcatgtacgtggagaagctctacggtccttatcgggtgttctccgcgatcgtgttcggcgctgtggccctgggacacgcatctagcttcgcccccgactatgctaaggctaagctcagtgcggcccatttgtttatgctcttcgagcgccagcccctgatcgacagctattccgaagagggccttaaaccagataaattcgagggaaatattactttcaacgaggttgtgttcaactacccaacgcgggctaatgtgccggtgctgcagggcctgtctttggaagtgaagaaagggcaaacactggcactcgtgggcagtagcggatgcggcaagagcacagtggtgcagttgctggagaggttttatgatcccctcgcgggaaccgtgcttctggatggacaagaagccaagaaactcaatgtgcagtggctgcgggcacaattgggcattgtctctcaggagccaatcctttttgactgcagtattgctgaaaacattgcttatggcgacaacagtcgggtggttagccaggatgagatcgtctctgctgccaaggccgcgaacatacatcccttcattgaaactctccctcacaaatacgagacacgcgtgggcgacaaaggcacccagctctcaggaggccagaagcagcgcattgccatcgccagagctttgatcaggcagccgcagatcctgctgctggacgaagccaccagtgcgctagacaccgaatcggagaaagtggtgcaggaagcccttgacaaggcgcgggaaggaaggacctgtatagtgatagcccacagactgtccactatccagaatgctgatctgatcgtcgtgtttcagaatggcagagtcaaagaacacggcacgcatcagcaactgctcgcgcagaaaggaatttacttctccatggtttctgtgcaggctgggacccagaacctatag

SEQ ID NO: 200338 - DNA, 186 bp, Artificial Sequence
  derived and/or modified sequence
atggacctggaggccgccaagaacggcaccgcctggcggcccacctctgcagagggggactttgagctgggcatttcatcaaaacagaagaggaaaaagaccaaaaccgtgaagatgatcggggtgctgactttgttcagatactcggattggcaggacaagttgttcatgagcctggggacatag

SEQ ID NO: 200339 - DNA, 3699 bp, Artificial Sequence
  derived and/or modified sequence
atggacctggaggccgccaagaacggcaccgcctggcggcccacctccgccgaaggggatttcgaattgggtattagctctaaacagaaaagaaagaagactaagaccgtaaagatgatcggagtgttgactctcttcagatacagtgattggcaagataagctgtttatgtcccttggtaccatcatggcaattgcccatgggtctggactgccgctgatgatgattgtgttcggtgagatgaccgacaagttcgtggacacagccggcaacttctcgttccccgtgaacttctccctctcgctgcttaatccaggaaagatcctggaggaggaaatgacacgttatgcatactattattctggactgggggccggtgtgctcgtagcggcctatatacaggttagcttctggaccctcgctgcgggacggcagattcgaaaaataagacagaagttctttcatgcgattctgcgacaagaaattggatggttcgacatcaacgatacaactgagcttaatactcggctaaccgatgatatcagcaagatttccgagggcatcggggataaagttggaatgttcttccaggccgttgcaacattcttcgccggatttatagtcggtttcatacgaggatggaagctgacattggtgatcatggccattagtccgatcttaggtctatccgccgctgtatgggctaaaattctctccgctttttccgacaaggagcttgcagcttacgcaaaagccggggctgtggccgaggaagccctcggggccattcgtactgtcattgcattcggcggtcagaacaaggagctcgaacgctatcagaagcacttagagaacgccaaggaaatcggcatcaagaaggccattagcgcaaacatctctatgggcatagctttcctgctaatttacgcaagctacgctctggcgttttggtatggtagtaccctggttatctccaaggagtacaccataggtaacgctatgaccgttttctttagtatacttatcggcgcttttagcgtgggacaggcagccccctgtattgacgcgtttgccaatgctaggggcgcagcctacgtgattttcgacataattgacaacaatcccaaaatagattcctttagcgagcgtggtcataagcccgattcaattaaaggcaaccttgagtttaatgacgtccacttctcgtatccctcacgagccaacgttaagatactgaagggactaaacctgaaggtccaatcgggtcaaactgtcgctctggttggttcctctggatgtggaaaaagtacaacggttcagctaattcagcggctgtacgaccctgacgagggaaccataaacatcgacggccaggacattaggaattttaatgtgaactacctgcgagagatcattggcgtggtgagtcaggaacctgttctgttttctacaacgatcgcagagaatatctgttacggcaggggcaacgtgacgatggatgagatcaaaaaggccgtgaaagaagcgaacgcttatgagtttatcatgaagctcccgcagaagttcgacacacttgtgggggagcgaggggctcagctgtctgggggtcagaagcagagaattgcaatcgctcgagcactcgtccggaatcctaaaatcctgctgctggacgaggccaccagcgcactggacactgagtccgaggctgaggtgcaagccgccttggataaggccagagaggggcggactaccatcgtgatcgcacatagactatcaaccgtgcggaatgcggatgtcatcgcaggatttgaagacggagtgattgttgaacagggatcgcactcagagctgatgaaaaaagagggggtgtactttaagctcgtaaatatgcagacctcagggagccagatacaaagcgaagaatttgagttgaatgacgagaaagcggccaccagaatggctcctaacggatggaagagccgccttttcaggcacagtacacagaaaaatctcaagaattctcagatgtgtcagaaatctttggacgtggaaaccgatgggctggaggccaacgtgcctcccgtgtctttcctgaaagtgctcaaattgaacaaaacagaatggccgtactttgtggtaggaacggtctgtgccattgccaacgggggcctccagcccgccttcagtgtcatcttctccgagataattgcaattttcggcccaggagatgacgccgtaaaacagcaaaagtgtaacattttcagcctaatattcctgtttctgggtatcatcagcttctttacatttttcctacagggcttcacctttgggaaagccggtgaaatcctcactcggcgactccgctccatggccttcaaggctatgctgagacaggacatgtcatggtttgacgaccacaaaaattcaaccggagctctgagcacacggcttgcaaccgatgccgctcaggtacagggggctacaggaacccgccttgcgctcatcgcccagaacatcgcgaacttagggactggcataatcatctcttttatctatgggtggcaacttaccctcctgttgctggccgttgttcccattatagcagtaagtggcattgtggagatgaagcttcttgcggggaatgcgaaaagagataaaaaggaattagaggcagccgggaagatcgcaaccgaggctattgagaatattcgcaccgtcgtgtctcttacccaggagagaaagttcgagtcaatgtacgtcgaaaaactgtacgggccctacagagttttctctgcaatagtgtttggggcagtggctctcggtcacgcctctagttttgctcccgactatgcaaaagcaaagctgtcggccgcacatcttttcatgctttttgaaagacaaccactgatagacagctattctgaggagggattgaaaccagacaagttcgaggggaatatcactttcaatgaggtggtgttcaattatccaacacgggcgaatgtgcctgtgctgcagggactgagtctggaagtcaagaagggccaaacccttgcactggttggctcaagcggttgtggcaagagtacagtcgttcagctccttgaacgattttatgacccacttgcaggtaccgtgctgctggatggccaggaagcaaagaaactgaacgtccagtggctgcgagcccagttggggattgtgtcccaggaaccaatactgttcgattgctccatcgcagaaaacatagcctacggagacaactcccgggtggtgtcccaggatgagatcgtctcagctgcaaaagccgcaaacatacacccatttatagaaacactgccccacaaatatgagacacgagtcggtgacaaggggactcagctgagcgggggtcagaaacagcggattgcgatcgcgagggctctgatcagacagcctcagattctgctgctcgatgaagctaccagcgccctggataccgaaagtgaaaaagtcgtccaggaggcacttgacaaggcacgagaggggagaacttgcattgtcattgcccaccggttgtccacaatccagaacgccgatttgatcgtggtgtttcagaatgggagggtgaaagagcacgggacacatcagcagctgcttgcccagaaggggatctatttttccatggtaagtgtgcaggccggtacacagaatctgtag

SEQ ID NO: 200340 - DNA, 3699 bp, Artificial Sequence
  derived and/or modified sequence
atggacctagaggctgcgaagaatggcactgcttggcgccctacatctgcggaaggggattttgaactcggcataagctcaaagcagaagcggaagaaaaccaaaacagtaaaaatgatcggagttctgacactctttagatacagcgattggcaggataaattattcatgtctttaggtacaattatggcgatagcacatgggtccggcctgccacttatgatgattgtgttcggtgagatgaccgacaaatttgtggacactgccggtaacttcagcttcccggtgaacttttcactttccctgctgaatcccggaaaaatcttggaggaagagatgacacggtacgcctattactactcggggctgggggcaggagtgcttgtagcagcctacatccaggtgtccttttggacactggctgccggtaggcagatccgaaagattcgccaaaagttcttccatgccatattgagacaagaaattggctggttcgacataaacgatactactgagttgaacacacggcttactgacgatatctccaagatctcagaagggattggcgataaagtgggaatgttcttccaggccgtcgcgacattcttcgcagggttcatagtgggattcatcagggggtggaagctgaccctggtgataatggcgatttcccctatcttaggtctatctgctgccgtttgggctaagattctgtcagcctttagtgataaagagttggccgcatatgccaaagccggagctgtggcagaagaggctcttggtgccatcagaaccgtaatagctttcggcggacagaacaaggagctggaacgctatcagaaacatcttgaaaacgccaaggagatcgggatcaaaaaggctatttccgctaatatctccatgggaattgcctttctgctgatctatgcctcctacgctctcgcattctggtatggaagtactctggtcatcagtaaggagtacacaatcggaaatgccatgacggtgttctttagtatcctgatcggagccttttccgtgggacaagctgcaccatgcattgatgctttcgccaacgctaggggcgcagcttacgtgattttcgacattatagacaataatccaaagatcgattcattttccgagagagggcacaagcccgattcgattaagggaaacctggagttcaacgatgtccacttttcgtacccaagcagagcaaatgtgaaaattctgaaaggattaaatcttaaagtgcagagtggccagactgtggcccttgtgggttcttctggatgcgggaaatctacaaccgtgcagctaattcaacgcctgtacgaccccgacgaggggactatcaatatcgatggccaggatattcgtaactttaacgtcaactacctgagagagatcatcggcgttgtgagtcaagagcctgtactcttctccaccactatcgcagaaaatatctgttatggacggggtaacgtgactatggatgaaatcaagaaggctgtcaaggaagccaatgcatacgaattcattatgaaactgcctcaaaagtttgatacactggtgggggaacggggagctcagttgtccgggggacagaaacagcgaatcgcgattgcacgggctttagttcggaaccccaagattttgcttctggatgaggcaacatccgctctcgatactgagtcggaggcagaggtgcaggccgcacttgataaagcgagggaaggccgtaccaccatcgtgatcgcccatagactctcaacggtgcgcaacgcagatgttattgccggttttgaagacggggtgattgtggagcaggggtcacacagcgagctcatgaaaaaggagggagtatactttaagcttgtgaacatgcagaccagcggatcccagatacagtccgaggaatttgaacttaatgacgagaaagccgctactaggatggctccaaacgggtggaaatctcgactttttcggcacagtacccaaaagaacctcaaaaattcacagatgtgtcagaagtcccttgatgttgagacagatgggctggaagccaacgtccccccagtttcatttctgaaggtgttgaagctcaacaaaactgagtggccttatttcgtcgtagggacagtttgcgccatcgcaaacgggggattgcaaccagcattttccgtgatcttttctgaaatcatcgcaatctttgggcctggtgatgacgctgtgaaacaacaaaagtgcaacattttttcactgatctttctattcttgggcatcatttccttttttacttttttcctgcagggcttcacgttcgggaaagccggagagatcctgaccaggcggttgaggtccatggcattcaaggctatgcttagacaagatatgtcctggttcgatgaccataaaaacagcaccggcgctttaagcacccgactcgccacagatgctgcacaggttcagggagcaactgggactcggctcgccttaattgctcaaaacatcgccaatctagggaccggcataatcatctctttcatctacggctggcaacttacgttgctgttgttagccgtagtacccataatagctgtctctggtattgtggagatgaagctgctggcgggaaacgcgaagcgagacaagaaggagcttgaagccgctggaaagatcgccactgaagcaatcgaaaacatccgtaccgtggtgtccttaacacaggaacgcaaattcgaaagcatgtacgttgaaaagctgtatgggccttacagggtgtttagcgctatagtattcggcgctgttgcacttggccacgcctcaagctttgcgcctgactacgctaaggccaaactgtcagccgcacatctttttatgttattcgaacggcagccactaattgatagctactctgaggagggactaaagcccgacaaatttgagggtaatataaccttcaacgaggtcgtgttcaactaccctacccgtgctaatgtacctgtgctgcaaggattgagcttggaagttaagaaaggacagactctggcccttgtaggttcgagcggttgcggcaagtccacagttgtgcagttactagaaaggttttatgatcccctggctggtactgtccttcttgatggacaggaagccaaaaagcttaatgtccagtggctcagggctcagcttgggatcgtgagccaggagcccattctctttgactgcagcattgccgaaaatatcgcatacggcgataactcccgggtcgtgagccaggacgagatcgtaagcgccgcaaaagctgcaaacattcaccccttcattgaaacacttccccacaagtacgagactagggtgggtgacaagggtacccaactgagtggtgggcagaaacaacgcatcgctatcgccagggctctgattcgccagcctcagatcctgctgctagacgaggccacctccgccctggacaccgagtccgaaaaggttgtgcaggaggctttggacaaggccagagaaggaaggacgtgcattgtcatcgcacatcgattatcaaccattcaaaatgccgatctgattgtcgtttttcagaatggcagagtaaaggaacacggtactcaccagcagctgctagctcaaaagggaatatacttctcaatggtaagtgtccaggccggaacgcagaatctctag

SEQ ID NO: 200341 - DNA, 186 bp, Artificial Sequence
  derived and/or modified sequence
atggatctggaagctgccaagaatggcaccgcttggcgtccaacttccgcagaaggagattttgagttaggaattagctccaagcagaagaggaaaaaaacaaagacagtgaagatgatcggcgtactgaccctgtttcgatattccgactggcaagacaagctctttatgagtcttgggacatag

SEQ ID NO: 200342 - DNA, 3699 bp, Artificial Sequence
  derived and/or modified sequence
atggacttggaagccgcaaaaaatggtaccgcgtggagacccacatcggctgagggcgattttgagttaggaattagctcaaaacagaagaggaagaaaacaaagaccgtaaaaatgattggggtcttgacgctgtttcgctactccgattggcaagacaaacttttcatgtccctgggaacaataatggccattgcacacggttccgggctgccgctcatgatgattgtatttggagaaatgacggacaaatttgtggacaccgcagggaacttttcctttccagtcaatttctcactctccctgctcaatccaggcaaaattttggaagaagagatgacacgatacgcctattattactccgggctgggggctggagtcctagtggctgcatatatccaggtctcattctggaccctggccgctggtcggcagatccgcaagatcagacaaaagttcttccatgcaatattaagacaagagatcggttggtttgatattaatgataccaccgagctgaatactcggctgacggatgacatttccaagatatcagagggcatcggggataaggttggaatgtttttccaggccgtagcaacatttttcgccggtttcatagttggtttcatccgcggttggaagcttacgctagtgataatggccatctcaccaatattaggattaagtgcagcagtctgggccaagatcttgtccgcattctccgataaggaactggctgcctatgcaaaagcaggtgcagtggccgaggaggccttaggtgcaattagaactgtcattgctttcggaggacagaataaggaactggagcgatatcagaagcacctagaaaacgcaaaagagatagggattaaaaaagccatttccgctaacattagcatgggaatcgcgttcctgctgatttacgcaagctacgctctggcattctggtatggcagcacgttagttatttctaaggaatatacaattggaaacgccatgacagtgtttttttccatcctgatcggggcattctctgtcggtcaggctgccccttgcatcgatgccttcgcaaatgctcgtggggctgcttacgtgatcttcgatattattgacaacaaccctaagatcgattctttcagcgagcgcggacacaagcctgattctataaagggcaatttggagttcaatgatgtgcatttctcctacccttctcgcgctaacgtgaaaatactgaaggggctgaacttgaaggtgcagagcgggcaaacagttgccctggtggggagcagtggctgcgggaaaagcactaccgttcagctgatccaacgcttatacgaccccgacgagggcaccatcaatatcgacggacaagatattcgaaacttcaacgtgaattatctgcgggagatcattggagtggtatctcaggaaccggtgcttttctcaactaccattgccgaaaacatctgctacggcagagggaacgtgacaatggatgagatcaagaaagcagtgaaagaggcaaacgcgtatgagtttattatgaagttgcctcaaaaattcgacaccctagtgggtgagagaggggctcaactgtcagggggacagaaacagagaatcgcgatcgcacgcgcactcgtacggaatcccaaaatactcctgctggacgaggctacgtccgccctcgatacagaaagcgaagccgaggtgcaggcagccctggacaaggcgcgtgagggcaggactacaatcgttattgctcatcgactgtccaccgtacgaaacgccgatgtaatcgctgggttcgaagatggggttattgttgagcagggctcacactccgaacttatgaagaaggaaggcgtgtacttcaaactagttaatatgcaaacaagtggatcacagatccagagcgaggagtttgagttgaatgacgaaaaggctgcaaccaggatggctcctaatggatggaaatcacgacttttcaggcactctacccaaaagaatctcaagaattcccagatgtgtcagaaaagcctggatgtggaaacggacggactagaggcgaatgtgccacctgtgtcttttctcaaggtccttaagctgaataaaacagaatggccctactttgtggtgggcactgtgtgcgccattgccaacggtggccttcagccagcgttctccgtgatcttctctgaaatcattgcaatttttggcccaggcgacgacgccgtgaaacaacagaaatgcaatatatttagtctgatcttcctattcctgggcattatctcattttttacattctttctgcagggatttactttcggcaaagccggtgaaattctgacaaggaggctgaggagtatggctttcaaggcgatgcttcgtcaggacatgtcctggttcgacgaccacaaaaatagcaccggcgcattgagcacccgccttgcaacagacgcagctcaagtgcagggagctacaggcactcggctggcattaatcgctcagaatatcgccaatctgggcactggcattataatttcattcatctacggttggcaactcaccctcctgctcttggcagtggttcccattatcgccgtatctggcatagtggagatgaagctcctagcaggaaacgccaagagggacaagaaagaactcgaggccgcaggcaaaattgccacggaagccattgagaacatcaggacggtcgtcagcttgactcaagagaggaagttcgaaagcatgtatgtagaaaagctgtatggcccatacagggtgttctctgccattgtgttcggagctgtggcccttggacatgcctcttcttttgcacctgactacgctaaagcaaagctaagtgccgctcatttgttcatgctgtttgagcggcaaccccttatcgatagctactcagaggaagggttgaagccagataaattcgagggcaatatcaccttcaacgaggtcgtgttcaactatccgacgagagctaatgtgcctgtcttgcaggggctgagcctggaggtaaagaagggtcagactctggcacttgttggatccagtggctgtgggaaatcaacagttgtgcagcttctcgagcggttttacgatcccctggctgggaccgtgctgctggatggacaggaagcaaaaaagcttaatgttcagtggctcagagcccagttgggaattgtgtcccaggagcctatcctgttcgattgcagcatcgctgagaatattgcctacggagacaatagcagggtcgtgtcccaggacgagatcgttagtgctgccaaagcggcaaatatccacccattcatcgaaaccttgccccacaagtatgagaccagagtcggggataaaggcacacagttatcaggaggacagaagcagcgcattgctatagcgagagcgctcattaggcagccccaaatactgctcttagacgaggccacttcagctctggacacagaatcagagaaggtggtgcaggaggcactggacaaagctcgagaaggtaggacatgcatcgttatcgcccataggttaagtactatacagaatgcagatctgatcgttgtctttcaaaatggaagggtgaaggagcacggtacacaccagcagcttctggctcagaaagggatatacttcagcatggtgtctgtccaagccggaacccagaacctgtag

SEQ ID NO: 200343 - protein, 211 aa, Artificial Sequence
  derived and/or modified sequence
MQAIKCVVVGDGAVGKTCLLISYTTNAFPGEYIPTVFDNYSANVMVDGKPVNLGLWDTAGQEDYDRLRPLSYPQTVGETYGKDITSRGKDKPIADVFLICFSLVSPASFENVRAKWYPEVRHHCPNTPIILVGTKLDLRDDKDTIEKLKEKKLTPITYPQGLAMAKEIGAVKYLECSALTQRGLKTVFDEAIRAVLCPPPVKKRKRKCLLL

SEQ ID NO: 200344 - DNA, 636 bp, Artificial Sequence
  derived and/or modified sequence
atgcaggccatcaagtgcgtggtggtgggcgacggcgccgtgggcaagacctgcctgctgatcagctacaccaccaacgccttccccggcgagtacatccccaccgtgttcgacaactacagcgccaacgtgatggtggacggcaagcccgtgaacctgggcctgtgggacaccgccggccaggaggactacgacagactgagacccctgagctacccccagaccgtgggcgagacctacggcaaggacatcaccagcagaggcaaggacaagcccatcgccgacgtgttcctgatctgcttcagcctggtgagccccgccagcttcgagaacgtgagagccaagtggtaccccgaggtgagacaccactgccccaacacccccatcatcctggtgggcaccaagctggacctgagagacgacaaggacaccatcgagaagctgaaggagaagaagctgacccccatcacctacccccagggcctggccatggccaaggagatcggcgccgtgaagtacctggagtgcagcgccctgacccagagaggcctgaagaccgtgttcgacgaggccatcagagccgtgctgtgccccccccccgtgaagaagagaaagagaaagtgcctgctgctgtag

SEQ ID NO: 200345 - DNA, 636 bp, Artificial Sequence
  derived and/or modified sequence
atgcaggctattaagtgtgtggtggtgggagatggtgccgttggcaagacctgcctcctgatctcatacaccaccaacgccttcccgggcgagtatataccaaccgtgttcgacaattactccgccaatgtcatggtggatggaaaacctgttaatctcgggttatgggatacagctggacaggaagattacgatagactgcgacctctgagttatccccaaaccgtcggagagacatatggtaaggatatcacaagcaggggaaaggataagccaatagcagatgttttccttatctgtttctccctcgtcagtcctgctagcttcgagaacgtgcgggccaagtggtaccccgaggtccggcaccattgcccgaatacccccatcattctcgtcggcacaaaactggacctcagggatgacaaggacaccattgaaaagttgaaggagaaaaaacttacacctattacatacccgcagggactggcgatggctaaggagataggcgccgtgaaatatctggagtgttccgcactgacccagagggggctaaaaacggtgttcgacgaggccattagagctgtgctatgtcccccgcctgttaaaaagaggaaaagaaaatgcttgctgttgtag

SEQ ID NO: 200346 - DNA, 636 bp, Artificial Sequence
  derived and/or modified sequence
atgcaggccatcaagtgtgtggtggtgggagatggagctgtgggcaagacctgcctgctgatctcctacaccaccaatgccttccctggagagtacatccccaccgtgtttgacaactacagcgccaacgtgatggtggatggcaagcctgtgaacctgggcctgtgggacacagctggccaggaggactatgaccggctgcggcccctgagctacccccagacagtgggggagacctacggcaaggacatcaccagccggggcaaggacaagcccatcgcagatgtgttcctgatctgcttcagcctggtgtccccagccagctttgaaaatgtgcgggccaagtggtacccagaggtgcgccaccactgccccaacacccccatcatcctggtgggcaccaagctggacctgagagatgacaaggacaccatcgagaagctgaaggagaagaagctgacccccatcacctacccccagggcctggccatggccaaggagatcggggctgtgaagtacctggagtgcagcgccctgacccagaggggcctgaagacagtgtttgatgaggccatccgggctgtgctgtgccccccacctgtgaagaagaggaagaggaagtgcctgctgctgtag

SEQ ID NO: 200347 - DNA, 636 bp, Artificial Sequence
  derived and/or modified sequence
atgcaggccatcaagtgcgtggtggtgggcgacggcgccgtgggcaagacgtgtctcctgatctcctacacaacaaatgcattccccggtgagtacataccgactgttttcgataattatagcgcaaacgtaatggtcgatgggaagccagtaaatctgggactctgggataccgcaggccaggaggactacgataggctccgcccactgtcctaccctcagacggtgggggagacttatggcaaggatattacctccaggggaaaagataaaccaattgcggatgtgtttctgatttgtttcagcctggtgtcgcccgcctctttcgagaacgtgagggcaaaatggtacccagaggttaggcatcattgccctaacacacccataatactggtggggaccaagctggacctgagagacgataaagacacgatcgagaaactgaaagagaagaaacttacccccatcacctatcctcagggcctcgctatggccaaagaaataggagctgtaaagtacttggaatgcagcgctcttacccaacgcggcttaaagacagtttttgatgaagcaatccgtgccgtcttgtgtcctccgccggtcaagaagcggaagaggaagtgtctcctcctttag

SEQ ID NO: 200348 - DNA, 636 bp, Artificial Sequence
  derived and/or modified sequence
atgcaggctataaagtgtgtggtggtgggggacggagccgtcggcaaaacctgcctgcttatcagttacaccactaatgcattcccaggcgagtatatacctaccgtgttcgataattattcggcaaatgtcatggtggacggtaagcctgtcaacctaggtctttgggacaccgcgggacaagaggattatgacaggctcaggccgttaagttatccccagactgtcggggaaacctatggcaaagatataacgtccagggggaaggataagcctatcgctgacgttttcctgatctgcttcagccttgttagccccgcttcatttgagaacgtgagggccaagtggtatccagaggtaaggcatcattgtcccaataccccgatcatcctggtgggtaccaaactggatcttagagacgataaagacaccattgagaagctgaaggagaagaaactcaccccaataacctacccacagggtcttgctatggcaaaagagattggcgctgttaagtacctcgaatgcagcgctcttacccagagaggcttgaagactgtgtttgacgaggctatccgcgcagtactgtgccctcccccagtgaaaaagagaaaacgcaaatgcctgctgctctag

SEQ ID NO: 200349 - DNA, 907 bp, Artificial Sequence
  derived and/or modified sequence
agttttcctcagctttgggtggtggccgctgccgggcatcggcttccagtccgcggagggcgaggcggcgtggacagcggccccggcacccagcgccccgccgcccgcaagccgcgcgcccgtccgccgcgccccgagcccgccgcttcctatctcagcgccctgccgccgccgccgcggcccagcgagcggccctgatgcaggccatcaagtgtgtggtggtgggagacggagctgtaggtaaaacttgcctactgatcagttacacaaccaatgcatttcctggagaatatatccctactgtctttgacaattattctgccaatgttatggtagatggaaaaccggtgaatctgggcttatgggatacagctggacaagaagattatgacagattacgccccctatcctatccgcaaacagttggagaaacgtacggtaaggatataacctcccggggcaaagacaagccgattgccgatgtgttcttaatttgcttttcccttgtgagtcctgcatcatttgaaaatgtccgtgcaaagtggtatcctgaggtgcggcaccactgtcccaacactcccatcatcctagtgggaactaaacttgatcttagggatgataaagacacgatcgagaaactgaaggagaagaagctgactcccatcacctatccgcagggtctagccatggctaaggagattggtgctgtaaaatacctggagtgctcggcgctcacacagcgaggcctcaagacagtgtttgacgaagcgatccgagcagtcctctgcccgcctcccgtgaagaagaggaagagaaaatgcctgctgttgtaaatgtctcagcccctcgttcttggtcctgtcccttggaacctttgtacgctttgctcaaaaaaaaacaaaaaaaa

SEQ ID NO: 200350 - protein, 1111 aa, Artificial Sequence
  derived and/or modified sequence
MPALWLGCCLCFSLLLPAARATSRREVCDCNGKSRQCIFDRELHRQTGNGFRCLNCNDNTDGIHCEKCKNGFYRHRERDRCLPCNCNSKGSLSARCDNSGRCSCKPGVTGARCDRCLPGFHMLTDAGCTQDQRLLDSKCDCDPAGIAGPCDAGRCVCKPAVTGERCDRCRSGYYNLDGGNPEGCTQCFCYGHSASCRSSAEYSVHKITSTFHQDVDGWKAVQRNGSPAKLQWSQRHQDVFSSAQRLDPVYFVAPAKFLGNQQVSYGQSLSFDYRVDRGGRHPSAHDVILEGAGLRITAPLMPLGKTLPCGLTKTYTFRLNEHPSNNWSPQLSYFEYRRLLRNLTALRIRATYGEYSTGYIDNVTLISARPVSGAPAPWVEQCICPVGYKGQFCQDCASGYKRDSARLGPFGTCIPCNCQGGGACDPDTGDCYSGDENPDIECADCPIGFYNDPHDPRSCKPCPCHNGFSCSVMPETEEVVCNNCPPGVTGARCELCADGYFGDPFGEHGPVRPCQPCQCNNNVDPSASGNCDRLTGRCLKCIHNTAGIYCDQCKAGYFGDPLAPNPADKCRACNCNPMGSEPVGCRSDGTCVCKPGFGGPNCEHGAFSCPACYNQVKIQMDQFMQQLQRMEALISKAQGGDGVVPDTELEGRMQQAEQALQDILRDAQISEGASRSLGLQLAKVRSQENSYQSRLDDLKMTVERVRALGSQYQNRVRDTHRLITQMQLSLAESEASLGNTNIPASDHYVGPNGFKSLAQEATRLAESHVESASNMEQLTRETEDYSKQALSLVRKALHEGVGSGSGSPDGAVVQGLVEKLEKTKSLAQQLTREATQAEIEADRSYQHSLRLLDSVSRLQGVSDQSFQVEEAKRIKQKADSLSSLVTRHMDEFKRTQKNLGNWKEEAQQLLQNGKSGREKSDQLLSRANLAKSRAQEALSMGNATFYEVESILKNLREFDLQVDNRKAEAEEAMKRLSYISQKVSDASDKTQQAERALGSAAADAQRAKNGAGEALEISSEIEQEIGSLNLEANVTADGALAMEKGLASLKSEMREVEGELERKELEFDTNMDAVQMVITEAQKVDTRAKNAGVTIQDTLNTLDGLLHLMGM

SEQ ID NO: 200351 - DNA, 3336 bp, Artificial Sequence
  derived and/or modified sequence
atgccagcgctgtggctgggttgttgcctatgcttttccctgcttctcccagctgcccgggccaccagcaggagagaagtgtgtgattgtaacggaaaatccaggcagtgcatctttgatcgcgagctgcatcggcagactggcaatggctttaggtgcctgaactgtaacgataacaccgatggaattcattgcgaaaagtgcaaaaacgggttctataggcatcgggagcgagataggtgtctaccttgtaattgtaattccaaaggctcattgagcgcccggtgtgacaactcgggacgctgtagctgtaagccaggggtaacaggggctagatgtgatagatgtcttcctgggttccacatgctgaccgacgcgggatgcactcaagaccagcgtctcctggatagtaaatgtgattgcgaccctgctggcattgccggaccctgtgatgcaggcagatgcgtgtgtaaaccagccgtcactggcgaacgctgcgatcgttgtaggtccgggtactacaatctggacggtggaaacccagaaggctgcactcagtgcttttgttacggacactccgccagctgtcggtcttctgccgaatacagcgttcacaaaataacgagcaccttccaccaagacgtggacggatggaaggccgtacagcgaaacggatcacctgctaaactacagtggagccagaggcaccaggatgtgttctcttccgctcagagacttgacccagtctactttgtcgcgccagcgaagttcctgggcaatcagcaggtgtcttatggccaatcattatcttttgactaccgggtcgatcggggcggcaggcatccaagcgctcatgacgtgatactagagggcgccggattgaggataacagcaccgctaatgcccctgggcaagacgctaccatgtggcctgacgaagacctacacctttaggttgaatgagcatcccagcaacaattggtcaccccagttaagttactttgagtatcggcgactactgaggaatctgactgccttacgcattcgcgctacctatggggagtacagtacaggatacattgataatgtgacgctgattagtgctcggccagtctccggtgccccggcaccatgggtggagcagtgcatttgtccagtcggttataagggtcagttttgtcaggattgcgcctccggctacaaaagagacagtgccaggcttggaccattcggcacatgcataccctgtaactgccagggcggcggggcctgtgatccggatactggcgactgctattcaggtgatgagaaccctgacatcgagtgtgctgactgcccaatcggattctacaatgatccccatgatccacggagctgtaagccatgtccttgccataacggcttctcttgtagcgtcatgcccgagaccgaggaggtggtttgcaataattgccctccgggagtgacaggtgcgagatgcgaactgtgcgctgatggatactttggggacccttttggagaacacggtcccgtgaggccatgtcaaccctgccagtgcaacaataacgtggacccttccgctagcgggaactgcgaccggctgactggacgctgcctgaagtgcatccacaacactgctggcatctactgtgaccagtgtaaggccggatattttggggaccctttggctcccaacccagctgacaagtgtcgagcctgcaattgtaatcctatggggtcagaacccgtgggatgcagaagcgacgggacgtgcgtctgtaaaccaggttttggcggacctaactgcgaacatggcgcattttcttgtcctgcatgctataatcaagtgaagattcagatggaccaattcatgcaacaactgcaaaggatggaagcactgatatctaaggcacagggtggtgacggcgtggtcccagataccgagctggaagggcggatgcagcaggctgaacaggctctccaagatattctcagagacgcccaaatctccgagggcgcctcccgatccctcggcctgcaacttgccaaggttcgcagccaggagaacagttaccagtctcgcctggacgacctgaagatgaccgtggagcgggtccgggcactaggatcccagtatcagaaccgggtccgcgacacccatcgactcataacacagatgcaactgtccctggctgagtccgaggcgtccctggggaataccaacatcccagcctccgatcactacgtcggacctaacgggttcaagagtctggcacaggaagccacacggttagcggagagccatgtggaatccgcctcaaacatggagcaactaacgcgagaaaccgaggactacagcaaacaggccttgtcccttgtgaggaaagcgcttcatgaaggagtggggtccggttcagggtctcctgacggtgccgtggtgcagggacttgtggaaaagctggagaagactaaaagcttggcccagcagttgacccgagaggcaacccaggctgagatcgaagccgatcgtagctatcaacacagcctacgcttgctggacagcgtgtctcggctgcagggggtctccgaccagtcttttcaagtggaggaagctaagcgtatcaagcaaaaggctgactcactctcatctctggtgacacggcatatggatgagtttaagagaacccagaagaatttgggaaactggaaagaagaagcacagcagctgctgcagaacggcaaatcgggccgggagaagtccgaccagctgctcagccgggcaaatctggctaaatccagggcccaggaagcgcttagcatgggaaatgctactttttatgaagtggagtcgatccttaagaatctcagggagtttgacttacaggtcgataaccggaaggctgaggctgaagaggccatgaaacggctctcctacatctcccaaaaggtaagcgatgcctctgataagacgcaacaggccgagcgagcattgggctcggctgcagctgatgctcagagggccaaaaatggcgccggagaagctctggagattagcagcgaaatcgaacaggaaataggaagcctgaacctggaggcaaatgtcaccgctgatggggctttggcaatggagaagggcctggcgagcctgaaatccgagatgcgcgaggtggagggagagctggaaagaaaggagttagagttcgataccaatatggacgccgtccaaatggtcatcactgaggcacagaaagtggacacccgtgctaaaaatgcaggcgtcacaatccaggatactctgaacaccttggacggcttgctgcatctgatgggaatgtag

SEQ ID NO: 200352 - DNA, 3033 bp, Artificial Sequence
  derived and/or modified sequence
atgccagctctttggctcggctgttgcctctgtttctcgctattgctgcctgctgcccgagcgacttccagacgggaggtttgcgattgtaacggaaagtcacggcagtgtatctttgatcgagagctgcacaggcaaaccggcaacggtttcaggtgtctgaactgcaacgacaacacggacggtattcactgcgagaaatgcaagaacggcttctacaggcaccgggaaagagaccgatgcttgccctgcaattgtaacagcaagggctcactgtcagcgagatgtgacaacagcgggcggtgcagctgcaagcctggtgtgaccggagccagatgtgaccgctgcctcccaggcttccatatgctcaccgacgcggggtgcacacaggatcagcggctgctggatagtaagtgcgactgcgacccagcgggaattgccggtccttgcgatgctgggcggtgcgtgtgcaagccagccgttacaggagaacggtgcgaccggtgcaggagcgggtactacaacctggacggtggaaaccccgaaggctgcacacaatgtttctgctacggtcattcggcctcatgtcgcagctcggctgagtatagtgtacacaagattacaagtacatttcaccaagacgtcgacggatggaaggccgtccaacgaaacggttctccagctaaactgcagtggagtcagcgacatcaggatgtgttcagtagcgctcagcggctggatcccgtgtatttcgtagcaccagccaagttcttaggcaaccagcaggtgtcctacggccagtctctttccttcgactacagagtggatagagggggccgacaccccagtgcccacgatgttatccttgagggcgccggactgcgcatcacagcgcccctgatgccactcggcaagactctgccttgtggattgacaaagacctataccttccggctgaatgaacatccttccaataattggtcaccccagctgtcttattttgaatacagacgcctgctgcgcaacctgaccgctctccgcattcgcgctacctatggagagtatagcactggatatatcgacaatgttacgcttatttctgccagacccgtgtccggggcccctgcaccctgggtggagcagtgcatttgccccgtggggtataagggtcaattttgccaggactgcgccagcggttacaaacgcgacagcgcgagactgggcccctttggaacctgtattccatgcaactgtcagggaggtggcgcttgtgaccccgatactggagattgctattccggagacgagaatcccgatatcgaatgcgccgattgtccaatcgggttctataatgacccacatgacccccgctcatgcaagccctgcccttgccacaacggatttagctgtagtgtgatgcctgagaccgaagaagtcgtgtgcaataactgtcctcctggtgtaaccggcgcgcggtgcgagctttgcgccgatggctacttcggagatccgtttggtgaacatggacctgtgcgaccctgtcagccctgtcaatgtaacaacaacgtcgatccttcagcgagcgggaattgcgaccgcctgacgggtcgatgccttaaatgtatccacaacactgcaggcatttactgcgatcaatgcaaggctgggtattttggtgatccacttgccccgaacccagccgataaatgccgagcctgcaattgtaacccaatggggtcagagcccgtgggctgccggtccgatggtacctgcgtctgcaaacccggcttcggcggcccaaattgtgaacacggcgcgtttagctgtccggcttgttacaaccaggtcaagatccagatggaccagttcatgcagcagctgcagaggatggaggccctcatcagtaaggcccaaggaggagacggcgttgtacctgatactgaactcgaagggcgcatgcagcaggcggagcaggccctccaggacatcttacgcgacgcacagataagcgagggggccagcaggtccctagggctccaattggctaaggtgagaagtcaggagaactcctatcagagtcgcttggacgatctgaagatgactgtcgagcgtgtcagagcactgggtagtcagtaccaaaatcgagtcagagacacacatcggcttatcacgcagatgcagctaagccttgccgaaagtgaggctagcctggggaacacaaatatcccagccagcgatcactacgtgggcccgaacgggtttaagtccttggcccaggaggctactagactggccgaatctcacgtggagtcagcttccaatatggagcagcttactagagaaacagaagattactctaagcaggccctgagtcttgtgcgtaaggccctgcacgagggagttggctcaggctctggctcacctgatggagccgtggtgcagggcctcgttgaaaagctggaaaagactaaatccctggcccagcagctcacccgggaagcaacacaggccgaaattgaggcagaccgttcctatcagcatagcctgcgcttgctggatagcgtgtccaggctgcagggggtgtctgaccagagctttcaggtcgaagaagcgaagcgaatcaaacaaaaggccgattccctctccagcctcgtgacgagacatatggatgaatttaaacgtacacagaagaatctgggaaactggaaagaggaggcccagcagctgctccagaatggaaaaagcggcagggagaagtccgatcagctgttgagtcgggctaatctcgctaaatcccgcgctcaggaggctcttagcatggggaacgccactttttatgaggtggaaagcatcttaaaaaacttgcgggaattcgacttgcaagtagacaaccgtaaggctgaggcttttcccagccaggatcccgaccagcaacccaccgccgcccatgacgtccgagcaggaagagagggtacttcggctgaggggccgccaccgttcgctggcgataagcatcgttgggactcaggctag

SEQ ID NO: 200353 - DNA, 4313 bp, Artificial Sequence
  derived and/or modified sequence
accacctgatcaaggaaaaggaaggcacagcggagcgcagagtgagaaccaccaaccgaggcgccgggcagcgacccctgcagcggagacagagactgagcggcccggccccgccatgcctgcgctctggctgggctgctgcctctgcttctcgctcctcctgcccgcagcccgggccacctccaggagggaagtctgtgattgcaatgggaagtccaggcagtgtatctttgatcgggaacttcacagacaaactggtaatggattccgctgcctcaactgcaatgacaacactgatggcattcactgcgagaagtgcaagaatggcttttaccggcacagagaaagggaccgctgtttgccctgcaattgtaactccaaaggttctcttagtgctcgatgtgacaactccggacggtgcagctgtaaaccaggtgtgacaggagccagatgcgaccgatgtctgccaggcttccacatgctcacggatgcggggtgcacccaagaccagagactgctagactccaagtgtgactgtgacccagctggcatcgcagggccctgtgacgcgggccgctgtgtctgcaagccagctgtcactggagaacgctgtgataggtgtcgatcaggttactataatctggatggggggaaccctgagggctgtacccagtgtttctgctatgggcattcagccagctgccgcagctctgcagaatacagtgtccataagatcacctctacctttcatcaagatgttgatggctggaaggctgtccaacgaaatgggtctcctgcaaagctccaatggtcacagcgccatcaagatgtgtttagctcagcccaacgactagaccctgtctattttgtggctcctgccaaatttcttgggaatcaacaggtgagctatggtcaaagcctgtcctttgactaccgtgtggacagaggaggcagacacccatctgcccatgatgtgattctggaaggtgctggtctacggatcacagctcccttgatgccacttggcaagacactgccttgtgggctcaccaagacttacacattcaggttaaatgagcatccaagcaataattggagcccccagctgagttactttgagtatcgaaggttactgcggaatctcacagccctccgcatccgagctacatatggagaatacagtactgggtacattgacaatgtgaccctgatttcagcccgccctgtctctggagccccagcaccctgggttgaacagtgtatatgtcctgttgggtacaaggggcaattctgccaggattgtgcttctggctacaagagagattcagcgagactggggccttttggcacctgtattccttgtaactgtcaagggggaggggcctgtgatccagacacaggagattgttattcaggggatgagaatcctgacattgagtgtgctgactgcccaattggtttctacaacgatccgcacgacccccgcagctgcaagccatgtccctgtcataacgggttcagctgctcagtgatgccggagacggaggaggtggtgtgcaataactgccctcccggggtcaccggtgcccgctgtgagctctgtgctgatggctactttggggacccctttggtgaacatggcccagtgaggccttgtcagccctgtcaatgcaacaacaatgtggaccccagtgcctctgggaattgtgaccggctgacaggcaggtgtttgaagtgtatccacaacacagccggcatctactgcgaccagtgcaaagcaggctacttcggggacccattggctcccaacccagcagacaagtgtcgagcttgcaactgtaaccccatgggctcagagcctgtaggatgtcgaagtgatggcacctgtgtttgcaagccaggatttggtggccccaactgtgagcatggagcattcagctgtccagcttgctataatcaagtgaagattcagatggatcagtttatgcagcagcttcagagaatggaggccctgatttcaaaggctcagggtggtgatggagtagtacctgatacagagctggaaggcaggatgcagcaggctgagcaggcccttcaggacattctgagagatgcccagatttcagaaggtgctagcagatcccttggtctccagttggccaaggtgaggagccaagagaacagctaccagagccgcctggatgacctcaagatgactgtggaaagagttcgggctctgggaagtcagtaccagaaccgagttcgggatactcacaggctcatcactcagatgcagctgagcctggcagaaagtgaagcttccttgggaaacactaacattcctgcctcagaccactacgtggggccaaatggctttaaaagtctggctcaggaggccacaagattagcagaaagccacgttgagtcagccagtaacatggagcaactgacaagggaaactgaggactattccaaacaagccctctcactggtgcgcaaggccctgcatgaaggagtcggaagcggaagcggtagcccggacggtgctgtggtgcaagggcttgtggaaaaattggagaaaaccaagtccctggcccagcagttgacaagggaggccactcaagcggaaattgaagcagataggtcttatcagcacagtctccgcctcctggattcagtgtctcggcttcagggagtcagtgatcagtcctttcaggtggaagaagcaaagaggatcaaacaaaaagcggattcactctcaagcctggtaaccaggcatatggatgagttcaagcgtacacagaagaatctgggaaactggaaagaagaagcacagcagctcttacagaatggaaaaagtgggagagagaaatcagatcagctgctttcccgtgccaatcttgctaaaagcagagcacaagaagcactgagtatgggcaatgccactttttatgaagttgagagcatccttaaaaacctcagagagtttgacctgcaggtggacaacagaaaagcagaagctgaagaagccatgaagagactctcctacatcagccagaaggtttcagatgccagtgacaagacccagcaagcagaaagagccctggggagcgctgctgctgatgcacagagggcaaagaatggggccggggaggccctggaaatctccagtgagattgaacaggagattgggagtctgaacttggaagccaatgtgacagcagatggagccttggccatggaaaagggactggcctctctgaagagtgagatgagggaagtggaaggagagctggaaaggaaggagctggagtttgacacgaatatggatgcagtacagatggtgattacagaagcccagaaggttgataccagagccaagaacgctggggttacaatccaagacacactcaacacattagacggcctcctgcatctgatgggtatgtgaacccacaacccacaaccttccagctccatgctccagggctttgctccagaacactcactatacctagccccagcaaaggggagtctcagctttccttaaggatatcagtaaatgtgctttgtttccaggcccagataactttcggcaggttcccttacatttactggaccctgttttaccgttgctaagatgggtcactgaacacctattgcacttgggggtaaaggtctgtgggccaaagaacaggtgtatataagcaacttcacagaacacgagacagcttgggaatcctgctaaagagtctggcctggaccctgagaagccagtggacagttttaagcagaggaataacatcaccactgtatatttcagaaagatcactagggcagccgagtggaggaaagcttgaagagggggttagagagaaggcaggttgagactacttaagatattgttgaaataattgaagagagaaatgacaggagcctgctctaaggcagtagaatggtggctgggaagatgtgaaggaagattttcccagtctgtgaagtcaagaatcacttgccggccgggtgtggtggctcacgcctgtaattctagcactttgggagactgaagcgggtggatcacccgaggtcaggagttgaagaccagcctggccaacatggtgaaaccctgtctctactaaaagtacaaaaattagctggatgtggtggtgggcgcctgtaattccagctactcaggagtctgaggcaggagaatcgcttgaacccaggaggcggaggttacagtgagccaagattgcaccactgctctccagcctggggaacagagcaagactgtctcaaaaaaaaaaaaaaaa

SEQ ID NO: 200354 - DNA, 4345 bp, Artificial Sequence
  derived and/or modified sequence
agagtgagaaccaccaaccgaggcgccgggcagcgacccctgcagcggagacagagactgagcggcccggccccgccatgcctgcgctctggctgggctgctgcctctgcttctcgctcctcctgcccgcagcccgggccacctccaggagggaagtctgtgattgcaatgggaagtccaggcagtgtatctttgatcgggaacttcacagacaaactggtaatggattccgctgcctcaactgcaatgacaacactgatggcattcactgcgagaagtgcaagaatggcttttaccggcacagagaaagggaccgctgtttgccctgcaattgtaactccaaaggttctcttagtgctcgatgtgacaactccggacggtgcagctgtaaaccaggtgtgacaggagccagatgcgaccgatgtctgccaggcttccacatgctcacggatgcggggtgcacccaagaccagagactgctagactccaagtgtgactgtgacccagctggcatcgcagggccctgtgacgcgggccgctgtgtctgcaagccagctgtcactggagaacgctgtgataggtgtcgatcaggttactataatctggatggggggaaccctgagggctgtacccagtgtttctgctatgggcattcagccagctgccgcagctctgcagaatacagtgtccataagatcacctctacctttcatcaagatgttgatggctggaaggctgtccaacgaaatgggtctcctgcaaagctccaatggtcacagcgccatcaagatgtgtttagctcagcccaacgactagaccctgtctattttgtggctcctgccaaatttcttgggaatcaacaggtgagctatggtcaaagcctgtcctttgactaccgtgtggacagaggaggcagacacccatctgcccatgatgtgattctggaaggtgctggtctacggatcacagctcccttgatgccacttggcaagacactgccttgtgggctcaccaagacttacacattcaggttaaatgagcatccaagcaataattggagcccccagctgagttactttgagtatcgaaggttactgcggaatctcacagccctccgcatccgagctacatatggagaatacagtactgggtacattgacaatgtgaccctgatttcagcccgccctgtctctggagccccagcaccctgggttgaacagtgtatatgtcctgttgggtacaaggggcaattctgccaggattgtgcttctggctacaagagagattcagcgagactggggccttttggcacctgtattccttgtaactgtcaagggggaggggcctgtgatccagacacaggagattgttattcaggggatgagaatcctgacattgagtgtgctgactgcccaattggtttctacaacgatccgcacgacccccgcagctgcaagccatgtccctgtcataacgggttcagctgctcagtgatgccggagacggaggaggtggtgtgcaataactgccctcccggggtcaccggtgcccgctgtgagctctgtgctgatggctactttggggacccctttggtgaacatggcccagtgaggccttgtcagccctgtcaatgcaacaacaatgtggaccccagtgcctctgggaattgtgaccggctgacaggcaggtgtttgaagtgtatccacaacacagccggcatctactgcgaccagtgcaaagcaggctacttcggggacccattggctcccaacccagcagacaagtgtcgagcttgcaactgtaaccccatgggctcagagcctgtaggatgtcgaagtgatggcacctgtgtttgcaagccaggatttggtggccccaactgtgagcatggagcattcagctgtccagcttgctataatcaagtgaagattcagatggatcagtttatgcagcagcttcagagaatggaggccctgatttcaaaggctcagggtggtgatggagtagtacctgatacagagctggaaggcaggatgcagcaggctgagcaggcccttcaggacattctgagagatgcccagatttcagaaggtgctagcagatcccttggtctccagttggccaaggtgaggagccaagagaacagctaccagagccgcctggatgacctcaagatgactgtggaaagagttcgggctctgggaagtcagtaccagaaccgagttcgggatactcacaggctcatcactcagatgcagctgagcctggcagaaagtgaagcttccttgggaaacactaacattcctgcctcagaccactacgtggggccaaatggctttaaaagtctggctcaggaggccacaagattagcagaaagccacgttgagtcagccagtaacatggagcaactgacaagggaaactgaggactattccaaacaagccctctcactggtgcgcaaggccctgcatgaaggagtcggaagcggaagcggtagcccggacggtgctgtggtgcaagggcttgtggaaaaattggagaaaaccaagtccctggcccagcagttgacaagggaggccactcaagcggaaattgaagcagataggtcttatcagcacagtctccgcctcctggattcagtgtctcggcttcagggagtcagtgatcagtcctttcaggtggaagaagcaaagaggatcaaacaaaaagcggattcactctcaagcctggtaaccaggcatatggatgagttcaagcgtacacagaagaatctgggaaactggaaagaagaagcacagcagctcttacagaatggaaaaagtgggagagagaaatcagatcagctgctttcccgtgccaatcttgctaaaagcagagcacaagaagcactgagtatgggcaatgccactttttatgaagttgagagcatccttaaaaacctcagagagtttgacctgcaggtggacaacagaaaagcagaagctttcccgagccaagacccagatcaacagccaactgcggcccatgatgtcagagctggaagagagggcacgtcagcagaggggccacctccatttgctggagacaagcatagatgggattctggctgatgtgaagaacttggagaacattagggacaacctgcccccaggctgctacaatacccaggctcttgagcaacagtgaagctgccataaatatttctcaactgaggttcttgggatacagatctcagggctcgggagccatgtcatgtgagtgggtgggatggggacatttgaacatgtttaatgggtatgctcaggtcaactgacctgaccccattcctgatcccatggccaggtggttgtcttattgcaccatactccttgcttcctgatgctgggcaatgaggcagatagcactgggtgtgagaatgatcaaggatctggaccccaaagaatagactggatggaaagacaaactgcacaggcagatgtttgcctcataatagtcgtaagtggagtcctggaatttggacaagtgctgttgggatatagtcaacttattctttgagtaatgtgactaaaggaaaaaactttgactttgcccaggcatgaaattcttcctaatgtcagaacagagtgcaacccagtcacactgtggccagtaaaatactattgcctcatattgtcctctgcaagcttcttgctgatcagagttcctcctacttacaacccagggtgtgaacatgttctccattttcaagctggaagaagtgagcagtgttggagtgaggacctgtaaggcaggcccattcagagctatggtgcttgctggtgcctgccaccttcaagttctggacctgggcatgacatcctttcttttaatgatgccatggcaacttagagattgcatttttattaaagcatttcctaccagcaaagcaaatgttgggaaagtatttactttttcggtttcaaagtgatagaaaagtgtggcttgggcattgaaagaggtaaaattctctagatttattagtcctaattcaatcctacttttcgaacaccaaaaatgatgcgcatcaatgtattttatcttattttctcaatctcctctctctttcctccacccataataagagaatgttcctactcacacttcagctgggtcacatccatccctccattcatccttccatccatctttccatccattacctccatccatccttccaacatatatttattgagtacctactgtgtgccaggggctggtgggacagtggtgacatagtctctgccctcatagagttgattgtctagtgaggaagacaagcatttttaaaaaataaatttaaacttac

SEQ ID NO: 200355 - DNA, 3336 bp, Artificial Sequence
  derived and/or modified sequence
atgcctgccctgtggctgggctgctgcctgtgcttcagcctgctgctgcctgctgcccgggccaccagccggcgggaggtgtgtgactgcaatggcaagagccggcagtgcatctttgaccgggagctgcaccggcagacaggaaatggcttccgctgcctgaactgcaatgacaacacagatggcatccactgtgagaagtgcaagaatggcttctaccgccaccgggagcgggaccgctgcctgccctgcaactgcaacagcaagggcagcctgagcgcccgctgtgacaacagcggccgctgcagctgcaagccaggagtgactggagcccgctgtgaccgctgcctgcccggcttccacatgctgacagatgctggctgcacccaggaccagaggctgctggacagcaaatgtgactgtgaccctgctggcattgctggcccctgtgatgctggccgctgtgtgtgcaagccagctgtgactggagagcgctgtgaccgctgccgcagcggctactacaacctggatggcggcaaccctgagggctgcacccagtgcttctgctacggccacagcgccagctgccgcagcagcgctgagtacagcgtgcacaagatcaccagcaccttccaccaggatgtggatggctggaaggctgtgcagagaaatggcagccctgccaagctgcagtggagccagaggcaccaggatgtgttcagcagcgcccagaggctggaccctgtgtactttgtggccccagccaagttcctgggcaaccagcaggtgtcctatggccagagcctgagctttgactacagagtggaccggggcggccgccaccccagcgcccatgatgtgatcctggagggcgccggcctgcgcatcacagcccccctgatgcccctgggcaagaccctgccctgtggcctgaccaagacctacaccttccggctgaatgagcaccccagcaacaactggagcccccagctgagctactttgagtacagaaggctgctgaggaacctgacagccctgcgcatccgggccacctacggggagtacagcacaggctacatcgacaacgtgaccctcatcagcgcccggcctgtgtctggggccccagccccctgggtggagcagtgcatctgccctgtgggctacaagggccagttctgccaggactgtgccagcggctacaagagggacagcgcccggctgggccccttcggcacctgcatcccctgcaactgccagggcggcggggcctgtgaccctgacaccggggactgctacagcggagatgagaacccagacattgaatgtgccgactgccccatcggcttctacaatgacccccatgaccccaggagctgcaagccctgcccctgccacaacggcttcagctgcagcgtgatgcctgagacagaggaggtggtgtgcaacaactgccccccaggagtgactggagcccgctgtgagctgtgtgctgatggctactttggagacccctttggagagcacggccctgtgcggccctgccagccctgccagtgcaacaacaacgtggaccccagcgccagcggcaactgtgaccggctgaccggccgctgcctgaagtgcatccacaacacagctggcatctactgtgaccagtgcaaggccggctactttggagaccccctggcccccaacccagctgacaagtgccgggcctgcaactgcaaccccatgggcagcgagcctgtgggctgccgcagtgatggcacctgtgtgtgcaagccaggctttggaggccccaactgtgagcacggggccttcagctgcccagcctgctacaaccaggtgaagatccagatggaccagttcatgcagcagctgcagaggatggaggccctgatcagcaaggcccagggcggagatggagtggtgcctgacacagagctggagggccgcatgcagcaggccgagcaggccctgcaggacatcctgagagatgcccagatcagcgagggcgccagccgcagcctgggcctgcagctggccaaggtgcgcagccaggagaacagctaccagagccggctggatgacctgaagatgacagtggagcgggtgcgggccctgggcagccagtaccagaacagagtgcgggacacccacaggctcatcacccagatgcagctgagcctggccgagagcgaggccagcctgggcaacaccaacatcccagccagtgaccactacgtgggccccaacggcttcaagagcctggcccaggaggccacccggctggccgagagccacgtggagagcgccagcaacatggagcagctgacccgggagacagaggactacagcaagcaggccctgagcctggtgaggaaggccctgcacgagggcgtgggcagcggcagcggcagcccagatggagctgtggtgcagggcctggtggagaagctggagaagaccaagagcctggcccagcagctgacccgggaggccacccaggccgagattgaagctgacaggagctaccagcacagcctgcggctgctggacagcgtgtcccggctgcagggcgtgtctgaccagagcttccaggtggaggaggccaagaggatcaagcagaaggctgacagcctgagcagcctggtgaccaggcacatggatgagttcaagaggacccagaagaacctgggcaactggaaggaggaggcccagcagctgctgcagaatggcaagagcggccgggagaagagtgaccagctgctgagccgggccaacctggccaagagccgggcccaggaggccctgtccatgggaaatgccaccttctatgaggtggagagcatcctgaagaacctgcgggagtttgacctgcaggtggacaacaggaaggccgaggccgaggaggccatgaagaggctgagctacatcagccagaaggtgtctgatgccagtgacaagacccagcaggccgagcgggccctgggcagcgctgctgctgatgcccagagggccaagaatggagctggggaggccctggagatcagcagcgagattgagcaggagatcggcagcctgaacctggaggccaacgtgacagcagatggagccctggccatggagaagggcctggccagcctgaagtctgagatgagggaggtggagggggagctggagaggaaggagctggagtttgacaccaacatggatgctgtgcagatggtgatcacagaggcccagaaggtggacacccgggccaagaatgctggggtgaccatccaggacaccctgaacaccctggatggcctgctgcacctgatgggcatgtag

SEQ ID NO: 200356 - DNA, 3033 bp, Artificial Sequence
  derived and/or modified sequence
atgcctgccctgtggctgggctgctgcctgtgcttcagcctgctgctgcctgctgcccgggccaccagccggcgggaggtgtgtgactgcaatggcaagagccggcagtgcatctttgaccgggagctgcaccggcagacaggaaatggcttccgctgcctgaactgcaatgacaacacagatggcatccactgtgagaagtgcaagaatggcttctaccgccaccgggagcgggaccgctgcctgccctgcaactgcaacagcaagggcagcctgagcgcccgctgtgacaacagcggccgctgcagctgcaagccaggagtgactggagcccgctgtgaccgctgcctgcccggcttccacatgctgacagatgctggctgcacccaggaccagaggctgctggacagcaaatgtgactgtgaccctgctggcattgctggcccctgtgatgctggccgctgtgtgtgcaagccagctgtgactggagagcgctgtgaccgctgccgcagcggctactacaacctggatggcggcaaccctgagggctgcacccagtgcttctgctacggccacagcgccagctgccgcagcagcgctgagtacagcgtgcacaagatcaccagcaccttccaccaggatgtggatggctggaaggctgtgcagagaaatggcagccctgccaagctgcagtggagccagaggcaccaggatgtgttcagcagcgcccagaggctggaccctgtgtactttgtggccccagccaagttcctgggcaaccagcaggtgtcctatggccagagcctgagctttgactacagagtggaccggggcggccgccaccccagcgcccatgatgtgatcctggagggcgccggcctgcgcatcacagcccccctgatgcccctgggcaagaccctgccctgtggcctgaccaagacctacaccttccggctgaatgagcaccccagcaacaactggagcccccagctgagctactttgagtacagaaggctgctgaggaacctgacagccctgcgcatccgggccacctacggggagtacagcacaggctacatcgacaacgtgaccctcatcagcgcccggcctgtgtctggggccccagccccctgggtggagcagtgcatctgccctgtgggctacaagggccagttctgccaggactgtgccagcggctacaagagggacagcgcccggctgggccccttcggcacctgcatcccctgcaactgccagggcggcggggcctgtgaccctgacaccggggactgctacagcggagatgagaacccagacattgaatgtgccgactgccccatcggcttctacaatgacccccatgaccccaggagctgcaagccctgcccctgccacaacggcttcagctgcagcgtgatgcctgagacagaggaggtggtgtgcaacaactgccccccaggagtgactggagcccgctgtgagctgtgtgctgatggctactttggagacccctttggagagcacggccctgtgcggccctgccagccctgccagtgcaacaacaacgtggaccccagcgccagcggcaactgtgaccggctgaccggccgctgcctgaagtgcatccacaacacagctggcatctactgtgaccagtgcaaggccggctactttggagaccccctggcccccaacccagctgacaagtgccgggcctgcaactgcaaccccatgggcagcgagcctgtgggctgccgcagtgatggcacctgtgtgtgcaagccaggctttggaggccccaactgtgagcacggggccttcagctgcccagcctgctacaaccaggtgaagatccagatggaccagttcatgcagcagctgcagaggatggaggccctgatcagcaaggcccagggcggagatggagtggtgcctgacacagagctggagggccgcatgcagcaggccgagcaggccctgcaggacatcctgagagatgcccagatcagcgagggcgccagccgcagcctgggcctgcagctggccaaggtgcgcagccaggagaacagctaccagagccggctggatgacctgaagatgacagtggagcgggtgcgggccctgggcagccagtaccagaacagagtgcgggacacccacaggctcatcacccagatgcagctgagcctggccgagagcgaggccagcctgggcaacaccaacatcccagccagtgaccactacgtgggccccaacggcttcaagagcctggcccaggaggccacccggctggccgagagccacgtggagagcgccagcaacatggagcagctgacccgggagacagaggactacagcaagcaggccctgagcctggtgaggaaggccctgcacgagggcgtgggcagcggcagcggcagcccagatggagctgtggtgcagggcctggtggagaagctggagaagaccaagagcctggcccagcagctgacccgggaggccacccaggccgagattgaagctgacaggagctaccagcacagcctgcggctgctggacagcgtgtcccggctgcagggcgtgtctgaccagagcttccaggtggaggaggccaagaggatcaagcagaaggctgacagcctgagcagcctggtgaccaggcacatggatgagttcaagaggacccagaagaacctgggcaactggaaggaggaggcccagcagctgctgcagaatggcaagagcggccgggagaagagtgaccagctgctgagccgggccaacctggccaagagccgggcccaggaggccctgtccatgggaaatgccaccttctatgaggtggagagcatcctgaagaacctgcgggagtttgacctgcaggtggacaacaggaaggccgaggccttccccagccaggaccctgaccagcagcccacagctgcccatgatgtgcgggccggccgggagggcaccagcgctgagggccccccaccatttgctggggacaagcaccgctgggacagcggctag

SEQ ID NO: 200357 - DNA, 3336 bp, Artificial Sequence
  derived and/or modified sequence
atgcccgccctgtggctgggctgctgcctgtgcttcagcctgctgcttccggccgctagggccacgtcacggcgcgaagtgtgcgactgcaacggcaagtcaagacagtgcatctttgacagagagctgcaccgccaaactgggaacggcttcaggtgcctcaactgcaacgataataccgatgggattcactgtgaaaagtgcaagaacggcttttatagacacagagagagagacagatgcctaccctgtaattgtaactcaaaaggtagcttaagcgccaggtgtgacaactctggcaggtgctcatgtaaacctggagtcactggcgcccgatgcgaccggtgtctcccgggtttccacatgttgacagatgcaggctgtactcaagaccagcgcttgctggattccaagtgtgactgcgaccctgccggcatcgccggtccttgcgatgctggtaggtgcgtttgcaagccagccgtgacaggagagcgatgtgatcggtgtcggtccggttattacaacctggatggaggtaatccagaaggctgcacacaatgtttttgttacggccattccgcaagctgccgttcaagcgccgagtatagcgttcacaaaattacctctaccttccatcaggacgtggacggttggaaggctgtgcagcgaaatggatcccctgccaagcttcaatggtcccagaggcaccaggatgtgttttctagtgctcagcgattggaccctgtctacttcgttgcgcccgccaaattcctgggcaatcagcaagtcagttatggacagtcgttgtccttcgactaccgcgtcgaccgggggggaaggcatcctagcgcgcacgacgtcatcttagagggggctggactgaggatcaccgctcctctgatgccactgggaaaaacacttccatgcggcttgacgaaaacttacacattccgcctgaatgagcatcctagtaataattggtctccgcagctgtcttatttcgagtaccgaagactgctgagaaatctgaccgcactaaggatccgtgccacctacggagaatactctactggatacattgataacgttacactgatcagtgctcgaccagtgtcaggagctccggctccttgggtggaacagtgtatatgtcctgtgggctataagggtcagttctgccaggattgtgcttctgggtataagcgcgactccgcccgtttgggaccttttggcacttgcattccttgcaattgccaaggtggcggagcatgtgacccagatactggggactgttatagtggcgacgaaaatccagacatagagtgtgcagactgtccaatcggattttacaatgatccccacgaccccagatcctgtaagccttgtccttgccataacggcttcagctgctccgtgatgcccgagaccgaggaggttgtttgtaataactgcccaccaggcgtaactggcgccagatgtgagctttgcgcggacggttacttcggtgaccctttcggcgagcacgggcctgtgagaccctgtcagccgtgccagtgcaataacaacgttgacccctccgcttcagggaactgcgatcggctgaccggccggtgtctgaagtgcattcataacacagcaggaatatactgcgatcaatgcaaagccggatacttcggtgaccctctggctcccaaccccgcggataaatgtagggcctgcaattgtaaccctatggggagcgagcctgtgggctgcagaagcgacggaacatgcgtttgcaagccaggttttggcggtcccaattgcgaacacggagccttttcctgccccgcttgctataatcaagtcaagatacagatggaccaatttatgcagcaacttcagaggatggaagccctgatctccaaagcacagggtggggacggcgtagtgccagacaccgaactggagggaaggatgcaacaggccgaacaggctctccaggacattctcagggatgcccagatctcagaaggagctagcagaagcctagggctgcagctagccaaagtgcgaagtcaggaaaactcttatcagtcacggctcgatgacctgaaaatgaccgtggaacgggtccgcgccttgggatctcaataccagaatagagttcgtgacactcaccgcctgattacccagatgcagctgtcacttgccgagtcagaggcttccctgggcaatacaaatattccagcttctgatcactatgtaggcccaaatggctttaaatctcttgcccaggaggccacacgacttgcagagagtcacgtggagtccgccagtaatatggagcagttaacccgtgagaccgaagattacagcaagcaggccctgtcccttgtgcggaaagctctgcatgaaggagtagggtctggttccggaagtccagacggggcagttgttcaaggcttggtggagaaattggagaaaactaaatcattagcacaacagttaaccagggaggccacccaggctgaaatcgaggccgatagatcctatcagcatagcctccggcttctggactctgtgagcaggttacagggagtaagcgatcagtcttttcaggtggaggaagccaagagaatcaaacagaaggcagactctctgagtagcctggtgactcgccacatggacgaatttaagcggacccagaagaaccttggtaattggaaggaggaagcccagcaactgctccagaatggtaagagcgggcgcgagaagtccgatcagttgttgagtagagctaacttggctaagtcccgggcccaggaagccctctctatggggaacgcaacgttctatgaggttgaaagtatcctcaaaaatttaagagagttcgatttacaggtggacaataggaaggctgaagcagaagaggccatgaagaggctcagctatatctctcagaaagtatcagacgcatcagataaaactcagcaggccgagagagccctgggctccgcagccgcagatgcacaacgggccaagaacggggctggtgaggcgctggaaatctcaagcgagatcgagcaggaaataggttccctgaacctggaagctaacgtgacagcggacggtgctctggctatggaaaaaggattggcatctctcaagagcgagatgcgcgaggtagaaggcgagcttgagagaaaagagcttgagttcgatactaatatggatgcggtgcaaatggtcattactgaggcccaaaaggtggacacccgggccaagaatgcaggagtgactattcaagatactttaaacactctggacggactcctacacctgatgggcatgtag

SEQ ID NO: 200358 - DNA, 3033 bp, Artificial Sequence
  derived and/or modified sequence
atgcccgccctgtggctgggctgctgcctgtgcttcagcctgctgcttccagcggctagggcaaccagcaggagagaagtgtgtgactgtaatggtaagtcgcggcaatgcatttttgatagagaactgcatcgacagaccgggaacggtttccgatgccttaattgtaacgacaataccgatggaatacattgcgagaaatgcaagaacgggttttatcgccaccgggagagggatagatgtctaccatgtaattgtaattcgaagggaagtctttcagctcggtgcgacaactccgggcgctgttcttgcaaaccaggggtcactggtgcacgctgcgacagatgcctgcctgggtttcacatgttgacagacgctggctgcacacaggaccaaaggctcctcgattcaaaatgcgattgcgatcccgcaggtatcgccgggccctgtgacgctggacgctgcgtgtgcaagcctgcggtcacaggtgagcgatgtgaccgttgccggtcaggatactataatttggacggcggcaacccagagggctgtactcagtgcttttgctatgggcatagtgcctcatgtcgtagctctgccgagtacagtgtgcataaaatcacctctacctttcaccaggacgtggatgggtggaaagccgtgcagaggaacggttccccagccaagctgcagtggtctcagagacaccaagatgtatttagctcggctcagcggctggacccagtgtatttcgttgctcctgctaaatttctgggaaaccagcaagtctcttacggtcagtctctctcattcgactatcgcgttgaccgcggcgggaggcaccccagcgcccatgacgttatcctggaaggagccggacttagaatcacagctcctctgatgcctctcggtaagacgcttccatgtggcctaacgaaaacatatacattccgcctgaacgagcatccctctaacaactggtctccccagctcagttatttcgagtataggaggttactgcgtaatctgactgctctgaggattagagccacctatggggagtatagtaccgggtatatcgacaatgttaccctaatctcagcccgccctgtttccggtgctccggcgccatgggtagagcagtgcatatgtccggtcggttataagggtcagttctgtcaggactgcgcctcgggatataaacgggactccgcccgattgggcccattcggaacatgcatcccctgtaactgtcagggcggtggagcgtgcgacccggataccggagattgctatagcggtgacgagaatcccgacatcgaatgcgctgattgtcccataggattctataatgatcctcatgacccccgctcctgtaaaccatgtccctgtcacaatggctttagttgtagcgtcatgccagagacagaggaagtggtttgcaataattgtccacccggggtaactggcgcccgctgcgagttatgtgctgacgggtacttcggcgacccttttggggaacacggccctgtgagaccctgccaaccctgccagtgtaataataatgtggatccatctgcgtcgggtaactgcgaccggttgaccggacgatgtctgaaatgcatccacaacacggccggcatctactgtgaccagtgcaaagccgggtattttggggatccgcttgctcccaaccctgccgacaagtgccgggcttgtaactgtaacccaatgggctctgagcccgttggttgcagatctgacggtacatgcgtctgcaagccaggattcggagggccaaattgcgagcacggagccttctcctgcccggcttgctacaaccaggttaagatccagatggatcagttcatgcagcagctgcaaagaatggaggcattgattagtaaagcgcagggaggcgacggtgtggtgcctgacacagaactggaggggaggatgcaacaggccgaacaagccttgcaggacatcctccgtgatgctcagataagcgaaggcgcttcgaggtcattaggactgcaactcgcgaaggtcagatcccaggaaaattcctaccagtcgagactcgatgatctcaagatgacagtggagagggtacgggccctgggatctcagtaccagaacagagtgcgcgacactcacaggttgattacccagatgcagctctcattggccgaaagtgaggcaagcctgggtaacaccaacattcctgccagcgatcattatgtggggcccaatgggtttaagtctctcgcgcaagaggctacacggctggcagaatcacacgtcgaatccgcaagtaatatggaacagcttacacgtgagactgaggactattccaaacaagcactatctctggtgaggaaagctctccacgagggcgtgggttccgggtccggtagccctgatggcgcagtggttcagggcctcgtggagaagctcgagaagaccaagtccttagcgcagcagctgacacgcgaagctacccaggctgagattgaggcggatagatcctaccagcacagcttacgcctgttagacagcgtctcccgcctgcagggcgtgtctgaccagtcatttcaggtggaggaggctaaaaggattaaacaaaaggccgattccctgtcctcgctggtgacaaggcatatggacgagtttaaacgtactcagaaaaacctggggaattggaaggaagaggctcagcagctgctccagaacggtaagagcgggcgtgagaagagcgatcaattgctgagccgggctaacctagcaaagagccgggctcaggaagccttatcgatgggcaacgcgaccttctatgaggtggaatcgatccttaaaaatcttcgggaatttgacctgcaggtcgacaatagaaaagctgaagcctttccttctcaggaccctgatcaacagccaactgcggcacatgacgtgagagccggccgcgagggtacctctgcagaaggtccccctccctttgctggtgataagcacagatgggatagtggatag

SEQ ID NO: 200359 - DNA, 3336 bp, Artificial Sequence
  derived and/or modified sequence
atgccagccttatggctgggctgttgtttatgtttcagcttactgctgcccgcagcgagggccaccagcaggagggaagtctgtgactgtaacgggaagtcaagacagtgtattttcgacagagagctgcatcggcaaacgggtaatggtttccgctgcctgaactgcaacgacaacactgatgggatccactgtgagaaatgtaagaatgggttctaccgccacagagaaagagataggtgtctgccgtgtaattgtaactctaagggatccctctccgcacggtgtgataactccggtagatgttcttgtaagccaggtgtgacaggagcaaggtgcgataggtgccttccgggtttccatatgctgaccgatgccggatgtacacaagaccagagactgcttgatagcaagtgtgactgcgatccagccggaatcgcgggtccttgcgacgcgggaaggtgtgtgtgtaagcccgcagtcactggcgagcggtgcgatcgatgccggtctggctactacaaccttgatggcggtaaccccgaaggctgtactcaatgcttctgttacggtcattcagcgagctgtcgctcctctgcagagtattctgtgcacaagattacctcaacatttcaccaggatgtagatgggtggaaggccgttcagagaaatggtagcccagctaagctgcagtggagtcaaaggcaccaggatgtattctcaagcgcgcaaaggctcgaccccgtttactttgttgccccagccaagttcttgggcaatcagcaggtttcctacggccaaagtctgagttttgattaccgagtggaccggggaggcagacaccccagcgcacacgacgtgatactggagggcgcaggtctgcggatcaccgcaccactcatgcctctcggaaaaaccctcccctgcggattaacgaaaacatatacttttcgcctgaatgagcacccctcaaataattggtccccgcagttgagctattttgagtatcgcaggctgttacgcaatctcaccgcgcttcggatccgggctacttacggcgagtacagcacagggtacattgacaacgtgacacttatcagtgccaggcctgtttctggggctcctgctccatgggtcgaacagtgtatttgcccggtgggatacaaaggccagttctgccaggactgcgcgtccggctacaaaagggatagtgcccgactgggaccttttggaacctgcatcccctgcaattgtcaggggggtggcgcatgtgaccccgacacaggagattgttatagtggggatgagaaccctgacatagaatgtgcagactgcccgattgggttctacaacgacccccacgatccacgatcctgcaaaccctgtccctgccataatggcttcagctgctctgtgatgcctgaaaccgaagaggtggtgtgcaataattgtccaccaggggtgaccggcgcacgttgcgagttgtgtgccgatggctattttggcgatccctttggggagcacggacccgtgcgcccttgccagccgtgtcagtgtaacaacaatgttgatccaagtgcatctggcaactgcgatagactgaccgggaggtgcctgaagtgcatccacaatactgcaggtatctactgcgatcaatgcaaggctggttattttggtgacccactcgctccaaatccagcagacaaatgtcgtgcatgtaactgtaaccccatgggctccgagcctgttggctgtcgaagtgacgggacctgtgtttgtaagccagggttcggcggacctaactgcgagcacggtgctttctcctgtccagcatgttacaaccaggtgaaaattcaaatggatcagtttatgcaacaacttcagcgaatggaggctcttatttccaaggctcagggcggagacggggttgtgcctgacacggagctggagggccgtatgcagcaggctgaacaggccctgcaggatattctacgcgacgcgcagatctctgagggcgcaagccgcagcctaggcctccagcttgctaaggtccggagccaagaaaactcatatcaatcacgcctggatgatctgaagatgacagtggagcgagtgcgtgccctggggagtcagtaccaaaacagagtaagggatacacacaggcttatcactcagatgcagttgagtctagccgagtccgaggcgagtctggggaatacgaacatccccgcttctgatcactacgtcggtcccaacggattcaaatcactggcccaggaggcgacacgattagctgagagccatgtcgaaagcgcctctaacatggaacagctaacccgggagactgaagactacagcaagcaggctctgagtctggtccgcaaggccctgcatgaaggagtgggatcagggagtggtagtcccgatggtgccgttgtccaggggttggttgagaagcttgagaaaacaaaatctctggcgcagcagctcactagggaggcaacccaggccgagatagaagccgaccgctcctatcaacatagcctacggttgctggattcagtctcccgcctccaaggggtgtctgaccagtctttccaagtcgaggaggccaagcggatcaagcagaaagctgattcacttagtagcctcgtcacacgccacatggatgagttcaagcggactcagaaaaacctgggaaattggaaagaggaggctcagcagctactccaaaatgggaaaagtggcagggaaaagagtgaccagctgctgtcaagggcaaatctcgccaaaagtagggcccaggaggcgttgagtatgggaaacgccactttctatgaggtggagtccattttgaaaaacctgagagagttcgatttgcaggtggataacagaaaggcggaggctgaagaagctatgaagaggctctcttacatctctcagaaggtcagtgacgcgagcgataaaacccagcaagcggaacgggcactcggatcagctgcggctgatgcccagcgcgctaaaaacggcgcaggagaggccctggaaatctcaagtgagatagagcaggagataggctccctgaacctggaggccaacgtgactgcagacggggcattggccatggagaagggcctggcttctctgaaaagcgagatgagagaggtggagggggagctcgaacgaaaagaactggaattcgataccaatatggacgctgttcagatggtcattactgaggcacagaaggtggacacccgcgcaaagaacgcaggcgtgaccatacaggacaccctgaataccctggacgggctcctacaccttatgggtatgtag

SEQ ID NO: 200360 - DNA, 3033 bp, Artificial Sequence
  derived and/or modified sequence
atgccggcactatggctcgggtgttgcctctgcttctcgctgttgttgcccgctgctagagccactagcaggagagaggtatgcgattgtaatggcaagagccgtcagtgtatcttcgatagggaactgcatcgacaaaccggcaacggctttaggtgtctaaattgtaatgataacacagacggcatacactgcgaaaagtgcaagaatggtttctatcgacaccgcgagagggacaggtgtcttccttgtaactgcaacagcaagggaagtctatccgccaggtgcgacaactccggcaggtgttcatgcaaaccaggcgtgacgggcgcacggtgcgaccgctgcttgcctggcttccatatgctcactgatgccggatgtacacaagaccagaggcttctcgattcaaaatgcgactgtgacccagcagggatcgccggaccatgcgacgccggaaggtgcgtgtgtaaaccagcagtgacaggcgaacggtgtgaccggtgccggtccggctactataacttggacggtggcaaccccgaggggtgcacccagtgcttctgctatggacactcagcctcctgccggtcgagcgcagaatactccgtgcataaaattacatccactttccatcaggatgttgacggttggaaggctgtacaaagaaatggatcacccgcaaaattgcaatggtcccagcggcaccaggacgtcttttctagcgcccagcgcctcgacccagtgtatttcgtcgcccctgccaagttcctcggaaaccagcaggtatcctatggtcaatctctttccttcgattaccgcgtagatcggggtggccgtcacccaagcgcccacgatgtgattttggagggagcgggactgaggattacagcacctcttatgccactcggcaagaccctgccgtgcgggttgacaaaaacgtataccttccggcttaatgagcacccgagcaacaattggtcaccccaattgtcatacttcgagtataggagactactgaggaacctgactgcgctgcgaatcagggctacttatggtgagtacagcacgggatacattgataacgtgacactcattagcgcgcgacccgtgagcggagccccagcaccttgggtcgagcagtgtatctgtcccgtcggatacaaggggcagttttgccaggattgcgcatctggttacaagagagactctgcgcgtctcggcccattcggcacctgtatcccatgtaattgccagggcggaggagcctgcgatcctgatacaggtgattgctacagtggcgacgaaaaccctgacatcgagtgtgctgattgccccatcggcttctacaatgacccgcacgaccccaggagctgcaagccatgcccctgtcataatgggttcagctgcagtgttatgcccgagacggaggaggttgtttgcaacaattgtccccctggtgtgaccggcgctcgatgcgagctttgcgctgacggatactttggcgacccttttggtgaacatggtcctgtgcggccatgtcagccatgtcaatgtaataataacgttgatcctagtgcatcagggaactgcgaccggctgaccggcaggtgccttaagtgcatccataatacagctggcatatactgtgatcagtgtaaagccggttatttcggcgacccactggctcctaacccggcagataaatgtcgcgcatgtaactgtaatcccatgggatccgagccagtcgggtgtcgaagcgatgggacgtgtgtgtgcaaacctggttttgggggacctaactgtgaacacggtgctttctcttgtcccgcatgttacaaccaggttaaaattcaaatggaccagtttatgcagcagctgcagagaatggaggccctcatttccaaagcccagggcggagacggagtagtccctgacactgagttggaaggtcggatgcagcaggctgaacaagccttacaagatatcctcagggacgcgcaaatttctgaaggggcttctcggtcactcgggctgcagctcgcaaaagtgaggagccaagagaatagctaccaatccaggctggacgacctaaagatgactgtggagcgggtgagggcactgggctcacagtatcaaaatcgtgtgagggatacacatcgcctgattacacagatgcagctgtctctggcggagtccgaagctagcctgggcaacacaaatattccagctagcgatcactacgtgggcccaaacggattcaaaagcttagctcaggaagctacaaggctagcggagtctcacgttgagagcgccagcaacatggaacagctcactcgggagaccgaagactattcgaagcaggcactctccctcgttagaaaagcgctccatgagggtgtgggtagcggctctggaagtccagacggcgctgtagtgcaaggactggttgagaaactggagaaaaccaagagcctggcccagcagctcacgcgggaagctacccaggccgaaattgaagcagatcggtcttaccagcacagccttcgacttctggactccgtaagccggctgcagggcgtttccgatcaatctttccaggtggaggaagctaaacggatcaagcaaaaggccgacagcctgtctagcctggtcaccagacacatggatgagttcaagaggacacagaaaaacctcggcaattggaaagaagaggcccagcaactgctgcagaatggaaagagcgggagagaaaagtcagaccagctgctcagtcgggctaacttggcaaaatctcgggcacaggaggccctctcgatggggaacgcgactttctacgaggttgagtcaatccttaaaaacctccgggagttcgacctgcaggtagataaccgaaaagccgaagccttccctagtcaggacccagatcagcagcctaccgcagcccacgacgtcagagccggtcgcgaaggaactagcgccgagggccctcccccattcgcaggggataagcacaggtgggactcgggatag

SEQ ID NO: 200361 - DNA, 3336 bp, Artificial Sequence
  derived and/or modified sequence
atgcccgccctgtggctgggctgctgcctgtgcttcagcctgctgctgcccgccgccagagccaccagcagaagagaggtgtgcgactgcaacggcaagagcagacagtgcatcttcgacagagagctgcacagacagaccggcaacggcttcagatgcctgaactgcaacgacaacaccgacggcatccactgcgagaagtgcaagaacggcttctacagacacagagagagagacagatgcctgccctgcaactgcaacagcaagggcagcctgagcgccagatgcgacaacagcggcagatgcagctgcaagcccggcgtgaccggcgccagatgcgacagatgcctgcccggcttccacatgctgaccgacgccggctgcacccaggaccagagactgctggacagcaagtgcgactgcgaccccgccggcatcgccggcccctgcgacgccggcagatgcgtgtgcaagcccgccgtgaccggcgagagatgcgacagatgcagaagcggctactacaacctggacggcggcaaccccgagggctgcacccagtgcttctgctacggccacagcgccagctgcagaagcagcgccgagtacagcgtgcacaagatcaccagcaccttccaccaggacgtggacggctggaaggccgtgcagagaaacggcagccccgccaagctgcagtggagccagagacaccaggacgtgttcagcagcgcccagagactggaccccgtgtacttcgtggcccccgccaagttcctgggcaaccagcaggtgagctacggccagagcctgagcttcgactacagagtggacagaggcggcagacaccccagcgcccacgacgtgatcctggagggcgccggcctgagaatcaccgcccccctgatgcccctgggcaagaccctgccctgcggcctgaccaagacctacaccttcagactgaacgagcaccccagcaacaactggagcccccagctgagctacttcgagtacagaagactgctgagaaacctgaccgccctgagaatcagagccacctacggcgagtacagcaccggctacatcgacaacgtgaccctgatcagcgccagacccgtgagcggcgcccccgccccctgggtggagcagtgcatctgccccgtgggctacaagggccagttctgccaggactgcgccagcggctacaagagagacagcgccagactgggccccttcggcacctgcatcccctgcaactgccagggcggcggcgcctgcgaccccgacaccggcgactgctacagcggcgacgagaaccccgacatcgagtgcgccgactgccccatcggcttctacaacgacccccacgaccccagaagctgcaagccctgcccctgccacaacggcttcagctgcagcgtgatgcccgagaccgaggaggtggtgtgcaacaactgcccccccggcgtgaccggcgccagatgcgagctgtgcgccgacggctacttcggcgaccccttcggcgagcacggccccgtgagaccctgccagccctgccagtgcaacaacaacgtggaccccagcgccagcggcaactgcgacagactgaccggcagatgcctgaagtgcatccacaacaccgccggcatctactgcgaccagtgcaaggccggctacttcggcgaccccctggcccccaaccccgccgacaagtgcagagcctgcaactgcaaccccatgggcagcgagcccgtgggctgcagaagcgacggcacctgcgtgtgcaagcccggcttcggcggccccaactgcgagcacggcgccttcagctgccccgcctgctacaaccaggtgaagatccagatggaccagttcatgcagcagctgcagagaatggaggccctgatcagcaaggcccagggcggcgacggcgtggtgcccgacaccgagctggagggcagaatgcagcaggccgagcaggccctgcaggacatcctgagagacgcccagatcagcgagggcgccagcagaagcctgggcctgcagctggccaaggtgagaagccaggagaacagctaccagagcagactggacgacctgaagatgaccgtggagagagtgagagccctgggcagccagtaccagaacagagtgagagacacccacagactgatcacccagatgcagctgagcctggccgagagcgaggccagcctgggcaacaccaacatccccgccagcgaccactacgtgggccccaacggcttcaagagcctggcccaggaggccaccagactggccgagagccacgtggagagcgccagcaacatggagcagctgaccagagagaccgaggactacagcaagcaggccctgagcctggtgagaaaggccctgcacgagggcgtgggcagcggcagcggcagccccgacggcgccgtggtgcagggcctggtggagaagctggagaagaccaagagcctggcccagcagctgaccagagaggccacccaggccgagatcgaggccgacagaagctaccagcacagcctgagactgctggacagcgtgagcagactgcagggcgtgagcgaccagagcttccaggtggaggaggccaagagaatcaagcagaaggccgacagcctgagcagcctggtgaccagacacatggacgagttcaagagaacccagaagaacctgggcaactggaaggaggaggcccagcagctgctgcagaacggcaagagcggcagagagaagagcgaccagctgctgagcagagccaacctggccaagagcagagcccaggaggccctgagcatgggcaacgccaccttctacgaggtggagagcatcctgaagaacctgagagagttcgacctgcaggtggacaacagaaaggccgaggccgaggaggccatgaagagactgagctacatcagccagaaggtgagcgacgccagcgacaagacccagcaggccgagagagccctgggcagcgccgccgccgacgcccagagagccaagaacggcgccggcgaggccctggagatcagcagcgagatcgagcaggagatcggcagcctgaacctggaggccaacgtgaccgccgacggcgccctggccatggagaagggcctggccagcctgaagagcgagatgagagaggtggagggcgagctggagagaaaggagctggagttcgacaccaacatggacgccgtgcagatggtgatcaccgaggcccagaaggtggacaccagagccaagaacgccggcgtgaccatccaggacaccctgaacaccctggacggcctgctgcacctgatgggcatgtag

SEQ ID NO: 200362 - DNA, 3033 bp, Artificial Sequence
  derived and/or modified sequence
atgcccgccctgtggctgggctgctgcctgtgcttcagcctgctgctgcccgccgccagagccaccagcagaagagaggtgtgcgactgcaacggcaagagcagacagtgcatcttcgacagagagctgcacagacagaccggcaacggcttcagatgcctgaactgcaacgacaacaccgacggcatccactgcgagaagtgcaagaacggcttctacagacacagagagagagacagatgcctgccctgcaactgcaacagcaagggcagcctgagcgccagatgcgacaacagcggcagatgcagctgcaagcccggcgtgaccggcgccagatgcgacagatgcctgcccggcttccacatgctgaccgacgccggctgcacccaggaccagagactgctggacagcaagtgcgactgcgaccccgccggcatcgccggcccctgcgacgccggcagatgcgtgtgcaagcccgccgtgaccggcgagagatgcgacagatgcagaagcggctactacaacctggacggcggcaaccccgagggctgcacccagtgcttctgctacggccacagcgccagctgcagaagcagcgccgagtacagcgtgcacaagatcaccagcaccttccaccaggacgtggacggctggaaggccgtgcagagaaacggcagccccgccaagctgcagtggagccagagacaccaggacgtgttcagcagcgcccagagactggaccccgtgtacttcgtggcccccgccaagttcctgggcaaccagcaggtgagctacggccagagcctgagcttcgactacagagtggacagaggcggcagacaccccagcgcccacgacgtgatcctggagggcgccggcctgagaatcaccgcccccctgatgcccctgggcaagaccctgccctgcggcctgaccaagacctacaccttcagactgaacgagcaccccagcaacaactggagcccccagctgagctacttcgagtacagaagactgctgagaaacctgaccgccctgagaatcagagccacctacggcgagtacagcaccggctacatcgacaacgtgaccctgatcagcgccagacccgtgagcggcgcccccgccccctgggtggagcagtgcatctgccccgtgggctacaagggccagttctgccaggactgcgccagcggctacaagagagacagcgccagactgggccccttcggcacctgcatcccctgcaactgccagggcggcggcgcctgcgaccccgacaccggcgactgctacagcggcgacgagaaccccgacatcgagtgcgccgactgccccatcggcttctacaacgacccccacgaccccagaagctgcaagccctgcccctgccacaacggcttcagctgcagcgtgatgcccgagaccgaggaggtggtgtgcaacaactgcccccccggcgtgaccggcgccagatgcgagctgtgcgccgacggctacttcggcgaccccttcggcgagcacggccccgtgagaccctgccagccctgccagtgcaacaacaacgtggaccccagcgccagcggcaactgcgacagactgaccggcagatgcctgaagtgcatccacaacaccgccggcatctactgcgaccagtgcaaggccggctacttcggcgaccccctggcccccaaccccgccgacaagtgcagagcctgcaactgcaaccccatgggcagcgagcccgtgggctgcagaagcgacggcacctgcgtgtgcaagcccggcttcggcggccccaactgcgagcacggcgccttcagctgccccgcctgctacaaccaggtgaagatccagatggaccagttcatgcagcagctgcagagaatggaggccctgatcagcaaggcccagggcggcgacggcgtggtgcccgacaccgagctggagggcagaatgcagcaggccgagcaggccctgcaggacatcctgagagacgcccagatcagcgagggcgccagcagaagcctgggcctgcagctggccaaggtgagaagccaggagaacagctaccagagcagactggacgacctgaagatgaccgtggagagagtgagagccctgggcagccagtaccagaacagagtgagagacacccacagactgatcacccagatgcagctgagcctggccgagagcgaggccagcctgggcaacaccaacatccccgccagcgaccactacgtgggccccaacggcttcaagagcctggcccaggaggccaccagactggccgagagccacgtggagagcgccagcaacatggagcagctgaccagagagaccgaggactacagcaagcaggccctgagcctggtgagaaaggccctgcacgagggcgtgggcagcggcagcggcagccccgacggcgccgtggtgcagggcctggtggagaagctggagaagaccaagagcctggcccagcagctgaccagagaggccacccaggccgagatcgaggccgacagaagctaccagcacagcctgagactgctggacagcgtgagcagactgcagggcgtgagcgaccagagcttccaggtggaggaggccaagagaatcaagcagaaggccgacagcctgagcagcctggtgaccagacacatggacgagttcaagagaacccagaagaacctgggcaactggaaggaggaggcccagcagctgctgcagaacggcaagagcggcagagagaagagcgaccagctgctgagcagagccaacctggccaagagcagagcccaggaggccctgagcatgggcaacgccaccttctacgaggtggagagcatcctgaagaacctgagagagttcgacctgcaggtggacaacagaaaggccgaggccttccccagccaggaccccgaccagcagcccaccgccgcccacgacgtgagagccggcagagagggcaccagcgccgagggccccccccccttcgccggcgacaagcacagatgggacagcggctag

SEQ ID NO: 200363 - protein, 2377 aa, Artificial Sequence
  derived and/or modified sequence
MDEEEDGAGAEESGQPRSFMRLNDLSGAGGRPGPGSAEKDPGSADSEAEGLPYPALAPVVFFYLSQDSRPRSWCLRTVCNPWFERISMLVILLNCVTLGMFRPCEDIACDSQRCRILQAFDDFIFAFFAVEMVVKMVALGIFGKKCYLGDTWNRLDFFIVIAGMLEYSLDLQNVSFSAVRTVRVLRPLRAINRVPSMRILVTLLLDTLPMLGNVLLLCFFVFFIFGIVGVQLWAGLLRNRCFLPENFSLPLSVDLERYYQTENEDESPFICSQPRENGMRSCRSVPTLRGDGGGGPPCGLDYEAYNSSSNTTCVNWNQYYTNCSAGEHNPFKGAINFDNIGYAWIAIFQVITLEGWVDIMYFVMDAHSFYNFIYFILLIIVGSFFMINLCLVVIATQFSETKQRESQLMREQRVRFLSNASTLASFSEPGSCYEELLKYLVYILRKAARRLAQVSRAAGVRVGLLSSPAPLGGQETQPSSSCSRSHRRLSVHHLVHHHHHHHHHYHLGNGTLRAPRASPEIQDRDANGSRRLMLPPPSTPALSGAPPGGAESVHSFYHADCHLEPVRCQAPPPRSPSEASGRTVGSGKVYPTVHTSPPPETLKEKALVEVAASSGPPTLTSLNIPPGPYSSMHKLLETQSTGACQSSCKISSPCLKADSGACGPDSCPYCARAGAGEVELADREMPDSDSEAVYEFTQDAQHSDLRDPHSRRQRSLGPDAEPSSVLAFWRLICDTFRKIVDSKYFGRGIMIAILVNTLSMGIEYHEQPEELTNALEISNIVFTSLFALEMLLKLLVYGPFGYIKNPYNIFDGVIVVISVWEIVGQQGGGLSVLRTFRLMRVLKLVRFLPALQRQLVVLMKTMDNVATFCMLLMLFIFIFSILGMHLFGCKFASERDGDTLPDRKNFDSLLWAIVTVFQILTQEDWNKVLYNGMASTSSWAALYFIALMTFGNYVLFNLLVAILVEGFQAEEISKREDASGQLSCIQLPVDSQGGDANKSESEPDFFSPSLDGDGDRKKCLALVSLGEHPELRKSLLPPLIIHTAATPMSLPKSTSTGLGEALGPASRRTSSSGSAEPGAAHEMKSPPSARSSPHSPWSAASSWTSRRSSRNSLGRAPSLKRRSPSGERRSLLSGEGQESQDEEESSEEERASPAGSDHRHRGSLEREAKSSFDLPDTLQVPGLHRTASGRGSASEHQDCNGKSASGRLARALRPDDPPLDGDDADDEGNLSKGERVRAWIRARLPACCLERDSWSAYIFPPQSRFRLLCHRIITHKMFDHVVLVIIFLNCITIAMERPKIDPHSAERIFLTLSNYIFTAVFLAEMTVKVVALGWCFGEQAYLRSSWNVLDGLLVLISVIDILVSMVSDSGTKILGMLRVLRLLRTLRPLRVISRAQGLKLVVETLMSSLKPIGNIVVICCAFFIIFGILGVQLFKGKFFVCQGEDTRNITNKSDCAEASYRWVRHKYNFDNLGQALMSLFVLASKDGWVDIMYDGLDAVGVDQQPIMNHNPWMLLYFISFLLIVAFFVLNMFVGVVVENFHKCRQHQEEEEARRREEKRLRRLEKKRRNLMLDDVIASGSSASAASEAQCKPYYSDYSRFRLLVHHLCTSHYLDLFITGVIGLNVVTMAMEHYQQPQILDEALKICNYIFTVIFVLESVFKLVAFGFRRFFQDRWNQLDLAIVLLSIMGITLEEIEVNASLPINPTIIRIMRVLRIARVLKLLKMAVGMRALLDTVMQALPQVGNLGLLFMLLFFIFAALGVELFGDLECDETHPCEGLGRHATFRNFGMAFLTLFRVSTGDNWNGIMKDTLRDCDQESTCYNTVISPIYFVSFVLTAQFVLVNVVIAVLMKHLEESNKEAKEEAELEAELELEMKTLSPQPHSPLGSPFLWPGVEGPDSPDSPKPGALHPAAHARSASHFSLEHPTDRQLFDTISLLIQGSLEWELKLMDELAGPGGQPSAFPSAPSLGGSDPQIPLAEMEALSLTSEIVSEPSCSLALTDDSLPDDMHTLLLSALESNMQPHPTELPGPDLLTVRKSGVSRTHSLPNDSYMCRHGSTAEGPLGHRGWGLPKAQSGSVLSVHSQPADTSYILQLPKDAPHLLQPHSAPTWGTIPKLPPPGRSPLAQRPLRRQAAIRTDSLDVQGLGSREDLLAEVSGPSPPLARAYSFWGQSSTQAQQHSRSHSKISKHMTPPAPCPGPEPNWGKGPPETRSSLELDTELSWISGDLLPPGGQEEPPSPRDLKKCYSVEAQSCQRRPTSWLDEQRRHSIAVSCLDSGSQPHLGTDPSNLGGQPLGGPGSRPKKKLSPPSITIDPPESQGPRTPPSPGICLRRRAPSSDSKDPLASGPPDSMAASPSPKKDVLSLSGLSSDPADLDP

SEQ ID NO: 200364 - protein, 1776 aa, Artificial Sequence
  derived and/or modified sequence
MDEEEDGAGAEESGQPRSFMRLNDLSGAGGRPGPGSAEKDPGSADSEAEGLPYPALAPVVFFYLSQDSRPRSWCLRTVCNPWFERISMLVILLNCVTLGMFRPCEDIACDSQRCRILQAFDDFIFAFFAVEMVVKMVALGIFGKKCYLGDTWNRLDFFIVIAGMLEYSLDLQNVSFSAVRTVRVLRPLRAINRVPSMRILVTLLLDTLPMLGNVLLLCFFVFFIFGIVGVQLWAGLLRNRCFLPENFSLPLSVDLERYYQTENEDESPFICSQPRENGMRSCRSVPTLRGDGGGGPPCGLDYEAYNSSSNTTCVNWNQYYTNCSAGEHNPFKGAINFDNIGYAWIAIFQVITLEGWVDIMYFVMDAHSFYNFIYFILLIIVGSFFMINLCLVVIATQFSETKQRESQLMREQRVRFLSNASTLASFSEPGSCYEELLKYLVYILRKAARRLAQVSRAAGVRVGLLSSPAPLGGQETQPSSSCSRSHRRLSVHHLVHHHHHHHHHYHLGNGTLRAPRASPEIQDRDANGSRRLMLPPPSTPALSGAPPGGAESVHSFYHADCHLEPVRCQAPPPRSPSEASGRTVGSGKVYPTVHTSPPPETLKEKALVEVAASSGPPTLTSLNIPPGPYSSMHKLLETQSTGACQSSCKISSPCLKADSGACGPDSCPYCARAGAGEVELADREMPDSDSEAVYEFTQDAQHSDLRDPHSRRQRSLGPDAEPSSVLAFWRLICDTFRKIVDSKYFGRGIMIAILVNTLSMGIEYHEQPEELTNALEISNIVFTSLFALEMLLKLLVYGPFGYIKNPYNIFDGVIVVISVWEIVGQQGGGLSVLRTFRLMRVLKLVRFLPALQRQLVVLMKTMDNVATFCMLLMLFIFIFSILGMHLFGCKFASERDGDTLPDRKNFDSLLWAIVTVFQILTQEDWNKVLYNGMASTSSWAALYFIALMTFGNYVLFNLLVAILVEGFQAEEISKREDASGQLSCIQLPVDSQGGDANKSESEPDFFSPSLDGDGDRKKCLALVSLGEHPELRKSLLPPLIIHTAATPMSLPKSTSTGLGEALGPASRRTSSSGSAEPGAAHEMKSPPSARSSPHSPWSAASSWTSRRSSRNSLGRAPSLKRRSPSGERRSLLSGEGQESQDEEESSEEERASPAGSDHRHRGSLEREAKSSFDLPDTLQVPGLHRTASGRGSASEHQDCNGKSASGRLARALRPDDPPLDGDDADDEGNLSKGERVRAWIRARLPACCLERDSWSAYIFPPQSRFRLLCHRIITHKMFDHVVLVIIFLNCITIAMERPKIDPHSAERIFLTLSNYIFTAVFLAEMTVKVVALGWCFGEQAYLRSSWNVLDGLLVLISVIDILVSMVSDSGTKILGMLRVLRLLRTLRPLRVISRAQGLKLVVETLMSSLKPIGNIVVICCAFFIIFGILGVQLFKGKFFVCQGEDTRNITNKSDCAEASYRWVRHKYNFDNLGQALMSLFVLASKDGWVDIMYDGLDAVGVDQQPIMNHNPWMLLYFISFLLIVAFFVLNMFVGVVVENFHKCRQHQEEEEARRREEKRLRRLEKKRRNLMLDDVIASGSSASAASEAQCKPYYSDYSRFRLLVHHLCTSHYLDLFITGVIGLNVVTMAMEHYQQPQILDEALKICNYIFTVIFVLESVFKLVAFGFRRFFQDRWNQLDLAIVLLSIMGITLEEIEVNASLPINPTIIRIMRVLRIARVLKLLKMAVGMRALLDTVMQALPQLWAWSSLETWSVTRHTPVRAWAVMPPFGTLAWPS

SEQ ID NO: 200365 - DNA, 7134 bp, Artificial Sequence
  derived and/or modified sequence
atggacgaggaggaggacggcgccggcgccgaggagagcggccagcccagaagcttcatgagactgaacgacctgagcggcgccggcggcagacccggccccggcagcgccgagaaggaccccggcagcgccgacagcgaggccgagggcctgccctaccccgccctggcccccgtggtgttcttctacctgagccaggacagcagacccagaagctggtgcctgagaaccgtgtgcaacccctggttcgagagaatcagcatgctggtgatcctgctgaactgcgtgaccctgggcatgttcagaccctgcgaggacatcgcctgcgacagccagagatgcagaatcctgcaggccttcgacgacttcatcttcgccttcttcgccgtggagatggtggtgaagatggtggccctgggcatcttcggcaagaagtgctacctgggcgacacctggaacagactggacttcttcatcgtgatcgccggcatgctggagtacagcctggacctgcagaacgtgagcttcagcgccgtgagaaccgtgagagtgctgagacccctgagagccatcaacagagtgcccagcatgagaatcctggtgaccctgctgctggacaccctgcccatgctgggcaacgtgctgctgctgtgcttcttcgtgttcttcatcttcggcatcgtgggcgtgcagctgtgggccggcctgctgagaaacagatgcttcctgcccgagaacttcagcctgcccctgagcgtggacctggagagatactaccagaccgagaacgaggacgagagccccttcatctgcagccagcccagagagaacggcatgagaagctgcagaagcgtgcccaccctgagaggcgacggcggcggcggccccccctgcggcctggactacgaggcctacaacagcagcagcaacaccacctgcgtgaactggaaccagtactacaccaactgcagcgccggcgagcacaaccccttcaagggcgccatcaacttcgacaacatcggctacgcctggatcgccatcttccaggtgatcaccctggagggctgggtggacatcatgtacttcgtgatggacgcccacagcttctacaacttcatctacttcatcctgctgatcatcgtgggcagcttcttcatgatcaacctgtgcctggtggtgatcgccacccagttcagcgagaccaagcagagagagagccagctgatgagagagcagagagtgagattcctgagcaacgccagcaccctggccagcttcagcgagcccggcagctgctacgaggagctgctgaagtacctggtgtacatcctgagaaaggccgccagaagactggcccaggtgagcagagccgccggcgtgagagtgggcctgctgagcagccccgcccccctgggcggccaggagacccagcccagcagcagctgcagcagaagccacagaagactgagcgtgcaccacctggtgcaccaccaccaccaccaccaccaccactaccacctgggcaacggcaccctgagagcccccagagccagccccgagatccaggacagagacgccaacggcagcagaagactgatgctgcccccccccagcacccccgccctgagcggcgccccccccggcggcgccgagagcgtgcacagcttctaccacgccgactgccacctggagcccgtgagatgccaggcccccccccccagaagccccagcgaggccagcggcagaaccgtgggcagcggcaaggtgtaccccaccgtgcacaccagccccccccccgagaccctgaaggagaaggccctggtggaggtggccgccagcagcggcccccccaccctgaccagcctgaacatcccccccggcccctacagcagcatgcacaagctgctggagacccagagcaccggcgcctgccagagcagctgcaagatcagcagcccctgcctgaaggccgacagcggcgcctgcggccccgacagctgcccctactgcgccagagccggcgccggcgaggtggagctggccgacagagagatgcccgacagcgacagcgaggccgtgtacgagttcacccaggacgcccagcacagcgacctgagagacccccacagcagaagacagagaagcctgggccccgacgccgagcccagcagcgtgctggccttctggagactgatctgcgacaccttcagaaagatcgtggacagcaagtacttcggcagaggcatcatgatcgccatcctggtgaacaccctgagcatgggcatcgagtaccacgagcagcccgaggagctgaccaacgccctggagatcagcaacatcgtgttcaccagcctgttcgccctggagatgctgctgaagctgctggtgtacggccccttcggctacatcaagaacccctacaacatcttcgacggcgtgatcgtggtgatcagcgtgtgggagatcgtgggccagcagggcggcggcctgagcgtgctgagaaccttcagactgatgagagtgctgaagctggtgagattcctgcccgccctgcagagacagctggtggtgctgatgaagaccatggacaacgtggccaccttctgcatgctgctgatgctgttcatcttcatcttcagcatcctgggcatgcacctgttcggctgcaagttcgccagcgagagagacggcgacaccctgcccgacagaaagaacttcgacagcctgctgtgggccatcgtgaccgtgttccagatcctgacccaggaggactggaacaaggtgctgtacaacggcatggccagcaccagcagctgggccgccctgtacttcatcgccctgatgaccttcggcaactacgtgctgttcaacctgctggtggccatcctggtggagggcttccaggccgaggagatcagcaagagagaggacgccagcggccagctgagctgcatccagctgcccgtggacagccagggcggcgacgccaacaagagcgagagcgagcccgacttcttcagccccagcctggacggcgacggcgacagaaagaagtgcctggccctggtgagcctgggcgagcaccccgagctgagaaagagcctgctgccccccctgatcatccacaccgccgccacccccatgagcctgcccaagagcaccagcaccggcctgggcgaggccctgggccccgccagcagaagaaccagcagcagcggcagcgccgagcccggcgccgcccacgagatgaagagcccccccagcgccagaagcagcccccacagcccctggagcgccgccagcagctggaccagcagaagaagcagcagaaacagcctgggcagagcccccagcctgaagagaagaagccccagcggcgagagaagaagcctgctgagcggcgagggccaggagagccaggacgaggaggagagcagcgaggaggagagagccagccccgccggcagcgaccacagacacagaggcagcctggagagagaggccaagagcagcttcgacctgcccgacaccctgcaggtgcccggcctgcacagaaccgccagcggcagaggcagcgccagcgagcaccaggactgcaacggcaagagcgccagcggcagactggccagagccctgagacccgacgacccccccctggacggcgacgacgccgacgacgagggcaacctgagcaagggcgagagagtgagagcctggatcagagccagactgcccgcctgctgcctggagagagacagctggagcgcctacatcttccccccccagagcagattcagactgctgtgccacagaatcatcacccacaagatgttcgaccacgtggtgctggtgatcatcttcctgaactgcatcaccatcgccatggagagacccaagatcgacccccacagcgccgagagaatcttcctgaccctgagcaactacatcttcaccgccgtgttcctggccgagatgaccgtgaaggtggtggccctgggctggtgcttcggcgagcaggcctacctgagaagcagctggaacgtgctggacggcctgctggtgctgatcagcgtgatcgacatcctggtgagcatggtgagcgacagcggcaccaagatcctgggcatgctgagagtgctgagactgctgagaaccctgagacccctgagagtgatcagcagagcccagggcctgaagctggtggtggagaccctgatgagcagcctgaagcccatcggcaacatcgtggtgatctgctgcgccttcttcatcatcttcggcatcctgggcgtgcagctgttcaagggcaagttcttcgtgtgccagggcgaggacaccagaaacatcaccaacaagagcgactgcgccgaggccagctacagatgggtgagacacaagtacaacttcgacaacctgggccaggccctgatgagcctgttcgtgctggccagcaaggacggctgggtggacatcatgtacgacggcctggacgccgtgggcgtggaccagcagcccatcatgaaccacaacccctggatgctgctgtacttcatcagcttcctgctgatcgtggccttcttcgtgctgaacatgttcgtgggcgtggtggtggagaacttccacaagtgcagacagcaccaggaggaggaggaggccagaagaagagaggagaagagactgagaagactggagaagaagagaagaaacctgatgctggacgacgtgatcgccagcggcagcagcgccagcgccgccagcgaggcccagtgcaagccctactacagcgactacagcagattcagactgctggtgcaccacctgtgcaccagccactacctggacctgttcatcaccggcgtgatcggcctgaacgtggtgaccatggccatggagcactaccagcagccccagatcctggacgaggccctgaagatctgcaactacatcttcaccgtgatcttcgtgctggagagcgtgttcaagctggtggccttcggcttcagaagattcttccaggacagatggaaccagctggacctggccatcgtgctgctgagcatcatgggcatcaccctggaggagatcgaggtgaacgccagcctgcccatcaaccccaccatcatcagaatcatgagagtgctgagaatcgccagagtgctgaagctgctgaagatggccgtgggcatgagagccctgctggacaccgtgatgcaggccctgccccaggtgggcaacctgggcctgctgttcatgctgctgttcttcatcttcgccgccctgggcgtggagctgttcggcgacctggagtgcgacgagacccacccctgcgagggcctgggcagacacgccaccttcagaaacttcggcatggccttcctgaccctgttcagagtgagcaccggcgacaactggaacggcatcatgaaggacaccctgagagactgcgaccaggagagcacctgctacaacaccgtgatcagccccatctacttcgtgagcttcgtgctgaccgcccagttcgtgctggtgaacgtggtgatcgccgtgctgatgaagcacctggaggagagcaacaaggaggccaaggaggaggccgagctggaggccgagctggagctggagatgaagaccctgagcccccagccccacagccccctgggcagccccttcctgtggcccggcgtggagggccccgacagccccgacagccccaagcccggcgccctgcaccccgccgcccacgccagaagcgccagccacttcagcctggagcaccccaccgacagacagctgttcgacaccatcagcctgctgatccagggcagcctggagtgggagctgaagctgatggacgagctggccggccccggcggccagcccagcgccttccccagcgcccccagcctgggcggcagcgacccccagatccccctggccgagatggaggccctgagcctgaccagcgagatcgtgagcgagcccagctgcagcctggccctgaccgacgacagcctgcccgacgacatgcacaccctgctgctgagcgccctggagagcaacatgcagccccaccccaccgagctgcccggccccgacctgctgaccgtgagaaagagcggcgtgagcagaacccacagcctgcccaacgacagctacatgtgcagacacggcagcaccgccgagggccccctgggccacagaggctggggcctgcccaaggcccagagcggcagcgtgctgagcgtgcacagccagcccgccgacaccagctacatcctgcagctgcccaaggacgccccccacctgctgcagccccacagcgcccccacctggggcaccatccccaagctgcccccccccggcagaagccccctggcccagagacccctgagaagacaggccgccatcagaaccgacagcctggacgtgcagggcctgggcagcagagaggacctgctggccgaggtgagcggccccagcccccccctggccagagcctacagcttctggggccagagcagcacccaggcccagcagcacagcagaagccacagcaagatcagcaagcacatgaccccccccgccccctgccccggccccgagcccaactggggcaagggcccccccgagaccagaagcagcctggagctggacaccgagctgagctggatcagcggcgacctgctgccccccggcggccaggaggagccccccagccccagagacctgaagaagtgctacagcgtggaggcccagagctgccagagaagacccaccagctggctggacgagcagagaagacacagcatcgccgtgagctgcctggacagcggcagccagccccacctgggcaccgaccccagcaacctgggcggccagcccctgggcggccccggcagcagacccaagaagaagctgagcccccccagcatcaccatcgacccccccgagagccagggccccagaaccccccccagccccggcatctgcctgagaagaagagcccccagcagcgacagcaaggaccccctggccagcggcccccccgacagcatggccgccagccccagccccaagaaggacgtgctgagcctgagcggcctgagcagcgaccccgccgacctggacccctag

SEQ ID NO: 200366 - DNA, 5331 bp, Artificial Sequence
  derived and/or modified sequence
atggacgaggaggaggacggcgccggcgccgaggagagcggccagcccagaagcttcatgagactgaacgacctgagcggcgccggcggcagacccggccccggcagcgccgagaaggaccccggcagcgccgacagcgaggccgagggcctgccctaccccgccctggcccccgtggtgttcttctacctgagccaggacagcagacccagaagctggtgcctgagaaccgtgtgcaacccctggttcgagagaatcagcatgctggtgatcctgctgaactgcgtgaccctgggcatgttcagaccctgcgaggacatcgcctgcgacagccagagatgcagaatcctgcaggccttcgacgacttcatcttcgccttcttcgccgtggagatggtggtgaagatggtggccctgggcatcttcggcaagaagtgctacctgggcgacacctggaacagactggacttcttcatcgtgatcgccggcatgctggagtacagcctggacctgcagaacgtgagcttcagcgccgtgagaaccgtgagagtgctgagacccctgagagccatcaacagagtgcccagcatgagaatcctggtgaccctgctgctggacaccctgcccatgctgggcaacgtgctgctgctgtgcttcttcgtgttcttcatcttcggcatcgtgggcgtgcagctgtgggccggcctgctgagaaacagatgcttcctgcccgagaacttcagcctgcccctgagcgtggacctggagagatactaccagaccgagaacgaggacgagagccccttcatctgcagccagcccagagagaacggcatgagaagctgcagaagcgtgcccaccctgagaggcgacggcggcggcggccccccctgcggcctggactacgaggcctacaacagcagcagcaacaccacctgcgtgaactggaaccagtactacaccaactgcagcgccggcgagcacaaccccttcaagggcgccatcaacttcgacaacatcggctacgcctggatcgccatcttccaggtgatcaccctggagggctgggtggacatcatgtacttcgtgatggacgcccacagcttctacaacttcatctacttcatcctgctgatcatcgtgggcagcttcttcatgatcaacctgtgcctggtggtgatcgccacccagttcagcgagaccaagcagagagagagccagctgatgagagagcagagagtgagattcctgagcaacgccagcaccctggccagcttcagcgagcccggcagctgctacgaggagctgctgaagtacctggtgtacatcctgagaaaggccgccagaagactggcccaggtgagcagagccgccggcgtgagagtgggcctgctgagcagccccgcccccctgggcggccaggagacccagcccagcagcagctgcagcagaagccacagaagactgagcgtgcaccacctggtgcaccaccaccaccaccaccaccaccactaccacctgggcaacggcaccctgagagcccccagagccagccccgagatccaggacagagacgccaacggcagcagaagactgatgctgcccccccccagcacccccgccctgagcggcgccccccccggcggcgccgagagcgtgcacagcttctaccacgccgactgccacctggagcccgtgagatgccaggcccccccccccagaagccccagcgaggccagcggcagaaccgtgggcagcggcaaggtgtaccccaccgtgcacaccagccccccccccgagaccctgaaggagaaggccctggtggaggtggccgccagcagcggcccccccaccctgaccagcctgaacatcccccccggcccctacagcagcatgcacaagctgctggagacccagagcaccggcgcctgccagagcagctgcaagatcagcagcccctgcctgaaggccgacagcggcgcctgcggccccgacagctgcccctactgcgccagagccggcgccggcgaggtggagctggccgacagagagatgcccgacagcgacagcgaggccgtgtacgagttcacccaggacgcccagcacagcgacctgagagacccccacagcagaagacagagaagcctgggccccgacgccgagcccagcagcgtgctggccttctggagactgatctgcgacaccttcagaaagatcgtggacagcaagtacttcggcagaggcatcatgatcgccatcctggtgaacaccctgagcatgggcatcgagtaccacgagcagcccgaggagctgaccaacgccctggagatcagcaacatcgtgttcaccagcctgttcgccctggagatgctgctgaagctgctggtgtacggccccttcggctacatcaagaacccctacaacatcttcgacggcgtgatcgtggtgatcagcgtgtgggagatcgtgggccagcagggcggcggcctgagcgtgctgagaaccttcagactgatgagagtgctgaagctggtgagattcctgcccgccctgcagagacagctggtggtgctgatgaagaccatggacaacgtggccaccttctgcatgctgctgatgctgttcatcttcatcttcagcatcctgggcatgcacctgttcggctgcaagttcgccagcgagagagacggcgacaccctgcccgacagaaagaacttcgacagcctgctgtgggccatcgtgaccgtgttccagatcctgacccaggaggactggaacaaggtgctgtacaacggcatggccagcaccagcagctgggccgccctgtacttcatcgccctgatgaccttcggcaactacgtgctgttcaacctgctggtggccatcctggtggagggcttccaggccgaggagatcagcaagagagaggacgccagcggccagctgagctgcatccagctgcccgtggacagccagggcggcgacgccaacaagagcgagagcgagcccgacttcttcagccccagcctggacggcgacggcgacagaaagaagtgcctggccctggtgagcctgggcgagcaccccgagctgagaaagagcctgctgccccccctgatcatccacaccgccgccacccccatgagcctgcccaagagcaccagcaccggcctgggcgaggccctgggccccgccagcagaagaaccagcagcagcggcagcgccgagcccggcgccgcccacgagatgaagagcccccccagcgccagaagcagcccccacagcccctggagcgccgccagcagctggaccagcagaagaagcagcagaaacagcctgggcagagcccccagcctgaagagaagaagccccagcggcgagagaagaagcctgctgagcggcgagggccaggagagccaggacgaggaggagagcagcgaggaggagagagccagccccgccggcagcgaccacagacacagaggcagcctggagagagaggccaagagcagcttcgacctgcccgacaccctgcaggtgcccggcctgcacagaaccgccagcggcagaggcagcgccagcgagcaccaggactgcaacggcaagagcgccagcggcagactggccagagccctgagacccgacgacccccccctggacggcgacgacgccgacgacgagggcaacctgagcaagggcgagagagtgagagcctggatcagagccagactgcccgcctgctgcctggagagagacagctggagcgcctacatcttccccccccagagcagattcagactgctgtgccacagaatcatcacccacaagatgttcgaccacgtggtgctggtgatcatcttcctgaactgcatcaccatcgccatggagagacccaagatcgacccccacagcgccgagagaatcttcctgaccctgagcaactacatcttcaccgccgtgttcctggccgagatgaccgtgaaggtggtggccctgggctggtgcttcggcgagcaggcctacctgagaagcagctggaacgtgctggacggcctgctggtgctgatcagcgtgatcgacatcctggtgagcatggtgagcgacagcggcaccaagatcctgggcatgctgagagtgctgagactgctgagaaccctgagacccctgagagtgatcagcagagcccagggcctgaagctggtggtggagaccctgatgagcagcctgaagcccatcggcaacatcgtggtgatctgctgcgccttcttcatcatcttcggcatcctgggcgtgcagctgttcaagggcaagttcttcgtgtgccagggcgaggacaccagaaacatcaccaacaagagcgactgcgccgaggccagctacagatgggtgagacacaagtacaacttcgacaacctgggccaggccctgatgagcctgttcgtgctggccagcaaggacggctgggtggacatcatgtacgacggcctggacgccgtgggcgtggaccagcagcccatcatgaaccacaacccctggatgctgctgtacttcatcagcttcctgctgatcgtggccttcttcgtgctgaacatgttcgtgggcgtggtggtggagaacttccacaagtgcagacagcaccaggaggaggaggaggccagaagaagagaggagaagagactgagaagactggagaagaagagaagaaacctgatgctggacgacgtgatcgccagcggcagcagcgccagcgccgccagcgaggcccagtgcaagccctactacagcgactacagcagattcagactgctggtgcaccacctgtgcaccagccactacctggacctgttcatcaccggcgtgatcggcctgaacgtggtgaccatggccatggagcactaccagcagccccagatcctggacgaggccctgaagatctgcaactacatcttcaccgtgatcttcgtgctggagagcgtgttcaagctggtggccttcggcttcagaagattcttccaggacagatggaaccagctggacctggccatcgtgctgctgagcatcatgggcatcaccctggaggagatcgaggtgaacgccagcctgcccatcaaccccaccatcatcagaatcatgagagtgctgagaatcgccagagtgctgaagctgctgaagatggccgtgggcatgagagccctgctggacaccgtgatgcaggccctgccccagctgtgggcctggagcagcctggagacctggagcgtgaccagacacacccccgtgagagcctgggccgtgatgccccccttcggcaccctggcctggcccagctag

SEQ ID NO: 200367 - DNA, 7134 bp, Artificial Sequence
  derived and/or modified sequence
atggacgaggaagaagatggcgctggagccgaagagtctggacaacctcggtcgtttatgcgtctgaatgacttgtccggcgctggcgggcgtccgggacccggcagcgctgagaaagaccccgggagtgcagattcagaggccgagggattaccttacccagccctcgcacctgtggtattcttctacctaagccaggacagtcgcccacggtcttggtgcctccgtaccgtgtgcaacccctggttcgaaagaatctccatgctcgtcatccttctgaactgcgttacacttgggatgttcagaccctgtgaggacattgcctgtgactcgcagcggtgtcgcattctccaggcgttcgatgacttcatttttgctttttttgctgtggagatggtggtaaaaatggttgcactgggtatttttggtaaaaaatgttacctgggcgacacttggaaccgattagatttcttcattgtgattgccggaatgctggagtattccctggacctccagaatgtctctttctcggcagtgcgtacagtgcgagtcctgcgtcccctgagggccatcaaccgtgtcccttcaatgcgcatccttgttacattactccttgatacgttgccgatgttaggcaacgtgttacttctttgtttcttcgtattttttattttcggtatagtgggcgtgcagttatgggccggactgttgcgaaataggtgcttcttaccagaaaatttttcactgcctctgagcgtcgatttggagcgctactaccaaactgaaaacgaggatgagtcgcctttcatatgttcacagcccagagaaaatggcatgaggagctgcaggagtgtgccgacccttaggggagacggcgggggaggtcccccctgtggactggactacgaagcctacaattcctcaagtaatacaacgtgcgtgaattggaatcaatattatacaaactgttcagcgggcgagcataatccatttaagggggctataaattttgataacattggctacgcctggatcgccatctttcaggtaattacactggagggctgggtggatataatgtatttcgtaatggatgcccattccttttataatttcatctacttcattctcctcatcatcgtaggaagctttttcatgattaacctgtgcctggtggttattgctacacaattctcggagacaaagcaacgcgaaagccagctgatgcgtgaacagcgtgtgaggtttcttagcaacgcgtcgaccttagcttccttcagcgagcccggaagctgttacgaagagttgctgaaatacctggtctatattctccggaaagcagctaggcgacttgcccaggtatccagggccgccggagtccgcgtcggactgttgtcatctcctgccccgttgggcggccaggagacccagccaagctcaagctgctctcggtcccatcggcgactgtctgttcatcatctggtgcaccaccatcaccaccatcaccatcactatcatctgggcaatggtaccctgagggccccacgcgcatctcctgaaatccaagacagagatgccaacggctcccgaaggctgatgctccctcctccctctacgccggccctgtccggcgcaccacctggaggagccgaatctgtccactcattctaccacgccgactgtcatttagagccagtccgctgtcaagcccctccaccaagaagtccttctgaagcaagtgggcgcacggtcgggtctggcaaggtgtaccctacagtgcatacatcacccccgccagagactttgaaggaaaaagccctggtggaagttgcagctagttccggccctcccacactgacctcactgaacatcccaccagggccgtactcaagcatgcataaactgctggagactcagtctacgggggcctgtcaaagttcatgcaaaataagttcaccctgccttaaagcggattccggcgcatgcggtcctgacagttgcccttattgcgcacgggccggggctggggaagttgagctcgcagacagagagatgccagactcagatagtgaagccgtctatgagttcacccaggacgcacaacactctgacctacgggatcctcattctaggcggcagaggtcactcgggcctgacgcggagccgtctagcgttcttgcgttctggcgcctgatctgtgacactttcagaaaaatcgtcgactcaaaatacttcggacgcgggatcatgatagcaatcctcgtgaatacgttaagcatggggattgagtatcatgagcaacctgaggaactgacaaacgcccttgaaatcagtaatatcgtgtttaccagcctcttcgctcttgaaatgctccttaagctgctcgtgtatgggccttttggatatattaaaaacccctataatatctttgacggagtcatcgtcgtgatttcagtctgggaaatcgtggggcagcagggagggggtttgtccgtgctgagaaccttccgtcttatgagggtacttaaactggtgagattcttgccagcactccagaggcagcttgttgtcctgatgaaaaccatggataacgtggctacgttctgtatgctcttaatgttgttcatattcatattcagtatactgggcatgcacctgttcgggtgcaaattcgcctccgagagggatggtgacaccctcccagaccggaaaaacttcgatagtttactgtgggccatcgtgaccgtgtttcagatcttaactcaggaagattggaacaaagtgctctataatggtatggcttccacatcttcttgggccgccttatattttatcgccctgatgacattcggcaattacgtgttgtttaaccttctggtcgctattctcgtcgaaggctttcaggccgaagagatctctaaacgtgaagatgcaagtggacagctgtcctgcatccagctcccagtcgatagccagggcggagatgcgaacaagtctgagtccgaacctgatttcttctctccctccttggacggcgatggggatcgaaaaaaatgcctggcccttgtctctctgggagagcacccggaattgaggaaatctcttctgcctcccctaatcattcacacagccgctaccccaatgtcattgcctaagtccacctccacagggttaggcgaagctctcggccccgcgtcacgccggacgtcttcatcaggctcagcagaaccaggcgctgcacacgaaatgaaatcgcctcccagcgccagaagcagtccccactctccatggtccgctgccagttcctggacaagcagaaggtccagcagaaacagcctagggagggccccgtccctgaaacgcaggtcacccagtggagaacgcagatccctcctctcaggcgagggtcaggagagtcaggatgaggaagaaagcagtgaggaagagcgcgcctcccccgccgggagcgaccaccgtcaccggggaagcctggagagagaggcaaagagtagtttcgacctacccgacaccttacaggtgcctgggctccacagaaccgcctccggtcggggtagtgcatccgagcaccaggattgtaacgggaagagtgcctccggaaggcttgctcgggctctccgccccgacgatccaccattggatggagacgatgcagacgacgaaggaaatctcagcaaaggggagagagttcgggcctggatccgcgcccgtcttccggcttgctgtttggaacgggacagctggtccgcatatatcttcccgccacagtccagattccggctactttgccataggataataactcacaagatgttcgatcacgtggtactggtgatcatcttcctgaactgcatcacaattgccatggagaggccaaagatcgatccccactcagccgagcggatctttctgaccctgtctaactacatcttcacagctgttttcctcgcggaaatgaccgtgaaggtggtcgctttgggatggtgctttggggaacaagcatacctcagatcctcctggaacgtgctggacggcctgttggtcctgatctctgtgattgacatcctcgtcagtatggtgtcagactcaggcacgaagattctgggcatgctgagagtactgcgtttactacggacactgaggccgctgcgagtgatcagtagagctcaggggctgaaacttgtggtcgaaacactgatgtcaagtctgaaacctattggcaatatcgttgtaatctgctgcgccttctttatcatcttcggaatactgggcgttcagcttttcaagggcaagttttttgtatgccaaggggaagatacccgcaacattaccaataagagcgattgtgccgaagcaagttataggtgggtgagacataagtacaatttcgacaatcttggccaggcactgatgtcactgtttgtgttggccagtaaggacggttgggttgacataatgtatgatgggctggacgctgttggagtagaccaacagcctataatgaaccataatccctggatgctgctttacttcatttccttcttgctgatcgttgccttcttcgtgctgaacatgttcgtcggagttgtagtggagaacttccataagtgtcgccagcaccaggaagaagaggaggctcggcgcagggaagaaaagaggctgaggcgtctcgagaagaaaaggagaaacctgatgctggacgacgtgatcgcttccgggtcctctgcaagtgcggcatctgaggcacagtgtaagccttactattctgactactctaggttccgactgttggtgcaccacctgtgtacttctcattacctcgacctgttcattacaggggttatcgggttaaacgtggtgactatggctatggagcactaccaacagccccagatccttgatgaagcactcaagatttgcaattatatcttcaccgtgattttcgtactcgaatccgtgtttaaactggtcgcatttggatttaggagattcttccaggatcgctggaatcagttggatctagccatcgttttgctctccattatgggaatcactttggaggaaatagaggtgaatgccagcctaccgatcaatccaactatcatcagaattatgcgagtcctgcgaatcgccagagtattaaaactcctcaagatggccgtgggcatgcgggcactgctcgatacggtgatgcaggcattgccacaggttgggaacttgggtctgctttttatgctcctcttttttatcttcgccgcactgggtgtcgagttattcggtgacctcgagtgtgacgaaacccacccttgtgaggggcttggccgccatgccacatttagaaattttggtatggcttttctgacccttttccgggtttctacgggagataattggaatggaataatgaaggataccctgcgtgactgtgatcaggaaagtacttgttacaacaccgttatcagcccaatttattttgtgagttttgtgctgaccgctcagttcgtcctggttaacgtggttatagctgtgctgatgaaacaccttgaagaatctaacaaggaggccaaagaagaggccgaattggaagccgagctagagctcgagatgaaaaccctttcgccacagccacactctcccctaggaagtccatttttgtggcccggcgtggaaggaccagacagcccagactctccgaagcctggggcactccatccggctgcccacgcccggagcgccagtcatttcagtctcgaacatcctacagatcgacaactgtttgatactataagcctcctcattcagggaagtctggagtgggagctcaagctcatggacgaacttgcgggcccaggaggccaacctagcgccttcccctccgccccctcgttaggaggctccgatcctcagattcctcttgcggagatggaggccctgagcctaaccagtgagattgtctcggaaccgagctgttccctcgccctaaccgacgattctttgcccgatgacatgcataccctgcttctgagcgctctggagagcaacatgcagccacatcctaccgagctgcccgggcctgacctgttgacagtacgtaagtccggggtttcccggactcactccctcccaaacgactcatatatgtgccgacatggtagcaccgccgaggggcctctcggacatagaggttggggcttacctaaagcgcagagtggctccgttttgtctgtgcacagtcaacctgctgataccagttatatcttgcagctgcccaaggatgcaccccatttactccagcctcattctgccccaacatggggtacaattcccaaactcccaccaccaggccgctcccccctggcgcagcggccccttcgccgacaggccgctattcggactgattctctcgatgtgcaagggctgggcagtcgcgaggatttgctggccgaggtgtcaggcccctccccgccacttgcacgtgcatactctttttggggacaatcatctacccaggcccaacagcactctcgctcccactctaaaatctcaaagcacatgacaccaccggctccttgtcctggccctgaacccaattgggggaaaggccccccagagacgaggtccagcttggagctcgatactgagctgtcctggattagcggggacctgcttcctccggggggccaagaggagccacctagccccagggacctgaaaaagtgttatagcgtggaagcacaatcttgccagcgcagacccacctcgtggttggatgagcaacggaggcattcaattgccgtgagctgcttagactcagggtcccaacctcatcttggaacggacccatcaaacctcgggggccagccattgggcggccccggcagccgcccaaagaaaaaattaagtcccccttccattactattgatcccccagagtcacagggaccccgaacccccccatcacctggtatctgcctacgacgcagggccccttcatccgactcaaaagacccattggccagtgggcccccagactccatggctgcctcccctagtcctaaaaaggatgtgctttctctttccggcctgtcatcagatcccgcggatttagatccctag

SEQ ID NO: 200368 - DNA, 5331 bp, Artificial Sequence
  derived and/or modified sequence
atggatgaagaagaagatggtgcgggcgccgaggagtctggccagccaagatcatttatgaggcttaacgacctgagtggcgccggcggacggcctggcccaggctcggccgagaaagatccaggctctgctgactctgaagccgagggcctcccttacccggctcttgcgcctgtagtttttttttacctcagccaagactctagacccaggtcctggtgtctgcgcactgtgtgtaatccatggttcgaaaggatttctatgctggtgatactgttaaactgtgtgacactcggcatgtttagaccatgtgaagatatcgcctgcgattcgcagcgttgcaggattctgcaggcttttgatgactttattttcgctttttttgcggtcgaaatggtcgtcaagatggtcgcccttggcatattcgggaagaaatgttatctcggggatacatggaatcgtttagactttttcatcgtgatcgccggcatgttggagtattccttagatctccagaacgtcagcttctctgcagttcgaaccgtgcgcgtattgcggccactcagagcaatcaaccgcgtccccagtatgcgcatcctcgtcacgctgttactcgacacactgccaatgctgggaaatgtgctgctgctgtgctttttcgtttttttcatattcgggatagtgggggtccagctttgggccggtttgctgaggaataggtgtttcctgccagaaaatttctcactgcctctgtctgttgatttggagaggtattaccagactgaaaatgaggatgagagtccatttatttgttcacagcctagggagaacggcatgagatcatgcagaagtgtgccgacattgcggggggatggcggcggcggcccaccatgtggcctcgactatgaagcctataactcatcctcaaataccacttgtgttaattggaatcagtactacacgaattgttcagccggcgaacataatccctttaagggagccatcaactttgataacattgggtatgcttggatcgccatcttccaggtcatcaccctggagggctgggtggatataatgtatttcgttatggatgcccacagtttctacaacttcatctatttcattctcctgatcatcgtaggcagcttctttatgatcaacctctgcttggtggtcattgccacacaattcagcgagaccaagcaacgggagtcccaactgatgagggaacagcgggtgcggtttctgagtaatgccagtactctggccagctttagcgagccgggctcctgctatgaggagctgctaaagtatctggtttatattctgagaaaggcggctcgccggctggcgcaagtgtctcgggccgccggagtgagagtgggcttactaagttctccagcaccactgggtgggcaggagactcagccaagctcctcttgcagcaggtcgcaccgtcgcctaagcgttcaccacctagtgcatcaccatcaccaccatcaccaccattaccacctgggaaacggcactttgagggcaccccgggcgtctccagaaattcaggatagagacgccaacggatcacgtaggctaatgttacctcccccctctactcctgccctgtcaggagcgccacctggaggtgctgaaagtgtacactctttttaccatgcggactgtcacctcgagccggtccgctgccaggctcctcctcctagaagtccttctgaggcttctggccgcacagttggcagtggcaaagtgtatcccaccgtacacacatctcctcctcctgagaccctgaaggagaaggcattggtggaggtcgccgcctcttctggaccgccgacgttaacgtcattaaacatcccacctggcccatactcctctatgcataaactgctggaaactcagtcaacaggggcatgtcagtcatcctgtaaaatctcctccccttgcctcaaagccgattcaggtgcctgtgggccggactcttgcccctactgtgcacgggctggggctggagaagtcgagctggccgatagagaaatgcctgactctgatagcgaagcggtgtacgaattcacccaggatgcacaacactctgatctacgcgacccccactctaggcgccagagatccctggggcctgatgctgagccttcaagtgtccttgccttttggcgactcatttgtgatacctttagaaagatcgtcgactcaaaatattttggcagggggataatgatagcaattttagtcaatacactgagcatggggatcgagtatcacgaacagcctgaagagctcaccaatgctttagagataagcaacattgtgtttactagcctgttcgctctggaaatgttgctcaagttgttggtgtacggaccatttggttatataaagaacccttacaacatatttgacggcgttatcgttgtgatctccgtgtgggaaattgtgggccagcaaggcggcggactctcagtgctgagaacatttaggctcatgagggtactaaagcttgtacgtttcctgccagctttacagagacagctggtggtgttaatgaaaacaatggacaacgttgccaccttctgtatgctgttaatgctattcatctttatcttttctatcctcgggatgcacctgtttggatgcaagttcgcatccgagagagacggggatacccttccagatcgcaaaaatttcgactctctgctgtgggcaattgtgactgtttttcagatcctgacccaagaggactggaacaaagtactgtacaacgggatggcttcgaccagcagctgggccgcactctacttcattgcactcatgacctttggcaactacgtcctgttcaaccttctggttgcgatcttggtggagggctttcaggccgaggaaatctcgaaaagagaagacgcatccggccaattgtcatgcattcaacttcccgtcgattcgcagggaggagatgcaaacaaatcggagtcggagcctgactttttcagtcctagcctcgatggggacggcgacaggaagaagtgccttgcattggtgtctctgggcgagcaccctgaactccgtaaatctttactgcctcctctcatcatccacaccgcagctaccccaatgtccttacctaagagcacaagcaccggactgggcgaggccctgggccctgcctctcgccgtacttcctcctcgggctcagccgaacccggcgccgcgcacgagatgaaaagtccgccgtcagcccgcagtagcccccatagtccttggtctgctgcgtctagctggaccagtcggcgatcatcaagaaatagcctggggagagctcccagcctgaagcggcggtccccttcaggcgaacggcggagccttctgtccggcgagggacaggaatcgcaggatgaggaggaaagttccgaggaagagcgggcttcaccagccggtagcgatcaccgacatagagggagcctggaaagggaagctaaatcttcgttcgatctcccagataccctccaggttccgggcttgcatcgaaccgcctctggaagagggtctgccagcgaacaccaggactgtaatggaaaaagcgccagcggccggctcgcccgcgcactgcgccccgatgacccgcctctggacggtgacgacgccgatgatgagggcaacctgtccaagggcgagcgcgtgcgcgcgtggatcagagcgaggcttcccgcctgctgcctggaacgcgattcttggtccgcctacattttccccccacaatctaggttcaggcttttgtgccaccgcattattacccacaaaatgtttgatcatgtggtcctggtgattatcttccttaactgtattacaatcgctatggagcgaccaaaaatcgatccacattcagctgagagaatctttttgacactttcaaactacattttcactgccgtttttctcgctgagatgacagtgaaggtggtagccctagggtggtgtttcggggaacaagcttaccttcgatccagttggaacgtactcgacggtctgctcgtactcattagtgtcattgacatcttggtgagcatggtatccgatagcggcactaagattttgggcatgttgagagtactgaggctgttgagaaccctacgaccactaagagttattagccgtgcccaaggcctaaaattggttgttgaaacactgatgtcgagccttaagcccatcggcaacatagtcgtgatctgctgcgcatttttcatcatcttcggcatcctgggagtgcaattgttcaagggtaaattcttcgtttgtcagggggaagatacacgcaatattacaaataagagcgattgcgcagaagctagctaccggtgggtgcggcacaaatacaatttcgacaatctgggtcaggcactcatgagtttgtttgtgcttgcgagcaaggacgggtgggtggatatcatgtacgatgggcttgatgcagtgggggtggatcagcaaccaatcatgaaccacaacccatggatgctcctgtacttcatctcctttctgcttatcgtggcattttttgtcctcaacatgtttgtgggtgtcgtggtggaaaacttccacaagtgccggcagcatcaggaggaggaggaggctcgacgaagagaggagaaaagactcagaaggctggagaaaaaaaggcggaacctgatgctcgatgatgtgatagcttcaggaagctccgcctctgcggcctctgaggctcaatgcaagccgtactactccgattactcacgctttcgcctgctggttcatcacctctgcaccagccactacttagacttgtttatcaccggcgtgattggactgaacgttgtgaccatggcgatggagcattaccagcagcctcaaatccttgatgaagcacttaagatctgtaattacatatttacagtaattttcgtcctcgagtctgtattcaagcttgtcgcgtttgggtttcggaggttcttccaggatagatggaatcagctagacctggcgattgtactgctcagcatcatgggcataacccttgaggagattgaggtgaatgcctctttaccgataaatcctaccattattcgaattatgcgagtgttaaggatcgccagagtgcttaagctgcttaagatggctgttgggatgcgggctctgctggacaccgtaatgcaggccctgcctcagctctgggcttggtcctctcttgaaacctggtccgtgacaaggcacacccccgtgagagcatgggctgttatgccgccttttggcacacttgcttggccttcatag

SEQ ID NO: 200369 - DNA, 7134 bp, Artificial Sequence
  derived and/or modified sequence
atggatgaggaggaggatggagctggagctgaggagagcggccagcccaggagcttcatgaggctgaatgacctgagcggggccggcggccggcccggccctggcagcgctgagaaggaccccggcagcgctgacagcgaggccgagggcctgccctacccagccctggcccctgtggtgttcttctacctgagccaggacagccggcccaggtcctggtgcctgaggacagtgtgcaacccctggtttgagcgcatctccatgctggtgatcctgctgaactgtgtgaccctgggcatgttccggccctgtgaagatattgcctgtgacagccagcgctgccgcatcctgcaggcctttgatgacttcatctttgccttctttgctgtggagatggtggtgaagatggtggccctgggcatctttgggaagaagtgctacctgggggacacctggaaccggctggacttcttcatcgtgattgctggcatgctggagtacagcctggacctgcagaatgtgtccttctctgctgtgaggacagtgcgggtgctgcggcccctgcgggccatcaacagagtgcccagcatgaggatcctggtgaccctgctgctggacaccctgcccatgctgggcaatgtgctgctgctgtgcttctttgtgttcttcatctttggaattgtgggcgtgcagctgtgggccggcctgctgaggaaccgctgcttcctgcctgagaacttcagcctgcccctgtctgtggacctggagcgctactaccagacagaaaatgaagatgagagccccttcatctgcagccagccccgggagaatggcatgaggagctgccgctctgtgcccaccctgcggggagatggcggcggcggccccccctgtggcctggactatgaggcctacaacagcagcagcaacaccacctgtgtgaactggaaccagtactacaccaactgcagcgctggggagcacaaccccttcaagggggccatcaactttgacaacatcggctacgcctggatcgccatcttccaggtgatcaccctggagggctgggtggacatcatgtactttgtgatggatgcccacagcttctacaacttcatctacttcatcctgctgatcatcgtgggcagcttcttcatgatcaacctgtgcctggtggtgattgccacccagttcagcgagaccaagcagcgggagagccagctgatgagggagcagagggtgcgcttcctgagcaatgccagcaccctggccagcttcagcgagcccggcagctgctatgaggagctgctgaagtacctggtgtacatcctgaggaaggccgcccggcggctggcccaggtgtccagagctgctggggtgcgggtgggcctgctgagcagccctgcccccctgggcggccaggagacccagcccagcagcagctgcagccgcagccaccggcggctgtctgtgcaccacctggtgcaccaccaccaccaccaccaccaccactaccacctgggcaatggcaccctgcgggccccccgggccagccctgagatccaggacagagatgccaacggcagccggcggctgatgctgcccccacccagcaccccagccctgagcggggcccctcctggaggagctgagagcgtgcacagcttctaccacgccgactgccacctggagcctgtgcgctgccaggcccccccacccaggagccccagcgaggccagcggccgcacagtgggcagcggcaaggtgtaccccaccgtgcacaccagccccccacctgagaccctgaaggagaaggccctggtggaggtggccgccagcagcggcccccccaccctgaccagcctgaacatccccccaggcccctacagctccatgcacaagctgctggagacccagagcactggagcctgccagagcagctgcaagatcagcagcccctgcctgaaggctgacagcggggcctgtggccctgacagctgcccctactgtgcccgggccggggccggggaggtggagctggccgaccgggagatgccagacagcgacagcgaggccgtgtatgagttcacccaggatgcccagcacagcgacctgcgggacccccacagccggcggcagaggagcctgggcccagatgctgagcccagctctgtgctggccttctggaggctcatctgtgacaccttcaggaagatcgtggacagcaagtacttcggccggggcatcatgattgccatcctggtgaacaccctgtccatgggcatcgagtaccacgagcagcctgaggagctgaccaatgccctggagatcagcaacatcgtgttcaccagcctgtttgccctggagatgctgctgaagctgctggtgtatggccccttcggctacatcaagaacccctacaacatctttgatggagtcatcgtggtgatctctgtgtgggagatcgtgggccagcagggcggcggcctgtctgtgctgcggaccttccggctgatgagggtgctgaagctggtgcgcttcctgcctgccctgcagaggcagctggtggtgctgatgaagaccatggacaacgtggccaccttctgcatgctgctgatgctgttcatcttcatcttcagcatcctgggcatgcacctgtttggctgcaagtttgccagcgagagagatggagacaccctgcctgacaggaagaactttgacagcctgctgtgggccatcgtgacagtgttccagatcctgacccaggaggactggaacaaggtgctgtacaacggcatggccagcaccagctcctgggccgccctgtacttcatcgccctgatgaccttcggcaactacgtgctcttcaacctgctggtggccatcctggtggagggcttccaggccgaggagatcagcaagcgggaggatgccagcggccagctgagctgcatccagctgcctgtggacagccagggcggagatgccaacaagtctgagagcgagccagacttcttcagccccagcctggatggagatggagacaggaagaagtgcctggccctggtgtccctgggggagcaccctgagctgaggaagagcctgctgcccccactcatcatccacacagctgccacccccatgagcctgcccaagagcaccagcacaggcctgggggaggccctgggccctgccagcaggaggaccagcagcagcggcagcgctgagcctggagctgcccacgagatgaagagcccccccagcgcccggagcagcccccacagcccctggagcgctgccagctcctggaccagccgccgcagcagcaggaacagcctgggccgggcccccagcctgaagagaagaagccccagcggggagcggcgcagcctgctgtctggagagggccaggagagccaggatgaggaggagagcagcgaggaggagcgggccagccctgctggcagtgaccaccgccaccggggcagcctggagcgggaggccaagagcagctttgacctgcctgacaccctgcaggtgcccggcctgcacaggacagccagcggccggggcagcgccagcgagcaccaggactgcaatggcaagagcgccagcggccgcctggcccgggccctgcggccagatgatcctcccctggatggagatgatgctgatgatgagggcaacctgagcaagggggagcgggtgcgggcctggatccgggcccggctgcctgcctgctgcctggagcgggacagctggagcgcctacatcttccccccccagagccgcttccggctgctgtgccaccgcatcatcacccacaagatgtttgaccacgtggtgctggtgatcatcttcctgaactgcatcaccatcgccatggagcggcccaagattgacccccacagcgctgagcgcatcttcctgaccctgagcaactacatcttcaccgctgtgttcctggccgagatgacagtgaaggtggtggccctgggctggtgcttcggggagcaggcctacctgcggagctcctggaatgtgctggatggcctgctggtgctgatctctgtgattgacatcctggtgtccatggtgtctgattctggcaccaagatcctgggcatgctgcgggtgctgcggctgctgcggaccctgcggcccctgcgggtcatcagccgggcccagggcctgaagctggtggtggagaccctgatgagcagcctgaagcccatcggcaacatcgtggtgatctgctgtgccttcttcatcatcttcggcatcctgggcgtgcagctgttcaagggcaagttctttgtgtgccagggcgaggacaccaggaacatcaccaacaagagtgactgtgccgaggccagctaccgctgggtgcgccacaagtacaactttgacaacctgggccaggccctgatgagcctgtttgtgctggccagcaaggatggctgggtggacatcatgtatgatggcctggatgctgtgggcgtggaccagcagcccatcatgaaccacaacccctggatgctgctgtacttcatctccttcctgctgattgtggccttctttgtgctgaacatgtttgtgggcgtggtggtggagaacttccacaagtgccggcagcaccaggaggaggaggaggcccggcggcgggaggagaagaggctgcggcggctggagaagaagagaagaaacctgatgctggatgatgtgattgccagcggcagcagcgccagcgctgccagcgaggcccagtgcaagccctactacagcgactacagccgcttccggctgctggtgcaccacctgtgcaccagccactacctggacctcttcatcaccggggtgattggcctgaatgtggtgaccatggccatggagcactaccagcagccccagatcctggatgaggccctgaagatctgcaactacatcttcaccgtcatctttgtgctggagagcgtcttcaagctggtggccttcggcttccgccgcttcttccaggaccgctggaaccagctggacctggccatcgtgctgctgagcatcatgggcatcaccctggaggagattgaggtgaatgccagcctgcccatcaaccccaccatcatccgcatcatgagggtgctgcgcatcgcccgggtgctgaagctgctgaagatggctgtgggcatgagggccctgctggacacagtgatgcaggccctgccccaggtgggcaacctgggcctgctcttcatgctgctcttcttcatctttgctgccctgggcgtggagctgtttggagacctggagtgtgatgagacccacccctgtgagggcctgggcagacatgccaccttcaggaactttggcatggccttcctgaccctcttccgggtgtccactggagacaactggaatggcatcatgaaggacaccctgcgggactgtgaccaggagagcacctgctacaacacagtcatcagccccatctactttgtgtcctttgtgctgacagcccagtttgtgctggtgaatgtggtgattgctgtgctgatgaagcacctggaggagagcaacaaggaggccaaggaggaggccgagctggaggccgagctggagctggagatgaagaccctgagcccccagccccacagccccctgggcagccccttcctgtggccaggagtggagggccctgacagcccagacagccccaagccaggggccctgcaccctgctgcccacgcccggagcgccagccacttcagcctggagcaccccacagaccggcagctgtttgacaccatcagcctgctgatccagggcagcctggagtgggagctgaagctgatggatgagctggccggccctgggggccagcccagcgccttccccagcgcccccagcctgggcggcagtgacccccagatccccctggccgagatggaggccctgagcctgaccagcgagatcgtgtctgagcccagctgcagcctggccctgacagatgacagcctgcctgatgacatgcacaccctgctgctgagcgccctggagagcaacatgcagccccaccccacagagctgcccggccctgacctgctgactgtgaggaagtctggagtgtccaggacccacagcctgcccaatgacagctacatgtgccgccacggcagcacagctgagggccccctgggccaccggggctggggcctgcccaaggcccagagcggctctgtgctgtctgtgcacagccagcctgctgacaccagctacatcctgcagctgcccaaggatgccccccacctgctgcagccccacagcgcccccacctggggcaccatccccaagctgcccccacctggccgcagccccctggcccagaggcccctgcggcggcaggccgccatcagaacagacagcctggatgtgcagggcctgggcagccgggaggacctgctggccgaggtgtctggccccagcccccccctggcccgggcctacagcttctggggccagagcagcacccaggcccagcagcacagccgcagccacagcaagatcagcaagcacatgaccccaccagccccctgccccggccctgagcccaactggggcaagggccccccagagaccaggagcagcctggagctggacacagagctgtcctggatcagcggggacctgctgcccccaggcggccaggaggagccccccagcccccgggacctgaagaagtgctacagcgtggaggcccagagctgccagaggcggcccacctcctggctggatgagcagaggaggcacagcattgctgtgtcctgcctggacagcggcagccagccccacctgggcacagaccccagcaacctgggcggccagcccctgggcggccctggcagccggcccaagaagaagctgagcccccccagcatcaccattgatcctcctgagagccagggccccaggaccccacccagccctggcatctgcctgcggcggcgggcccccagcagtgacagcaaggaccccctggccagcggccccccagacagcatggccgccagccccagccccaagaaggatgtgctgagcctgagcggcctgagcagtgaccctgctgacctggacccctag

SEQ ID NO: 200370 - DNA, 5331 bp, Artificial Sequence
  derived and/or modified sequence
atggatgaggaggaggatggagctggagctgaggagagcggccagcccaggagcttcatgaggctgaatgacctgagcggggccggcggccggcccggccctggcagcgctgagaaggaccccggcagcgctgacagcgaggccgagggcctgccctacccagccctggcccctgtggtgttcttctacctgagccaggacagccggcccaggtcctggtgcctgaggacagtgtgcaacccctggtttgagcgcatctccatgctggtgatcctgctgaactgtgtgaccctgggcatgttccggccctgtgaagatattgcctgtgacagccagcgctgccgcatcctgcaggcctttgatgacttcatctttgccttctttgctgtggagatggtggtgaagatggtggccctgggcatctttgggaagaagtgctacctgggggacacctggaaccggctggacttcttcatcgtgattgctggcatgctggagtacagcctggacctgcagaatgtgtccttctctgctgtgaggacagtgcgggtgctgcggcccctgcgggccatcaacagagtgcccagcatgaggatcctggtgaccctgctgctggacaccctgcccatgctgggcaatgtgctgctgctgtgcttctttgtgttcttcatctttggaattgtgggcgtgcagctgtgggccggcctgctgaggaaccgctgcttcctgcctgagaacttcagcctgcccctgtctgtggacctggagcgctactaccagacagaaaatgaagatgagagccccttcatctgcagccagccccgggagaatggcatgaggagctgccgctctgtgcccaccctgcggggagatggcggcggcggccccccctgtggcctggactatgaggcctacaacagcagcagcaacaccacctgtgtgaactggaaccagtactacaccaactgcagcgctggggagcacaaccccttcaagggggccatcaactttgacaacatcggctacgcctggatcgccatcttccaggtgatcaccctggagggctgggtggacatcatgtactttgtgatggatgcccacagcttctacaacttcatctacttcatcctgctgatcatcgtgggcagcttcttcatgatcaacctgtgcctggtggtgattgccacccagttcagcgagaccaagcagcgggagagccagctgatgagggagcagagggtgcgcttcctgagcaatgccagcaccctggccagcttcagcgagcccggcagctgctatgaggagctgctgaagtacctggtgtacatcctgaggaaggccgcccggcggctggcccaggtgtccagagctgctggggtgcgggtgggcctgctgagcagccctgcccccctgggcggccaggagacccagcccagcagcagctgcagccgcagccaccggcggctgtctgtgcaccacctggtgcaccaccaccaccaccaccaccaccactaccacctgggcaatggcaccctgcgggccccccgggccagccctgagatccaggacagagatgccaacggcagccggcggctgatgctgcccccacccagcaccccagccctgagcggggcccctcctggaggagctgagagcgtgcacagcttctaccacgccgactgccacctggagcctgtgcgctgccaggcccccccacccaggagccccagcgaggccagcggccgcacagtgggcagcggcaaggtgtaccccaccgtgcacaccagccccccacctgagaccctgaaggagaaggccctggtggaggtggccgccagcagcggcccccccaccctgaccagcctgaacatccccccaggcccctacagctccatgcacaagctgctggagacccagagcactggagcctgccagagcagctgcaagatcagcagcccctgcctgaaggctgacagcggggcctgtggccctgacagctgcccctactgtgcccgggccggggccggggaggtggagctggccgaccgggagatgccagacagcgacagcgaggccgtgtatgagttcacccaggatgcccagcacagcgacctgcgggacccccacagccggcggcagaggagcctgggcccagatgctgagcccagctctgtgctggccttctggaggctcatctgtgacaccttcaggaagatcgtggacagcaagtacttcggccggggcatcatgattgccatcctggtgaacaccctgtccatgggcatcgagtaccacgagcagcctgaggagctgaccaatgccctggagatcagcaacatcgtgttcaccagcctgtttgccctggagatgctgctgaagctgctggtgtatggccccttcggctacatcaagaacccctacaacatctttgatggagtcatcgtggtgatctctgtgtgggagatcgtgggccagcagggcggcggcctgtctgtgctgcggaccttccggctgatgagggtgctgaagctggtgcgcttcctgcctgccctgcagaggcagctggtggtgctgatgaagaccatggacaacgtggccaccttctgcatgctgctgatgctgttcatcttcatcttcagcatcctgggcatgcacctgtttggctgcaagtttgccagcgagagagatggagacaccctgcctgacaggaagaactttgacagcctgctgtgggccatcgtgacagtgttccagatcctgacccaggaggactggaacaaggtgctgtacaacggcatggccagcaccagctcctgggccgccctgtacttcatcgccctgatgaccttcggcaactacgtgctcttcaacctgctggtggccatcctggtggagggcttccaggccgaggagatcagcaagcgggaggatgccagcggccagctgagctgcatccagctgcctgtggacagccagggcggagatgccaacaagtctgagagcgagccagacttcttcagccccagcctggatggagatggagacaggaagaagtgcctggccctggtgtccctgggggagcaccctgagctgaggaagagcctgctgcccccactcatcatccacacagctgccacccccatgagcctgcccaagagcaccagcacaggcctgggggaggccctgggccctgccagcaggaggaccagcagcagcggcagcgctgagcctggagctgcccacgagatgaagagcccccccagcgcccggagcagcccccacagcccctggagcgctgccagctcctggaccagccgccgcagcagcaggaacagcctgggccgggcccccagcctgaagagaagaagccccagcggggagcggcgcagcctgctgtctggagagggccaggagagccaggatgaggaggagagcagcgaggaggagcgggccagccctgctggcagtgaccaccgccaccggggcagcctggagcgggaggccaagagcagctttgacctgcctgacaccctgcaggtgcccggcctgcacaggacagccagcggccggggcagcgccagcgagcaccaggactgcaatggcaagagcgccagcggccgcctggcccgggccctgcggccagatgatcctcccctggatggagatgatgctgatgatgagggcaacctgagcaagggggagcgggtgcgggcctggatccgggcccggctgcctgcctgctgcctggagcgggacagctggagcgcctacatcttccccccccagagccgcttccggctgctgtgccaccgcatcatcacccacaagatgtttgaccacgtggtgctggtgatcatcttcctgaactgcatcaccatcgccatggagcggcccaagattgacccccacagcgctgagcgcatcttcctgaccctgagcaactacatcttcaccgctgtgttcctggccgagatgacagtgaaggtggtggccctgggctggtgcttcggggagcaggcctacctgcggagctcctggaatgtgctggatggcctgctggtgctgatctctgtgattgacatcctggtgtccatggtgtctgattctggcaccaagatcctgggcatgctgcgggtgctgcggctgctgcggaccctgcggcccctgcgggtcatcagccgggcccagggcctgaagctggtggtggagaccctgatgagcagcctgaagcccatcggcaacatcgtggtgatctgctgtgccttcttcatcatcttcggcatcctgggcgtgcagctgttcaagggcaagttctttgtgtgccagggcgaggacaccaggaacatcaccaacaagagtgactgtgccgaggccagctaccgctgggtgcgccacaagtacaactttgacaacctgggccaggccctgatgagcctgtttgtgctggccagcaaggatggctgggtggacatcatgtatgatggcctggatgctgtgggcgtggaccagcagcccatcatgaaccacaacccctggatgctgctgtacttcatctccttcctgctgattgtggccttctttgtgctgaacatgtttgtgggcgtggtggtggagaacttccacaagtgccggcagcaccaggaggaggaggaggcccggcggcgggaggagaagaggctgcggcggctggagaagaagagaagaaacctgatgctggatgatgtgattgccagcggcagcagcgccagcgctgccagcgaggcccagtgcaagccctactacagcgactacagccgcttccggctgctggtgcaccacctgtgcaccagccactacctggacctcttcatcaccggggtgattggcctgaatgtggtgaccatggccatggagcactaccagcagccccagatcctggatgaggccctgaagatctgcaactacatcttcaccgtcatctttgtgctggagagcgtcttcaagctggtggccttcggcttccgccgcttcttccaggaccgctggaaccagctggacctggccatcgtgctgctgagcatcatgggcatcaccctggaggagattgaggtgaatgccagcctgcccatcaaccccaccatcatccgcatcatgagggtgctgcgcatcgcccgggtgctgaagctgctgaagatggctgtgggcatgagggccctgctggacacagtgatgcaggccctgccccagctgtgggcctggagcagcctggagacctggagcgtgaccaggcacacccctgtgcgggcctgggccgtgatgcccccatttggcaccctggcctggcccagctag

SEQ ID NO: 200371 - DNA, 7134 bp, Artificial Sequence
  derived and/or modified sequence
atggacgaggaggaggacggcgccggcgccgaggagagcggccagcccagaagtttcatgagactgaacgatctttccggggccggtggaagaccgggtccggggagcgctgagaaggatcccggcagcgcagactcagaggccgagggcctgccatacccggctctcgctcccgtcgtgtttttttacctttctcaggattcccgcccccgatcatggtgtctgcgcaccgtgtgtaacccatggttcgagcgaatttccatgcttgtgattctgctcaattgcgtgacgctggggatgtttaggccttgtgaagatatcgcatgtgactcccagcgttgtcggatcctgcaggcattcgatgattttatttttgctttttttgcagtcgaaatggttgttaaaatggtggccttagggatatttggaaagaaatgctacttaggggatacgtggaatcgcctggacttcttcatcgtgattgcagggatgctggagtacagtttggatctccagaacgtgtcgttcagcgccgtccggactgtcagagtgctccggccattgcgtgccatcaacagagtgccaagtatgaggatcctggtcactctgctcttagacacgctgcctatgttggggaatgtgttacttctgtgctttttcgtgtttttcatattcgggatagttggcgtccaactctgggcaggattgctcagaaaccgatgctttctccccgagaacttttccttgcccttatccgtggatctggaaaggtactaccagactgagaatgaggacgagtccccgtttatatgcagccagcccagagaaaatggcatgagatcctgtcgatctgttccaaccctgaggggtgatggtggcggaggccctccctgtggcttagattacgaggcctataactcttcatctaatacgacctgcgtgaactggaaccaatactacacaaactgtagcgctggagagcataaccccttcaagggcgcgattaattttgataatattggctacgcgtggattgcaatcttccaggtgattactcttgaggggtgggttgatatcatgtactttgtcatggacgcacattcgttctacaacttcatctactttattctcctcatcattgtgggatctttttttatgattaatctgtgtctcgtagtgatcgctacacagttttctgaaaccaagcagagagaatcccagctcatgagggaacaacgggtaaggttcttatccaatgcaagtaccctggcctccttcagtgagcctggaagctgttacgaagagttactgaaatatcttgtgtatatcctgcgaaaggcggcacgcagactggcacaggtgagtcgggctgccggagtaagggtgggtttactgagcagccctgccccactaggcggacaagaaacacagccatccagctcctgctcacggagtcatcgcaggctttctgtccatcacctggtgcatcaccaccatcatcaccatcatcactaccaccttggcaatggaaccctgcgcgctcccagagcctcgccagagatccaagatcgcgacgcaaatggaagccgacgattgatgctgccccccccgagtacaccagcattaagcggagccccccccgggggagctgaaagcgttcattcgttttaccacgccgactgtcacctggagcctgtgaggtgccaggctccccccccgcgctcaccaagcgaggccagcggcaggacagtgggaagcggaaaggtgtaccctactgtacacactagtcccccacctgaaacactgaaagagaaggctctggtcgaggtcgccgcctcctcgggacctcctaccctaacctctttgaatataccacccggaccatactcgagcatgcacaaactgctggagactcagtcaaccggcgcctgtcagagctcatgtaagatctcatccccttgcctcaaagccgacagcggcgcctgcggtccagactcctgcccctattgcgcgcgcgcaggggcgggggaagttgagctggcagatagagaaatgccggactccgacagtgaagccgtgtacgagttcacccaggatgcgcaacattccgatctgcgtgatccgcattcgcgtcgacagagaagcttgggccccgacgcggaaccaagctcagtgctggccttttggagactgatttgcgacacattccgaaaaatcgtcgacagcaaatacttcggacggggcattatgatcgccattctcgtcaacaccctgagtatggggatcgagtatcatgagcagcccgaagaactcaccaacgcgctggagataagcaacattgttttcacctcactcttcgctttggaaatgctgctaaagctgctggtttacggcccctttggttatattaaaaatccatataacatttttgatggtgtcatcgtggttatatccgtttgggaaatcgtcgggcagcaggggggaggactgtctgtcctgcgcacttttaggctaatgagagttctgaagctggtcagatttctgcctgccctgcagcgacaattggttgtactgatgaagacgatggataatgttgccacgttctgtatgctgctgatgctcttcatctttattttttctatcctagggatgcatctgttcggctgtaaatttgcctcagaacgagacggagatacactcccagatcggaagaatttcgactcactgctatgggcaatcgttactgtcttccaaattctcacgcaggaggattggaataaggtgctctataacggcatggcgagcacgtcctcctgggcagcgttgtattttattgcactgatgacgtttggtaactatgtgctgttcaacctgctcgtggcaattctggtagaggggttccaagccgaggaaatcagtaaacgggaagatgcatccgggcagctgtcctgtatccaacttccggttgattcacagggcggtgacgcaaacaagagtgagtccgagcccgactttttttctcccagtctcgacggcgatggcgaccgaaagaaatgcctagcccttgtgagcctgggcgaacatcccgagctgcgaaagagcctcctgcctcccctgattatccatacagctgcaacccctatgtctttgccaaaatccacttctactggactgggcgaagccctggggcctgccagccgacgcacttcttcctccggctctgctgaacctggcgccgcccatgagatgaaaagcccaccttcggctagatccagcccacattcaccctggtccgctgcgtcgagctggacctctcggcgtagctcaaggaattcactgggtcgcgctcccagcctgaagagaaggtctccatctggtgaaagacgctcactcctttccggggaaggacaggagtcacaagatgaggaagagtccagcgaggaggagcgcgcttcccccgccggctcagatcaccggcaccgaggatccctggaacgagaggccaaaagcagttttgatttgcccgacaccctgcaggtgcctggtcttcacaggacagcctccggcagaggcagtgccagcgaacatcaagactgcaacggaaagtccgcttccggcagacttgccagagctcttcgccccgacgacccccccttggacggcgacgatgcagacgacgaaggcaatctctcgaagggtgaaagagttcgggcctggattagggcccgactgcccgcttgttgcctagagcgcgatagctggagtgcatacatctttccccctcagagcaggtttcgcctgctgtgtcatcgaatcatcacccacaagatgttcgaccacgtcgtgctggtgattatcttcctgaattgcatcactatcgctatggagaggcctaaaattgacccccacagcgcagagcggatattcctgacgctttctaattacattttcaccgcggttttcctagctgaaatgaccgtaaaagttgtcgctctcggttggtgctttggcgagcaggcgtacttgaggtcttcctggaacgtcttagatggcctgctggtgctcatttcggtgatcgacatcctggttagtatggtatccgattcaggcactaagatattgggcatgctacgggtgcttagactgttgcggacactaagaccgcttcgggtcataagcagagctcagggcctgaagctagtggttgaaaccttaatgagcagcttgaaacctatcgggaacatcgtggtcatctgctgtgcgttcttcatcattttcgggatcctcggcgtacaactttttaaaggaaaattttttgtctgccagggtgaggacactcgcaacatcactaacaagtcagactgcgccgaggccagctatagatgggttaggcacaaatacaacttcgataacctgggtcaggccctgatgagtctattcgtgttagcatcaaaagatggatgggtggacatcatgtacgacggcctggatgctgtgggcgtggaccagcagcccatcatgaatcacaatccatggatgttgctttatttcatttcgtttcttctgattgtggcattctttgtgctaaacatgttcgtcggggtggtggtagaaaattttcataagtgcagacagcatcaggaggaggaggaggcccgcaggcgggaggagaagagacttcgccggttggaaaagaaacgtaggaacctgatgctggacgatgtcatcgcaagtggctcttctgccagcgcagcttcagaggctcagtgtaagccctattactctgattatagtaggtttagactgctagtgcatcacctgtgtacttcccactacttagatttgtttattactggcgtcattggactgaacgttgtgaccatggctatggagcactaccagcagcctcagattctcgacgaagctttgaaaatctgcaattatatcttcactgtgatctttgtcctcgagtccgtgtttaagctggttgcattcggcttccgacggttcttccaggacaggtggaaccagctcgacctcgcaatcgttctactgtccattatgggtatcaccctagaggaaattgaggttaatgcttcgttacccatcaacccaaccattatccgaatcatgcgcgttctcaggatcgcacgagtactaaagctgctgaagatggcggtggggatgagggctctgctggatacagtcatgcaggcactgccccaggtggggaatctgggcctgctgtttatgcttttgttcttcatctttgcggctctgggagtcgagctgtttggtgatcttgaatgtgacgagacacatccgtgcgaggggctggggcggcacgccactttccgaaattttgggatggccttcctcaccctttttagagtgtctacaggtgataattggaatggcattatgaaggatactctcagagactgtgaccaagaatccacatgctataataccgttatttcccccatctattttgtgagcttcgtcctcacggctcagtttgtgctggtcaacgtggtgatcgccgttctgatgaagcatctggaagaaagcaataaggaggcaaaggaggaagccgagctggaggccgagctggagcttgaaatgaagaccctgtcaccccagccccacagcccactcggttctccatttctatggcccggcgtcgaggggcctgacagccctgattctcccaagcccggcgcactccaccccgcagcacatgcaagatccgccagtcatttctctcttgaacaccctacagaccgacagcttttcgatacaattagtcttctcattcagggatcactcgagtgggagctgaagctgatggatgagctggcaggtcccggtggccagcccagcgcttttcccagtgcccccagcctcggcgggagcgacccccagatccccctggccgagatggaagccctatccttgacaagcgaaatcgtctccgaaccctcttgttctctggctctgaccgatgatagcttaccagatgacatgcacactctgctgctgtctgccctggaaagtaacatgcagccccatccaaccgaattacccgggcctgatctcctgaccgtcaggaaatcgggtgtgtcacgcacacacagcttgccaaatgactcatatatgtgtaggcacggttcgacagctgaaggcccactgggccacaggggctggggcctccccaaagcccaatccggctccgttctcagtgtccactctcaacccgcggataccagttacatcctccaactcccgaaagatgctcctcacctgctccagccgcactccgccccaacatggggaaccattcctaagctgccaccccccggaagaagccctctggcacagcgccctctgaggcggcaggctgccattcgaactgactccttagacgttcagggactgggaagccgcgaggacttactcgctgaggtcagtggccccagtcccccccttgctagggcttactcattctgggggcagagctctacccaagcacaacagcatagtaggtcgcacagcaagatttcaaaacacatgaccccccctgctccgtgtcctggacctgagcccaattggggaaagggccccccagaaacacgctctagtctggaactggacacagaactatcatggatctccggtgacctgctgccccccgggggtcaggaggagccgccatccccccgcgacctgaaaaagtgctactccgtggaggcccagagttgccagaggcgccctacttcttggctagatgagcagagacgtcattcaatcgcagtttcttgcttagactccgggtcacagcctcacctcggtacagatccttcgaacctaggaggccagcccttgggcgggcctggctcacgtccaaagaagaaattatcccctccgtctattacaatagaccctccagaatctcagggccctaggacaccaccttctcccggaatctgtcttcgtaggcgagcaccaagctccgactcaaaggatcctctcgcctctggacctccagattcaatggccgcttctccctccccgaagaaagatgtactgtccctgtcaggattgagcagcgatcctgccgatctagacccctag

SEQ ID NO: 200372 - DNA, 5331 bp, Artificial Sequence
  derived and/or modified sequence
atggacgaggaggaggacggcgccggcgccgaggagagcggccagcctaggagcttcatgagactgaatgatctatcaggcgccggtggcaggcctggacccggctccgccgaaaaagatcctggctcagccgattcggaggccgagggacttccttacccggctctagcccccgtggttttcttctacctcagccaggattcccgtcctaggagctggtgcctaagaaccgtatgtaatccgtggtttgagcgcatctcaatgttggtgatcttgttaaattgtgtgaccttagggatgttcaggccgtgcgaagacattgcttgtgattcccagcgctgcagaatcttgcaggcgttcgacgattttatctttgccttctttgccgttgaaatggttgtcaaaatggttgccctgggcatatttggcaaaaagtgctatctcggcgacacatggaatcggctagacttctttatcgtgatcgccggtatgcttgagtacagcctggatctgcagaatgtgagcttcagcgctgttcggaccgtcagggttctgaggccactgagagccattaaccgcgtgccgtctatgagaattctcgtgaccctccttctggataccctgccaatgcttggaaatgttctgctcctgtgtttcttcgtcttctttattttcggcattgtgggagtccaactctgggctggactgctaaggaaccggtgctttctcccagaaaacttcagcctgcccctttccgtagatctagaacgttactatcagacagaaaacgaggatgagagccccttcatctgctctcagcccagagagaacggaatgagaagctgcagatccgtacccactctgagaggcgatggaggcggtgggcccccctgcggcttggactacgaagcgtacaatagtagcagcaataccacctgcgtcaattggaaccagtactatacaaattgcagtgcgggggagcacaacccctttaagggtgctataaactttgataacatcggctacgcatggatcgccatttttcaagtcatcactctcgagggctgggtggacataatgtatttcgtaatggacgcacattcgttctataattttatctactttatattgctcataatagtggggagctttttcatgattaacttatgcctcgtagtgattgctacccagttttctgaaactaagcagcgggagagccaattgatgagagagcagagggtgcggtttctatctaatgccagcacattggcatccttctctgaaccagggagttgttatgaggaattgttgaagtacttagtatatatcttaagaaaggcagcccggcggttagcccaggtcagccgagccgctggagtacgagtggggttgctatcctccccagcccccctggggggccaggagacccagccctcctctagttgctcccgttctcatcgcaggctttcggtccaccatcttgtccatcaccaccaccatcaccaccaccattaccacctgggaaatgggaccttgagagcacccagggcaagccctgaaatccaggatagggatgctaatggatctcgccggttgatgctcccccctcccagcactcccgctcttagtggagctccgccaggtggagccgagagtgtgcactctttttatcacgctgattgtcatttggagcccgtgcgctgccaagctcctccaccaaggtccccatctgaagcgagcggccgcactgtaggttcggggaaggtgtaccccacggtccatacttcgcccccccccgagactcttaaagagaaggctcttgtggaagtggctgcctcctctggacctccaacactgacttccctcaatattccccccggaccatatagtagtatgcacaagcttttggaaacccagtcaaccggcgcttgccagtctagttgtaaaatttcctctccctgtctgaaagccgacagcggagcctgtggcccggacagttgcccttactgtgcccgagctggagccggggaggttgaactcgcagatcgagaaatgcccgactctgattctgaggcagtgtacgagttcacacaggacgctcaacatagcgatctgcgggacccacatagtaggaggcagcgatccctgggccccgatgctgagccttctagcgttctcgccttctggcgcctgatttgcgatacattcagaaaaatcgttgacagtaagtatttcggccgggggatcatgattgcgatccttgtaaataccctgtctatgggcatcgagtatcacgagcagcctgaggaactgacgaacgccctggagatttcgaacatcgtttttacatcactcttcgctctggaaatgctccttaagctgcttgtctatggcccattcggatacattaaaaacccctataatattttcgacggggtgattgtagtgatttcagtatgggagatcgttggccagcaaggcggtgggttatctgtactccgaaccttcaggttaatgagggtactcaagctggttagatttctgcccgccctccagagacagctggtcgtcttgatgaagaccatggacaatgtggccactttctgtatgctccttatgctcttcatattcatttttagcatcctcggtatgcacctgttcgggtgtaaatttgcttccgaacgcgacggcgacaccctgcccgaccggaaaaattttgacagcctgctatgggctattgtgactgtgttccagatcttaacacaggaggattggaacaaagtattgtacaacggcatggcttccacaagttcctgggccgctctgtattttatcgcgctgatgacattcgggaattacgtacttttcaacttacttgttgcaatcttagtggagggctttcaggccgaggaaatctctaagagggaggatgcctccggccagcttagttgtatccagctacccgtcgacagccaggggggggacgcaaataagtctgaatctgagcccgacttcttctctccctccctggacggggatggtgacaggaagaaatgtctagccctggtgtctcttggggagcatccagagttgaggaagagcctgctgcccccattgatcatccacaccgccgctacacctatgtccttaccaaaatcgacaagcacaggactgggggaggccctgggaccggcttcacggcgaacatccagctccggttccgctgagcctggcgcggcccatgaaatgaagtctcccccaagtgcaagaagctccccacatagcccatggagcgccgcaagcagttggacatccagacgaagttcccggaacagcttaggaagggccccttcattgaagaggcgttccccatcaggcgagcgccgatccctcttgtccggagagggacaggaatctcaggatgaggaggaaagtagcgaagaggagcgggccagccccgccggctccgaccaccgacacagagggtcattagaacgcgaggccaaatcgtcctttgacctgcctgatacgttgcaagttccaggtctgcacagaacagcctctggccggggtagcgcttcagagcatcaggattgcaatggaaagtcagcctccggcagactggctcgggccctgcgacccgatgacccgccgctcgatggagacgatgcggatgacgagggtaacttaagcaaaggagaaagagtcagagcctggataagggccagattgcccgcctgttgcctcgagagggattcgtggtccgcatacattttcccaccacagagcagatttagacttctatgccacaggataatcacccacaaaatgtttgaccacgtcgttctggtcattatatttctaaattgtattacaattgctatggagagaccaaagatcgatcctcactccgctgagcggatttttctgactctgtccaactacatcttcacagcagtgttcttggccgagatgacagtcaaagttgtggcactcggctggtgtttcggcgagcaagcatacctgaggagttcttggaacgtcctggatgggctgctggtgttgatttcagtcatcgacatactggtatcgatggtctccgactcgggaacaaaaattttaggcatgctgcgcgttctccgactcctgcgaacgttacggcccctgagggtcatttctagggctcaaggtctaaagctcgtcgtggagacattaatgtccagtcttaaaccaatagggaatatcgtggtgatctgctgtgcttttttcataatcttcggtattctgggggttcaattgttcaaaggaaaattctttgtttgtcagggggaagacacacggaatattacaaataagagcgactgcgctgaggcgtcctaccgctgggtccgacacaagtataatttcgataatctggggcaagcattaatgagtctgtttgtactggcatcgaaagacgggtgggtcgacatcatgtacgacggactggatgctgtgggcgtggaccaacagcccatcatgaatcacaacccctggatgttgctctactttatctcttttctgctcatagtagctttttttgtactgaatatgtttgttggggttgtggtggagaattttcacaaatgtaggcagcatcaggaagaagaggaagcccgcagacgtgaggagaaacgtctgcggcggctagagaagaagcggcgcaatttaatgcttgacgacgtgatagcaagcggttcctctgcatctgccgcatccgaagctcagtgtaagccttattactcagactattccaggttccggctgctggttcatcacctgtgcacctctcattacttggacctcttcattaccggagtgattggacttaatgtggtgactatggcaatggagcattaccaacagcctcagatccttgatgaggctctcaagatctgcaattatatcttcaccgtgatctttgtactcgagtcagttttcaaattggtggcctttggcttccgtaggttttttcaggatagatggaatcagctggacctcgctatcgtgctattgagcatcatgggaatcacacttgaagagatcgaggtaaatgcctcactgcctataaacccaaccatcatcagaattatgagagtactccgcatcgcccgagtcctcaagcttcttaagatggcagtcgggatgcgggctcttcttgacactgtgatgcaggccttaccccagctctgggcctggtcatccttagagacttggagtgtgacaagacacactcccgtgcgagcctgggccgtgatgcccccctttgggacgctcgcctggccgtcatag

SEQ ID NO: 200373 - DNA, 7133 bp, Artificial Sequence
  derived and/or modified sequence
atggatgaggaagaagatggcgcaggagccgaggagagcggacaaccccgtagtttcatgaggctcaatgacctgtctggagccggagggaggcctggccctgggtccgccgaaaaggaccccggaagtgccgacagcgaagccgaggggttaccctaccccgctctcgcccctgtggtattcttttacctgtcccaggactcccggccacggtcatggtgcctgagaacagtatgtaatccgtggttcgaaagaatttctatgctggtaattctgcttaactgcgtgacattaggaatgtttagaccctgcgaggacatagcatgtgatagtcagcggtgtcgcatactccaggcttttgatgatttcattttcgccttcttcgctgtagagatggtcgtgaagatggtagctctcggcatctttggaaaaaagtgctacctaggggacacctggaataggctggatttcttcatcgtcattgctggcatgctcgagtattctctggatctgcagaacgtgtccttttccgccgtgaggaccgtgagggtgctgcgaccacttcgggctataaatcgagtacctagtatgcgtattctcgtgactctgctcctggacactttgccaatgctcgggaatgtcctcctcctgtgtttctttgtattcttcatcttcggcatagtgggcgtgcagttatgggccggactgctacgaaacagatgtttcctgcccgagaactttagtctacctttgtctgtggacctcgaacggtattatcaaacagagaatgaggatgagtcccccttcatatgtagtcagccacgtgagaatggtatgcggagctgccgctcagtccccacattgcgcggagatggaggaggtggccctccctgcgggctggattacgaagcctataatagtagctccaataccacttgtgtgaactggaaccagtattatactaattgttcggctggcgagcataatcctttcaaaggagctattaactttgacaacattggctacgcctggatcgccatcttccaggtcatcactcttgagggatgggttgatatcatgtatttcgtaatggatgcacattcattttacaatttcatctattttatcttgctgattatcgtgggaagttttttcatgataaatttgtgcctggtcgtgatagccactcagttctctgaaaccaagcaaagggagtcccagctgatgagagagcagagggtgcgttttctatccaatgcatccactctcgctagtttttccgagcccggaagctgctatgaagagttgcttaagtatttagtgtacatcttgcgcaaggctgccagaaggctcgcccaggtctcacgggcagccggagtgcgggtgggccttttatcctctcccgcaccactgggaggccaggagacccaacctagctcgagctgcagcaggtcacatagacgcctgtccgtgcatcacctggtccaccaccatcatcatcatcaccaccattatcacctgggaaacggtaccctgagagccccaagagcctcccctgaaattcaggatcgagacgctaacggatcccgcaggctgatgttacctcctccaagtactcccgctctttcaggcgctcccccaggaggggcagagagcgttcactcattctatcacgccgattgccaccttgaacccgtccggtgtcaagctccaccaccaagaagtccctccgaggcttccggccgtacagtcggatcgggtaaggtctatcctacagtgcacacctcccccccacctgaaaccctgaaggaaaaagctctggtcgaggtagcagcatcaagtggacctcccacgctgacctccctgaacatcccaccgggtccgtactcctcaatgcataaactgctcgagactcaaagcacaggcgcttgccagtccagctgcaaaatctctagcccatgcctcaaagccgactctggggcttgcggccctgattcatgcccctactgcgcaagagcaggagcaggcgaagtcgaactggccgacagagagatgccggatagcgactccgaggcagtctacgagtttacccaagatgcacaacacagtgacttgcgcgacccacatagcagacgacagcgctccctagggccagatgcggaaccttcaagtgttttggccttctggcgcctgatttgtgatacttttagaaaaatcgtggactctaagtactttggtagaggcataatgatagctattcttgtgaataccctgtctatgggcatcgaataccacgaacaacccgaggagctgaccaatgctctagaaattagcaacatcgtgttcaccagtctgttcgccttagaaatgctgttgaaactacttgtctatggaccctttggctacatcaagaacccttacaacatatttgatggggttattgtggttatttccgtttgggaaatcgtggggcagcaggggggagggctgagcgttttgcgaacatttcggctcatgcgcgtgttgaagcttgtgcggtttctgccagctctgcagcgccagttagtcgttctgatgaagacaatggacaacgtagccaccttttgcatgttgctgatgttatttatcttcatcttttcaatcctcggaatgcatctgttcggatgtaagttcgctagcgagcgcgatggagacaccctgcctgatagaaagaactttgactcccttctttgggccatcgtaaccgtcttccagatcctgactcaggaggactggaataaggtcctgtacaacggcatggcgagcacctcttcttgggcagccctgtattttatcgccctgatgaccttcggcaattatgtgttgtttaatctgctcgtcgctatactggttgaagggtttcaggctgaggaaatctccaagcgggaagacgccagcggtcagctgagctgcattcaactcccggtggattctcaaggaggtgatgctaacaagtccgaatctgaaccagatttcttttcccccagtttggatggagatggggatcgtaaaaaatgcttggcactcgtgagcctgggcgagcacccagagctgcgtaaatcacttctgccgccactcatcatccacacagccgctaccccaatgtcactgccgaaatcaacgtctactggactgggggaggccctggggccagccagccgccgaacctctagctcagggtcagctgaacctggtgctgcgcatgaaatgaaaagcccgccttctgcccgaagttccccacactcaccctggtctgccgctagcagttggacgtcgcggcgatcctcgcgcaactctcttggccgtgctccttcactcaagcggaggagcccctcaggcgaacggcgatccctcctgagcggcgagggccaggagtcccaggacgaggaagaaagctctgaagaggagcgtgcgtctcccgctggcagtgaccacagacaccggggatctctggagcgtgaagctaagagcagttttgacttgcccgatacactacaggtgcccggactgcaccgcacagccagcgggcgtggaagcgcttctgaacaccaggattgtaatgggaagtctgcttcaggcagactcgctcgagccctgcgccctgatgatcctccgctggacggcgacgacgccgacgatgaagggaaccttagtaagggcgagagagtacgtgcctggatccgcgctcgtctgccagcctgctgtctggaacgcgattcatggagtgcctatatcttccctcctcaatcccgcttcaggctgctatgccaccgtatcatcacccataaaatgttcgaccatgtggtcttggtaatcatctttctcaactgcatcactatcgccatggagagacctaagatcgacccacattctgccgaaagaatctttcttacactgagcaattacatttttacagcagtttttctcgctgaaatgacggtgaaagtggtggctctgggatggtgcttcggtgagcaggcttatcttagatcgagttggaacgtgctagatggactcctggtgttgatctccgtgatcgatatcctggttagcatggtttcggatagcgggactaaaatcctgggtatgctgcgcgtgctgcgtctcctgcgaaccctgcgccctctgagagtaatttcaagggcgcaagggttaaagctggtggtcgagaccctcatgagttcgctgaagcccattggtaacattgtggttatttgttgcgcctttttcatcattttcggtattctgggcgtacagctgttcaagggtaaattttttgtttgtcaaggagaagatacgcggaatatcactaataagagcgattgtgctgaagccagttaccggtgggtgaggcacaaatacaatttcgacaacctgggtcaggctctcatgagcttatttgtcctggcctctaaagacggatgggtcgatattatgtatgatggactggacgccgtcggagtggaccaacaacccatcatgaatcacaatccatggatgttgctgtatttcatcagttttctgcttatcgtggccttcttcgtgcttaatatgtttgttggagtcgtggttgaaaatttccacaaatgcagacagcatcaggaggaagaggaagcccgaagacgcgaggagaagagactgcggcgtctggaaaaaaaacggaggaatttgatgctcgatgatgtcattgcttcaggcagctccgcctctgctgcctccgaggctcagtgcaaaccatactattcagattatagtaggttcagactgctggtccaccacctttgcacatctcattatctcgatctcttcatcaccggcgtgatcggtttaaacgttgttacaatggccatggagcactaccaacagccccagatcctggatgaggccctcaaaatctgtaattatatattcacggtgatttttgtactggaatccgtcttcaaacttgtggccttcggcttcaggcgcttctttcaggatcgatggaaccagctcgatctggctattgttctgctgagcatcatgggaatcacgcttgaggagatagaggtcaacgccagcttacccatcaacccaaccataatacggatcatgcgtgttctgaggattgcgagagtcttaaagctcctaaaaatggccgtgggcatgagggctctgctcgataccgtcatgcaagcactcccgcaggtaggaaatctgggcctgctcttcatgctgctgttttttatcttcgccgcactgggcgtcgagctattcggcgacctagagtgcgacgagactcacccttgtgaaggcctgggaagacacgccaccttccgtaattttggtatggctttcctgacactgtttcgagttagcacaggagataactggaatggcattatgaaggacacgctccgggattgcgatcaggagtccacgtgctacaacacagtgatttctcctatctatttcgtgtcttttgtcctaactgcgcagttcgtactggtgaacgttgtgattgccgtactcatgaaacacttggaagagagtaacaaggaggcgaaggaagaggccgagcttgaggccgaacttgaactggagatgaagactctgagccctcagccccatagtccacttggatcgccattcctttggcctggcgtggagggccctgatagccccgacagcccaaaaccgggtgcgctccaccctgctgcccacgcccgttccgcaagtcatttctcactggagcatcccacggacaggcagctgttcgacacgatttctctgctgatccaggggagtcttgagtgggaactgaaacttatggacgaactcgcaggccctggcggacaacctagtgccttccccagtgctccctctcttgggggaagtgaccctcagattcctctggctgaaatggaggccctgtctctgaccagcgagattgtctctgagccttcctgcagtctggcacttacggacgactcccttcccgatgatatgcacactttgcttctgtccgccctggagagtaatatgcaaccgcacccgactgagctgcctggcccagatctgctgaccgtgcgaaagtctggagtgtcgaggacacattcgctgcctaatgattcatatatgtgcagacatggaagtacagccgagggccctttagggcatcggggatgggggctacctaaggcccaaagcggctcagtgctttccgttcacagccagcctgccgatacctcgtacattttgcaattgccaaaggacgccccacatctgttgcagccacacagtgctcccacctgggggactatcccaaagctgccccctcccggacggtcgcccctggcacagcgacccttaagacggcaggctgctataagaacagatagtctggatgtgcagggcctgggctctcgtgaggatcttctggctgaagtgtcgggcccaagcccccctcttgcaagagcctacagcttctgggggcagtcatcgacccaggcacagcaacatagtcgctcccacagtaagattagcaaacatatgacccccccagccccatgtcctggacctgaaccaaattggggtaaagggcctcccgagacaaggagcagcctcgagttggacacagagctgagctggataagtggagaccttctcccacccggagggcaggaagagccacccagcccccgagacctcaaaaaatgttattctgtggaggcacagtcttgtcaacggagaccaacgtcatggctagacgaacaacggagacattctatcgcagtgagttgtctggatagtgggtcacagccccacttgggcaccgatccctccaacctgggcggacagccacttggcggtcctggatctaggcccaagaagaagttatcccccccttctataaccatcgatccccctgagtctcagggtccccgaactccaccgtccccgggaatctgcctgaggaggagagcgcctagttctgactcgaaagatccgctcgcctccggacctccagactccatggcagcgtcaccttccccgaaaaaggacgtactctccctcagcggcctgtcgagtgatcctgcggacctggatcctta

SEQ ID NO: 200374 - DNA, 5330 bp, Artificial Sequence
  derived and/or modified sequence
atggacgaagaggaggatggggctggagccgaggagagcgggcagcccagaagtttcatgagactcaacgacctgtcaggcgcagggggtcgcccaggaccaggatctgcggagaaggaccctgggagcgctgatagtgaagctgagggccttccctatcccgcactggctcctgtggtgtttttctatctgagtcaggatagcagaccaagaagctggtgcctgagaactgtgtgtaacccttggtttgagaggatctctatgctcgtcattctgctgaactgcgtcacactcgggatgttccgcccatgtgaggatatagcatgcgactcacaaagatgtagaatcttgcaggcgtttgacgactttatcttcgctttcttcgccgtggaaatggtggttaaaatggtcgcactcggaattttcggcaaaaagtgctacctaggtgatacctggaaccgacttgatttttttatcgtgattgccggaatgttggaatattcactggacttacagaacgtaagtttttctgcggtgcgcaccgtgcgcgttctccgtcccttacgagccatcaatcgagtccctagcatgaggattctggtgaccctgctcctcgacactcttccaatgctggggaacgtcctcctgctgtgcttcttcgtcttcttcatcttcggtatcgtgggtgtgcagctctgggccggactcctgcgcaacagatgtttcttgcccgagaacttctccttaccgctcagcgtcgacttggagcgctactatcagaccgagaacgaagatgaatcaccatttatctgctctcagcccagagaaaatggaatgaggtcttgtagaagcgttccaacacttcgcggagatggcggtggcggaccgccttgtggcctggattacgaggcttataactcctcctcaaacacaacatgcgttaattggaaccagtattacacgaactgtagcgctggcgaacacaatcccttcaaaggcgctatcaacttcgacaacatcggctacgcctggatcgccatctttcaggtaattaccttggaaggctgggtcgacatcatgtatttcgtgatggatgcccacagtttctacaactttatctatttcatcttactgataatcgtcggctctttttttatgatcaacctctgtcttgtcgtaattgctactcagttcagcgagaccaagcaacgagagtctcagctcatgagagagcagagagtccgattcctttccaatgcaagcaccctggcttcgttcagtgagccaggctcttgctacgaagagctgctgaaatatctcgtgtatattctgcgcaaagccgcacgccgactggctcaagtgagtcgcgctgcgggtgtcagggtgggactgcttagctctcctgccccactagggggtcaagagacgcagccatcatcatcttgctcaaggtctcatcgacggctttccgttcaccatctcgttcatcatcaccatcatcaccaccaccattatcacctcgggaacggcaccttgagggcccctcgagcatctcccgaaattcaagatagagacgccaacgggtccaggcggctcatgctgccccctcccagcacaccagctctgtcaggagcccctccaggcggagctgaatccgtgcactcattctaccacgccgattgtcacttggaaccagtccgttgtcaggcacctccgcctcgatctcccagcgaggcctctggcaggaccgtggggagcggaaaagtatacccaacagtccatacgtctcctccgcctgagactctcaaagagaaggctcttgtagaggtcgcagcctctagtggtcctcctacacttactagcttgaatattcctccagggccttacagctcaatgcacaagctcctggagactcagagtaccggcgcttgtcagtcatcctgtaaaattagcagcccttgccttaaggcagactccggcgcttgtggacccgacagctgcccatactgtgcaagggctggcgctggagaggttgagttagccgatagggagatgcccgactcagatagtgaggcggtctacgaatttacccaggacgcacagcacagtgacttaagagatccacatagcaggaggcaacgttctctcggcccagacgcggaaccatcgagtgtgttagcattctggagattaatttgcgacaccttcaggaaaatcgtggattccaaatactttggcaggggtataatgattgctatactggtaaacactctgtcaatggggattgaatatcatgaacagccggaggagttaaccaatgctttggagatttcaaacatagttttcacaagcttgttcgcgctggaaatgcttttgaaattgcttgtctacgggccattcggctatattaagaacccttataacatctttgatggcgttattgttgtgatctcggtctgggagatagtcggccagcagggagggggattatcagttctaaggacttttaggctcatgagagtgttgaagctggtcaggttcctcccggcactgcagaggcaactggtggtactcatgaagaccatggataacgtggctacattttgcatgctgctcatgctgtttatctttattttctccatcctcggaatgcacctgtttggctgcaaatttgcgagtgaacgagacggggatacgttacctgatcgcaaaaacttcgacagccttctctgggcgattgtgactgtgtttcaaattctgacccaagaggactggaataaggtgctctataacggcatggctagcacaagcagttgggcagccctgtacttcatagccctgatgacctttggtaattacgtgctcttcaaccttttagtggctattctcgtagagggctttcaggcagaagaaataagtaagcgcgaggacgccagtggccagttatcgtgcatccagctgcccgtggactctcagggaggggacgccaacaagagtgagtccgagccggactttttctctccctccctagacggagacggggacaggaagaaatgcttggctctagtgagccttggtgagcatcccgagctgcggaaatccctgctgccaccactcatcattcataccgccgctacacccatgtcacttcccaaatcgactagtacagggctcggagaggcactgggacccgcttctcggcgaacgagcagctcaggttctgcagaacctggggcagcccacgagatgaaaagccctccgtccgctaggtcctcccctcatagcccgtggtctgcggcaagttcatggaccagcagaagaagcagtaggaattccctcgggagagcaccatccctaaaacggaggagcccgagtggtgagcggcgttctctcctcagcggggaggggcaggaaagccaggatgaagaggagtccagcgaggaggagcgagcgagtcccgctggctcagaccaccgacatcggggatcactagagcgagaggccaaaagctcattcgatctacccgacactctgcaagtccccggtttgcaccggaccgcctccgggaggggttccgccagcgagcatcaagactgcaatggcaagagcgcctctgggaggctggcaagagcattaaggcccgacgatccaccactcgatggcgacgacgctgacgacgagggaaatctctctaagggagagagagtgagagcatggatcagggccaggttacctgcctgttgtctcgaacgcgactcttggagcgcttacatttttccccctcagagtcggtttaggctgctgtgccaccggattattacccacaaaatgttcgatcatgttgtcctggtaatcatcttcctgaactgcatcacgatagctatggagcgccctaagatcgaccctcactccgcagagcgcatttttttaacactaagcaactacattttcacagctgtgtttttggcggagatgacagtgaaagttgtggcccttggttggtgcttcggtgaacaggcatatttgcgctctagttggaacgtgctggatggcctcctagtgctgatctctgtaatcgacatcttagtgtctatggtctctgattctggcactaagattctcgggatgctgagagtcctcaggttgctgcgaacacttcgaccgcttagagttatctcgagggcacaaggcctaaaactagtggtggagacactcatgtcgagcctgaagcctattggcaacattgtcgtcatctgctgcgcgtttttcatcatctttggcattcttggcgtacagctctttaagggaaaattctttgtgtgtcagggtgaagataccagaaacataaccaacaaatcagattgtgccgaagctagctatcgctgggtgcgacacaagtacaacttcgataacctgggtcaagccttgatgagccttttcgtcctcgcatccaaagatggttgggtggatatcatgtacgacggcctggacgccgtgggcgtcgaccagcagccgataatgaatcataatccctggatgctgctgtacttcatctccttcctactcatagtagcgttctttgtgctgaacatgttcgtgggggttgtcgtggaaaattttcataaatgtaggcaacaccaggaggaggaagaagcacgtcgtcgagaggaaaaaaggctgaggcggttagagaaaaaaagaaggaatcttatgctggacgatgtgatagcatccgggagttctgcctcagctgcctctgaggcccagtgtaagccctactattcagactacagtagattccggttgctcgttcaccatctctgtacaagtcattacctggacctttttattacaggtgtgatagggctgaacgtggtaacgatggcaatggaacactatcagcagccacagatcttagatgaggccctcaagatctgtaactatatcttcacagtgatcttcgtcctggaatcagtatttaagctagtagcattcggctttcgcagattcttccaagataggtggaaccagctggacttagctatagtccttctatcgattatgggcattacactggaagaaattgaggtgaatgcctctctgcccataaaccctaccataatccggatcatgcgcgtcctgaggattgcccgtgtgctcaagctgctgaagatggctgtcggcatgcgtgcccttctcgatacggtgatgcaagcactgcctcagctgtgggcttggagttcacttgagacttggtccgtcacacgacacactccagtcagagcctgggccgtgatgcctccctttgggacacttgcatggccatccta

SEQ ID NO: 200375 - DNA, 7648 bp, Artificial Sequence
  derived and/or modified sequence
atggacgaggaggaggatggagcgggcgccgaggagtcgggacagccccggagcttcatgcggctcaacgacctgtcgggggccgggggccggccggggccggggtcagcagaaaaggacccgggcagcgcggactccgaggcggaggggctgccgtacccggcgctggccccggtggttttcttctacttgagccaggacagccgcccgcggagctggtgtctccgcacggtctgtaacccctggtttgagcgcatcagcatgttggtcatccttctcaactgcgtgaccctgggcatgttccggccatgcgaggacatcgcctgtgactcccagcgctgccggatcctgcaggcctttgatgacttcatctttgccttctttgccgtggagatggtggtgaagatggtggccttgggcatctttgggaaaaagtgttacctgggagacacttggaaccggcttgactttttcatcgtcatcgcagggatgctggagtactcgctggacctgcagaacgtcagcttctcagctgtcaggacagtccgtgtgctgcgaccgctcagggccattaaccgggtgcccagcatgcgcatccttgtcacgttgctgctggatacgctgcccatgctgggcaacgtcctgctgctctgcttcttcgtcttcttcatcttcggcatcgtcggcgtccagctgtgggcagggctgcttcggaaccgatgcttcctacctgagaatttcagcctccccctgagcgtggacctggagcgctattaccagacagagaacgaggatgagagccccttcatctgctcccagccacgcgagaacggcatgcggtcctgcagaagcgtgcccacgctgcgcggggacgggggcggtggcccaccttgcggtctggactatgaggcctacaacagctccagcaacaccacctgtgtcaactggaaccagtactacaccaactgctcagcgggggagcacaaccccttcaagggcgccatcaactttgacaacattggctatgcctggatcgccatcttccaggtcatcacgctggagggctgggtcgacatcatgtactttgtgatggatgctcattccttctacaatttcatctacttcatcctcctcatcatcgtgggctccttcttcatgatcaacctgtgcctggtggtgattgccacgcagttctcagagaccaagcagcgggaaagccagctgatgcgggagcagcgtgtgcggttcctgtccaacgccagcaccctggctagcttctctgagcccggcagctgctatgaggagctgctcaagtacctggtgtacatccttcgtaaggcagcccgcaggctggctcaggtctctcgggcagcaggtgtgcgggttgggctgctcagcagcccagcacccctcgggggccaggagacccagcccagcagcagctgctctcgctcccaccgccgcctatccgtccaccacctggtgcaccaccaccaccaccatcaccaccactaccacctgggcaatgggacgctcagggccccccgggccagcccggagatccaggacagggatgccaatgggtcccgccggctcatgctgccaccaccctcgacgcctgccctctccggggccccccctggtggcgcagagtctgtgcacagcttctaccatgccgactgccacttagagccagtccgctgccaggcgccccctcccaggtccccatctgaggcatccggcaggactgtgggcagcgggaaggtgtatcccaccgtgcacaccagccctccaccggagacgctgaaggagaaggcactagtagaggtggctgccagctctgggcccccaaccctcaccagcctcaacatcccacccgggccctacagctccatgcacaagctgctggagacacagagtacaggtgcctgccaaagctcttgcaagatctccagcccttgcttgaaagcagacagtggagcctgtggtccagacagctgcccctactgtgcccgggccggggcaggggaggtggagctcgccgaccgtgaaatgcctgactcagacagcgaggcagtttatgagttcacacaggatgcccagcacagcgacctccgggacccccacagccggcggcaacggagcctgggcccagatgcagagcccagctctgtgctggccttctggaggctaatctgtgacaccttccgaaagattgtggacagcaagtactttggccggggaatcatgatcgccatcctggtcaacacactcagcatgggcatcgaataccacgagcagcccgaggagcttaccaacgccctagaaatcagcaacatcgtcttcaccagcctctttgccctggagatgctgctgaagctgcttgtgtatggtccctttggctacatcaagaatccctacaacatcttcgatggtgtcattgtggtcatcagcgtgtgggagatcgtgggccagcaggggggcggcctgtcggtgctgcggaccttccgcctgatgcgtgtgctgaagctggtgcgcttcctgccggcgctgcagcggcagctggtggtgctcatgaagaccatggacaacgtggccaccttctgcatgctgcttatgctcttcatcttcatcttcagcatcctgggcatgcatctcttcggctgcaagtttgcctctgagcgggatggggacaccctgccagaccggaagaattttgactccttgctctgggccatcgtcactgtctttcagatcctgacccaggaggactggaacaaagtcctctacaatggtatggcctccacgtcgtcctgggcggccctttatttcattgccctcatgaccttcggcaactacgtgctcttcaatttgctggtcgccattctggtggagggcttccaggcggaggaaatcagcaaacgggaagatgcgagtggacagttaagctgtattcagctgcctgtcgactcccaggggggagatgccaacaagtccgaatcagagcccgatttcttctcacccagcctggatggtgatggggacaggaagaagtgcttggccttggtgtccctgggagagcacccggagctgcggaagagcctgctgccgcctctcatcatccacacggccgccacacccatgtcgctgcccaagagcaccagcacgggcctgggcgaggcgctgggccctgcgtcgcgccgcaccagcagcagcgggtcggcagagcctggggcggcccacgagatgaagtcaccgcccagcgcccgcagctctccgcacagcccctggagcgctgcaagcagctggaccagcaggcgctccagccggaacagcctcggccgtgcacccagcctgaagcggagaagcccaagtggagagcggcggtccctgttgtcgggagaaggccaggagagccaggatgaagaggagagctcagaagaggagcgggccagccctgcgggcagtgaccatcgccacagggggtccctggagcgggaggccaagagttcctttgacctgccagacacactgcaggtgccagggctgcatcgcactgccagtggccgagggtctgcttctgagcaccaggactgcaatggcaagtcggcttcagggcgcctggcccgggccctgcggcctgatgaccccccactggatggggatgacgccgatgacgagggcaacctgagcaaaggggaacgggtccgcgcgtggatccgagcccgactccctgcctgctgcctcgagcgagactcctggtcagcctacatcttccctcctcagtccaggttccgcctcctgtgtcaccggatcatcacccacaagatgttcgaccacgtggtccttgtcatcatcttccttaactgcatcaccatcgccatggagcgccccaaaattgacccccacagcgctgaacgcatcttcctgaccctctccaattacatcttcaccgcagtctttctggctgaaatgacagtgaaggtggtggcactgggctggtgcttcggggagcaggcgtacctgcggagcagttggaacgtgctggacgggctgttggtgctcatctccgtcatcgacattctggtgtccatggtctctgacagcggcaccaagatcctgggcatgctgagggtgctgcggctgctgcggaccctgcgcccgctcagggtgatcagccgggcgcaggggctgaagctggtggtggagacgctgatgtcctcactgaaacccatcggcaacattgtagtcatctgctgtgccttcttcatcattttcggcatcttgggggtgcagctcttcaaagggaagtttttcgtgtgccagggcgaggataccaggaacatcaccaataaatcggactgtgccgaggccagttaccggtgggtccggcacaagtacaactttgacaaccttggccaggccctgatgtccctgttcgttttggcctccaaggatggttgggtggacatcatgtacgatgggctggatgctgtgggcgtggaccagcagcccatcatgaaccacaacccctggatgctgctgtacttcatctcgttcctgctcattgtggccttctttgtcctgaacatgtttgtgggtgtggtggtggagaacttccacaagtgtcggcagcaccaggaggaagaggaggcccggcggcgggaggagaagcgcctacgaagactggagaaaaagagaaggaatctaatgctggacgatgtaattgcttccggcagctcagccagcgctgcgtcagaagcccagtgcaaaccttactactccgactactcccgcttccggctcctcgtccaccacttgtgcaccagccactacctggacctcttcatcacaggtgtcatcgggctgaacgtggtcaccatggccatggagcactaccagcagccccagattctggatgaggctctgaagatctgcaactacatcttcactgtcatctttgtcttggagtcagttttcaaacttgtggcctttggtttccgtcggttcttccaggacaggtggaaccagctggacctggccattgtgctgctgtccatcatgggcatcacgctggaggaaatcgaggtcaacgcctcgctgcccatcaaccccaccatcatccgcatcatgagggtgctgcgcattgcccgagtgctgaagctgctgaagatggctgtgggcatgcgggcgctgctggacacggtgatgcaggccctgccccaggtggggaacctgggacttctcttcatgttgttgtttttcatctttgcagctctgggcgtggagctctttggagacctggagtgtgacgagacacacccctgtgagggcctgggccgtcatgccacctttcggaactttggcatggccttcctaaccctcttccgagtctccacaggtgacaattggaatggcattatgaaggacaccctccgggactgtgaccaggagtccacctgctacaacacggtcatctcgcctatctactttgtgtccttcgtgctgacggcccagttcgtgctagtcaacgtggtgatcgccgtgctgatgaagcacctggaggagagcaacaaggaggccaaggaggaggccgagctagaggctgagctggagctggagatgaagaccctcagcccccagccccactcgccactgggcagccccttcctctggcctggggtcgagggccccgacagccccgacagccccaagcctggggctctgcacccagcggcccacgcgagatcagcctcccacttttccctggagcaccccacggacaggcagctgtttgacaccatatccctgctgatccagggctccctggagtgggagctgaagctgatggacgagctggcaggcccagggggccagccctctgccttcccttctgcccccagcctgggaggctccgacccacagatccctctagctgagatggaggctctgtctctgacgtcagagattgtgtctgaaccgtcctgctctctagctctgacggatgactctttgcctgatgacatgcacacactcttacttagtgccctggagagcaatatgcagccccaccccacggagctgccaggaccagacttactgactgtgcggaagtctggggtcagccgaacgcactctctgcccaatgacagctacatgtgtcggcatgggagcactgccgaggggcccctgggacacaggggctgggggctccccaaagctcagtcaggctccgtcttgtccgttcactcccagccagcagataccagctacatcctgcagcttcccaaagatgcacctcatctgctccagccccacagcgccccaacctggggcaccatccccaaactgcccccaccaggacgctcccctttggctcagaggccactcaggcgccaggcagcaataaggactgactccttggacgttcagggtctgggcagccgggaagacctgctggcagaggtgagtgggccctccccgcccctggcccgggcctactctttctggggccagtcaagtacccaggcacagcagcactcccgcagccacagcaagatctccaagcacatgaccccgccagccccttgcccaggcccagaacccaactggggcaagggccctccagagaccagaagcagcttagagttggacacggagctgagctggatttcaggagacctcctgccccctggcggccaggaggagcccccatccccacgggacctgaagaagtgctacagcgtggaggcccagagctgccagcgccggcctacgtcctggctggatgagcagaggagacactctatcgccgtcagctgcctggacagcggctcccaaccccacctgggcacagacccctctaaccttgggggccagcctcttggggggcctgggagccggcccaagaaaaaactcagcccgcctagtatcaccatagacccccccgagagccaaggtcctcggaccccgcccagccctggtatctgcctccggaggagggctccgtccagcgactccaaggatcccttggcctctggcccccctgacagcatggctgcctcgccctccccaaagaaagatgtgctgagtctctccggtttatcctctgacccagcagacctggacccctgagtcctgccccactttcccactcacctttctccactgggtgccaagtcctagctcctcctcctgggctatattcctgacaaaagttccatatagacaccaaggaggcggaggcgctcctccctgcctcagtggctctgggtacctgcaagcagaacttccaaagagagttaaaagcagcagccccggcaactctggctccaggcagaaggagaggcccggtgcagctgaggttcccgacaccagaagctgttgggagaaagcaatacgtttgtgcagaatctctatgtatattctattttattaaattaattgaatctagtatatgcgggatgtacgacattttgtgactgaagagacttgtttccttctacttttatgtgtctcagaatatttttgaggcgaaggcgtctgtctcttggctattttaacctaaaataacagtctagttatattccctcttcttgcaaagcacaagctgggaccgcgagcacattgcagccccaacggtggccca

SEQ ID NO: 200376 - DNA, 6821 bp, Artificial Sequence
  derived and/or modified sequence
atggacgaggaggaggatggagcgggcgccgaggagtcgggacagccccggagcttcatgcggctcaacgacctgtcgggggccgggggccggccggggccggggtcagcagaaaaggacccgggcagcgcggactccgaggcggaggggctgccgtacccggcgctggccccggtggttttcttctacttgagccaggacagccgcccgcggagctggtgtctccgcacggtctgtaacccctggtttgagcgcatcagcatgttggtcatccttctcaactgcgtgaccctgggcatgttccggccatgcgaggacatcgcctgtgactcccagcgctgccggatcctgcaggcctttgatgacttcatctttgccttctttgccgtggagatggtggtgaagatggtggccttgggcatctttgggaaaaagtgttacctgggagacacttggaaccggcttgactttttcatcgtcatcgcagggatgctggagtactcgctggacctgcagaacgtcagcttctcagctgtcaggacagtccgtgtgctgcgaccgctcagggccattaaccgggtgcccagcatgcgcatccttgtcacgttgctgctggatacgctgcccatgctgggcaacgtcctgctgctctgcttcttcgtcttcttcatcttcggcatcgtcggcgtccagctgtgggcagggctgcttcggaaccgatgcttcctacctgagaatttcagcctccccctgagcgtggacctggagcgctattaccagacagagaacgaggatgagagccccttcatctgctcccagccacgcgagaacggcatgcggtcctgcagaagcgtgcccacgctgcgcggggacgggggcggtggcccaccttgcggtctggactatgaggcctacaacagctccagcaacaccacctgtgtcaactggaaccagtactacaccaactgctcagcgggggagcacaaccccttcaagggcgccatcaactttgacaacattggctatgcctggatcgccatcttccaggtcatcacgctggagggctgggtcgacatcatgtactttgtgatggatgctcattccttctacaatttcatctacttcatcctcctcatcatcgtgggctccttcttcatgatcaacctgtgcctggtggtgattgccacgcagttctcagagaccaagcagcgggaaagccagctgatgcgggagcagcgtgtgcggttcctgtccaacgccagcaccctggctagcttctctgagcccggcagctgctatgaggagctgctcaagtacctggtgtacatccttcgtaaggcagcccgcaggctggctcaggtctctcgggcagcaggtgtgcgggttgggctgctcagcagcccagcacccctcgggggccaggagacccagcccagcagcagctgctctcgctcccaccgccgcctatccgtccaccacctggtgcaccaccaccaccaccatcaccaccactaccacctgggcaatgggacgctcagggccccccgggccagcccggagatccaggacagggatgccaatgggtcccgccggctcatgctgccaccaccctcgacgcctgccctctccggggccccccctggtggcgcagagtctgtgcacagcttctaccatgccgactgccacttagagccagtccgctgccaggcgccccctcccaggtccccatctgaggcatccggcaggactgtgggcagcgggaaggtgtatcccaccgtgcacaccagccctccaccggagacgctgaaggagaaggcactagtagaggtggctgccagctctgggcccccaaccctcaccagcctcaacatcccacccgggccctacagctccatgcacaagctgctggagacacagagtacaggtgcctgccaaagctcttgcaagatctccagcccttgcttgaaagcagacagtggagcctgtggtccagacagctgcccctactgtgcccgggccggggcaggggaggtggagctcgccgaccgtgaaatgcctgactcagacagcgaggcagtttatgagttcacacaggatgcccagcacagcgacctccgggacccccacagccggcggcaacggagcctgggcccagatgcagagcccagctctgtgctggccttctggaggctaatctgtgacaccttccgaaagattgtggacagcaagtactttggccggggaatcatgatcgccatcctggtcaacacactcagcatgggcatcgaataccacgagcagcccgaggagcttaccaacgccctagaaatcagcaacatcgtcttcaccagcctctttgccctggagatgctgctgaagctgcttgtgtatggtccctttggctacatcaagaatccctacaacatcttcgatggtgtcattgtggtcatcagcgtgtgggagatcgtgggccagcaggggggcggcctgtcggtgctgcggaccttccgcctgatgcgtgtgctgaagctggtgcgcttcctgccggcgctgcagcggcagctggtggtgctcatgaagaccatggacaacgtggccaccttctgcatgctgcttatgctcttcatcttcatcttcagcatcctgggcatgcatctcttcggctgcaagtttgcctctgagcgggatggggacaccctgccagaccggaagaattttgactccttgctctgggccatcgtcactgtctttcagatcctgacccaggaggactggaacaaagtcctctacaatggtatggcctccacgtcgtcctgggcggccctttatttcattgccctcatgaccttcggcaactacgtgctcttcaatttgctggtcgccattctggtggagggcttccaggcggaggaaatcagcaaacgggaagatgcgagtggacagttaagctgtattcagctgcctgtcgactcccaggggggagatgccaacaagtccgaatcagagcccgatttcttctcacccagcctggatggtgatggggacaggaagaagtgcttggccttggtgtccctgggagagcacccggagctgcggaagagcctgctgccgcctctcatcatccacacggccgccacacccatgtcgctgcccaagagcaccagcacgggcctgggcgaggcgctgggccctgcgtcgcgccgcaccagcagcagcgggtcggcagagcctggggcggcccacgagatgaagtcaccgcccagcgcccgcagctctccgcacagcccctggagcgctgcaagcagctggaccagcaggcgctccagccggaacagcctcggccgtgcacccagcctgaagcggagaagcccaagtggagagcggcggtccctgttgtcgggagaaggccaggagagccaggatgaagaggagagctcagaagaggagcgggccagccctgcgggcagtgaccatcgccacagggggtccctggagcgggaggccaagagttcctttgacctgccagacacactgcaggtgccagggctgcatcgcactgccagtggccgagggtctgcttctgagcaccaggactgcaatggcaagtcggcttcagggcgcctggcccgggccctgcggcctgatgaccccccactggatggggatgacgccgatgacgagggcaacctgagcaaaggggaacgggtccgcgcgtggatccgagcccgactccctgcctgctgcctcgagcgagactcctggtcagcctacatcttccctcctcagtccaggttccgcctcctgtgtcaccggatcatcacccacaagatgttcgaccacgtggtccttgtcatcatcttccttaactgcatcaccatcgccatggagcgccccaaaattgacccccacagcgctgaacgcatcttcctgaccctctccaattacatcttcaccgcagtctttctggctgaaatgacagtgaaggtggtggcactgggctggtgcttcggggagcaggcgtacctgcggagcagttggaacgtgctggacgggctgttggtgctcatctccgtcatcgacattctggtgtccatggtctctgacagcggcaccaagatcctgggcatgctgagggtgctgcggctgctgcggaccctgcgcccgctcagggtgatcagccgggcgcaggggctgaagctggtggtggagacgctgatgtcctcactgaaacccatcggcaacattgtagtcatctgctgtgccttcttcatcattttcggcatcttgggggtgcagctcttcaaagggaagtttttcgtgtgccagggcgaggataccaggaacatcaccaataaatcggactgtgccgaggccagttaccggtgggtccggcacaagtacaactttgacaaccttggccaggccctgatgtccctgttcgttttggcctccaaggatggttgggtggacatcatgtacgatgggctggatgctgtgggcgtggaccagcagcccatcatgaaccacaacccctggatgctgctgtacttcatctcgttcctgctcattgtggccttctttgtcctgaacatgtttgtgggtgtggtggtggagaacttccacaagtgtcggcagcaccaggaggaagaggaggcccggcggcgggaggagaagcgcctacgaagactggagaaaaagagaaggaatctaatgctggacgatgtaattgcttccggcagctcagccagcgctgcgtcagaagcccagtgcaaaccttactactccgactactcccgcttccggctcctcgtccaccacttgtgcaccagccactacctggacctcttcatcacaggtgtcatcgggctgaacgtggtcaccatggccatggagcactaccagcagccccagattctggatgaggctctgaagatctgcaactacatcttcactgtcatctttgtcttggagtcagttttcaaacttgtggcctttggtttccgtcggttcttccaggacaggtggaaccagctggacctggccattgtgctgctgtccatcatgggcatcacgctggaggaaatcgaggtcaacgcctcgctgcccatcaaccccaccatcatccgcatcatgagggtgctgcgcattgcccgagtgctgaagctgctgaagatggctgtgggcatgcgggcgctgctggacacggtgatgcaggccctgccccagctctgggcgtggagctctttggagacctggagtgtgacgagacacacccctgtgagggcctgggccgtcatgccacctttcggaactttggcatggccttcctaaccctcttccgagtctccacaggtgacaattggaatggcattatgaaggacaccctccgggactgtgaccaggagtccacctgctacaacacggtcatctcgcctatctactttgtgtccttcgtgctgacggcccagttcgtgctagtcaacgtggtgatcgccgtgctgatgaagcacctggaggagagcaacaaggaggccaaggaggaggccgagctagaggctgagctggagctggagatgaagaccctcagcccccagccccactcgccactgggcagccccttcctctggcctggggtcgagggccccgacagccccgacagccccaagcctggggctctgcacccagcggcccacgcgagatcagcctcccacttttccctggagcaccccacgatgcagccccaccccacggagctgccaggaccagacttactgactgtgcggaagtctggggtcagccgaacgcactctctgcccaatgacagctacatgtgtcggcatgggagcactgccgaggggcccctgggacacaggggctgggggctccccaaagctcagtcaggctccgtcttgtccgttcactcccagccagcagataccagctacatcctgcagcttcccaaagatgcacctcatctgctccagccccacagcgccccaacctggggcaccatccccaaactgcccccaccaggacgctcccctttggctcagaggccactcaggcgccaggcagcaataaggactgactccttggacgttcagggtctgggcagccgggaagacctgctggcagaggtgagtgggccctccccgcccctggcccgggcctactctttctggggccagtcaagtacccaggcacagcagcactcccgcagccacagcaagatctccaagcacatgaccccgccagccccttgcccaggcccagaacccaactggggcaagggccctccagagaccagaagcagcttagagttggacacggagctgagctggatttcaggagacctcctgccccctggcggccaggaggagcccccatccccacgggacctgaagaagtgctacagcgtggaggcccagagctgccagcgccggcctacgtcctggctggatgagcagaggagacactctatcgccgtcagctgcctggacagcggctcccaaccccacctgggcacagacccctctaaccttgggggccagcctcttggggggcctgggagccggcccaagaaaaaactcagcccgcctagtatcaccatagacccccccgagagccaaggtcctcggaccccgcccagccctggtatctgcctccggaggagggctccgtccagcgactccaaggatcccttggcctctggcccccctgacagcatggctgcctcgccctccccaaagaaagatgtgctgagtctctccggtttatcctctgacccagcagacctggacccctgagtcctgccccacttt

SEQ ID NO: 200377 - protein, 4024 aa, Artificial Sequence
  derived and/or modified sequence
MSSEQDKSASKEKSKKPVRFLPQLSMEKLASKEKFKAPARALPQLSMVSTKPHWQQAAPSFHLSVKQDDESPEPFSVKNEQSHAEYMERFGKKGKLPHQVDDSYVGPSTSKSKGKSPHKERENFRSTLVNVIMQQDADLDSAVPDGSTIPKPTASAIEKDILRYYYYIHHGIDTDHVAPMEDSWLEHVLDLVPQHLKVFTDSIVTLSDEMREDYLLSVRKSIVDFVLKDPREKGDDKKTDELPAHRAEMEILPKPWRKSFLAASSYIRDHLNAMNPTMLAVLDLWHTNFKKLRLVDIKEFHNCQDALELSSFQNIIMRHMDSAKETLLKMWFPEVQNIYYQGNKKKQLPTGDSSAKLESFFNCAAALMTLQLQDLTLVSMQDFTDLIAQPPDSVRAFEHPGFIMRLILDNDTIKFEPELSDYIDIFLNVYDVMIKAVSFVPRVETKLYSKWESKSKPTTLKPIILNEIVDAHKEKIKEVIMKESVAPTEHLRLYDKYDFLITRKAERDVDNFLAENHSYEKIIDEICKYQKLIEEIQYTSIKTIRLGMFEMHCEELIRALVKRADIICGKLLAKMFRDHQEVNTRLCDEFERIAEKALSTPPNTAELMEMKAYIQKVEVTDMIELEQRLVDSKNCLAFLIEYVNFSPADMRLNNSVFQWYGRMGEIFEEHRKIIKEKIEQYQEGLKLRCERFVEELESYAKQSEEFYSFGDLQDVQRYLKKAQILNGKLDLAADKIEQFNAEEEAFGWLPSVYPQRKKIQDGLNPYLRLYETAVEFSSNYRAWTEGPYHKVNPDQVEADIGNYWRGLYKLEKTFHDSPYALAMTKKVRSKVEDFKQHIPLIQVICNPGLRPRHWEAMSAIVGYPLQPSDDSTVSSFLDMNLEPYIDRFEGISEAASKEYSLEKAMEKMITEWDAVEFVIHSYRETGTFILASVDEIQMLLDDHIIKTQTMRGSPFIKPYEKQMREWEGKLLLLQEILDEWLKVQATWLYLEPIFSSPDIMSQMPEEGRRFTAVDKTWRDIMRSVMQDKHVLTVVTIDRMLERLKKSNELLELILKGLNEYLEKKRLFFPRFFFLSNDELLEILSETKDPTRVQPHLKKCFEGIAKVEFTETLDITHMKSSEGEVVELIEIISTAKARGQVEKWLVELERVMINSIHKVTGDATFAYTKYERINWVRDWPGQTVLCVSQIFWTKEVQTAIPMGIKALEQYLKTCNRQIDDIVTLVRGKLSMQNRVTLGALVVLDVHARDVLSSLVKKNISDDSDFEWLSQLRYYWQENHLETKMINAGLRYGYEYLGNSPRLVITPLTDRCYRTLFGALHLHLGGAPEGPAGTGKTETTKDLAKAVAKQCVVFNCSDGLDYLALGKFFKGLLSCGAWACFDEFNRIDLEVLSVVAQQILTIQRGINAGADILMFEGTELKLDPTCAVFITMNPGYAGRSELPDNLKALFRTVAMMVPDYAMIAEIVLYSCGFVTARPLSVKIVATYRLCSEQLSSQHHYDYGMRAVKSVLTAAGNLKLKYPNENEEILLLRSIIDVNLPKFLSHDLPLFEGITSDLFPGVKLPKPDYNDLLAAIKDNCASMNLQMTAFFSEKILQVYEMMIVRHGFMIVGEPFGGKTSAYRVLAGALNDICEKGLMEENKVQITVLNPKSVTMGQLYGQFDSVSHEWSDGVLAVSFRAFASSVTPDRKWLIFDGPVDAVWIENMNTVLDDNKKLCLMSGEIIQMSPQMNLIFEPMDLEVASPATVSRCGMIYMEPHMLGWRPLMLSWVNLLPASVSVIQKEFIMGLFDRMVPVSVEFIRKHTKELSPTSDTNLVRSLMNLIDCFMDDFADEVKLKERNDRETYSLLEGIFLFSLIWSVGASCTDDDRLKFNKILRELMESPISDRTRNTFKLQSGTEQTSSKALTVPFPEKGTIYDYQFVTEGIGKWEPWIKKLKEAPPIPKDVMFNEIIVPTLDTIRYSALMELLTTHQKPSIFVGPTGTGKSVYITNFLLNQLNKEIYKPLLINFSAQTTAAQTQNIVMSKLDKRRKGVFGPPLGKRMVVFVDDVNMPAREVYGAQPPIELLRQWLDHWNWYDLKDCSMIKLVDIQIMCAMGPPGGGRNPVTPRYMRHFNIITINEFSDKSMYTIFSRILTWHLEICYKFPDEFLDLTTQIVNGTMTLYKEAMKNLLPTPAKSHYLFNLRDFSRVIQGVCLSRPETTETTEVIKRLWVHEVLRVYYDRLLDNTDRSWLINYIQEILRNYMYEDFHELFQRLDFDNDGMVEADDLRSLMFCDFHDPKREDTNYREIADVDNLRMIVEIHLEEYNNISKKPMNLVLFRFAIEHISRISRILKQPRSHALLVGVGGSGRQSVTRLAAHMADYSVFQVEISKGYDTTEWHEDLKVILRKCAEGEMQGVFLFTDTQIKEESFLEDVSNLLNAGEIPNLFALDEKQEICDKMRQLDRQRDKTKQTDGSPIALFNMFIDHCRSQLHVVLAMSPIGDAFRNRLRKFPALVNCCTIDWFQSWPEDALQAVASRFLEEIEMSEEIRDGCIDMCKSFHTSTIDLSKSFFVELQRYNYVTPTSYLELISTFKLLLEKKRSEVMKMKKRYEVGLEKLDSASSQVATMQMELEALHPQLKVASKEVDEMMIMIEKESVEVAKTEKIVKADETIANEQAMASKAIKDECDADLAGALPILESALAALDTLTAQDITVVKSMKSPPAGVKLVMEAICILKGIKADKIPDPTGSGKKIEDFWGPAKRLLGDMRFLQSLHEYDKDNIPPAYMNIIRKNYIPNPDFVPEKIRNASTAAEGLCKWVIAMDSYDKVAKIVAPKKIKLAAAEGELKIAMDGLRKKQAALKEVQDKLARLQDTLELNKQKKADLENQVDLCSKKLERAEQLIGGLGGEKTRWSHTALELGQLYINLTGDILISSGVVAYLGAFTSTYRQNQTKEWTTLCKGRDIPCSDDCSLMGTLGEAVTIRTWNIAGLPSDSFSIDNGIIIMNARRWPLMIDPQSQANKWIKNMEKANSLYVIKLSEPDYVRTLENCIQFGTPVLLENVGEELDPILEPLLLKQTFKQGGSTCIRLGDSTIEYAPDFRFYITTKLRNPHYLPETSVKVTLLNFMITPEGMQDQLLGIVVAQERPDLEEEKQALILQGAENKRQLKEIEDKILEVLSSSEGNILEDETAIKILSSSKALANEISQKQEVAEETEKKIDTTRMGYRPIAIHSSILFFSLADLANIEPMYQYSLTWFINLFILSIENSEKSEILAKRLQILKDHFTYSLYVNVCRSLFEKDKLLFSFCLTINLLLHERAINKAEWRFLLTGGIGLDNPYANLCTWLPQKSWDEICRLDDLPAFKTIRREFMRLKDGWKKVYDSLEPHHEVFPEEWEDKANEFQRMLIIRCLRPDKVIPMLQEFIINRLGRAFIEPPPFDLAKAFGDSNCCAPLIFVLSPGADPMAALLKFADDQGYGGSKLSSLSLGQGQGPIAMKMLEKAVKEGTWVVLQNCHLATSWMPTLEKVCEELSPESTHPDFRMWLTSYPSPNFPVSVLQNGVKMTNEAPKGLRANIIRSYLMDPISDPEFFGSCKKPEEFKKLLYGLCFFHALVQERRKFGPLGWNIPYEFNETDLRISVQQLHMFLNQYEELPYEALRYMTGECNYGGRVTDDWDRRTLRSILNKFFNPELVENSDYKFDSSGIYFVPPSGDHKSYIEYTKTLPLTPAPEIFGMNANADITKDQSETQLLFDNILLTQSRSAGAGAKSSDEVVNEVASDILGKLPNNFDIEAAMRRYPTTYTQSMNTVLVQEMGRFNKLLKTIRDSCVNIQKAIKGLAVMSTDLEEVVSSILNVKIPEMWMGKSYPSLKPLGSYVNDFLARLKFLQQWYEVGPPPVFWLSGFFFTQAFLTGAQQNYARKYTIPIDLLGFDYEVMEDKEYKHPPEDGVFIHGLFLDGASWNRKIKKLAESHPKILYDTVPVMWLKPCKRADIPKRPSYVAPLYKTSERRGVLSTTGHSTNFVIAMTLPSDQPKEHWIGRGVALLCQLNS

SEQ ID NO: 200378 - protein, 507 aa, Artificial Sequence
  derived and/or modified sequence
MWLTSYPSPNFPVSVLQNGVKMTNEAPKGLRANIIRSYLMDPISDPEFFGSCKKPEEFKKLLYGLCFFHALVQERRKFGPLGWNIPYEFNETDLRISVQQLHMFLNQYEELPYEALRYMTGECNYGGRVTDDWDRRTLRSILNKFFNPELVENSDYKFDSSGIYFVPPSGDHKSYIEYTKTLPLTPAPEIFGMNANADITKDQSETQLLFDNILLTQSRSAGAGAKSSDEVVNEVASDILGKLPNNFDIEAAMRRYPTTYTQSMNTVLVQEMGRFNKLLKTIRDSCVNIQKAIKGLAVMSTDLEEVVSSILNVKIPEMWMGKSYPSLKPLGSYVNDFLARLKFLQQWYEVGPPPVFWLSGFFFTQAFLTGAQQNYARKYTIPIDLLGFDYEVMEDKEYKHPPEDGVFIHGLFLDGASWNRKIKKLAESHPKILYDTVPVMWLKPCKRADIPKRPSYVAPLYKTSERRGVLSTTGHSTNFVIAMTLPSDQPKEHWIGRGVALLCQLNS

SEQ ID NO: 200379 - DNA, 1524 bp, Artificial Sequence
  derived and/or modified sequence
atgtggctgaccagctaccccagccccaacttccccgtgagcgtgctgcagaacggcgtgaagatgaccaacgaggcccccaagggcctgagagccaacatcatcagaagctacctgatggaccccatcagcgaccccgagttcttcggcagctgcaagaagcccgaggagttcaagaagctgctgtacggcctgtgcttcttccacgccctggtgcaggagagaagaaagttcggccccctgggctggaacatcccctacgagttcaacgagaccgacctgagaatcagcgtgcagcagctgcacatgttcctgaaccagtacgaggagctgccctacgaggccctgagatacatgaccggcgagtgcaactacggcggcagagtgaccgacgactgggacagaagaaccctgagaagcatcctgaacaagttcttcaaccccgagctggtggagaacagcgactacaagttcgacagcagcggcatctacttcgtgccccccagcggcgaccacaagagctacatcgagtacaccaagaccctgcccctgacccccgcccccgagatcttcggcatgaacgccaacgccgacatcaccaaggaccagagcgagacccagctgctgttcgacaacatcctgctgacccagagcagaagcgccggcgccggcgccaagagcagcgacgaggtggtgaacgaggtggccagcgacatcctgggcaagctgcccaacaacttcgacatcgaggccgccatgagaagataccccaccacctacacccagagcatgaacaccgtgctggtgcaggagatgggcagattcaacaagctgctgaagaccatcagagacagctgcgtgaacatccagaaggccatcaagggcctggccgtgatgagcaccgacctggaggaggtggtgagcagcatcctgaacgtgaagatccccgagatgtggatgggcaagagctaccccagcctgaagcccctgggcagctacgtgaacgacttcctggccagactgaagttcctgcagcagtggtacgaggtgggccccccccccgtgttctggctgagcggcttcttcttcacccaggccttcctgaccggcgcccagcagaactacgccagaaagtacaccatccccatcgacctgctgggcttcgactacgaggtgatggaggacaaggagtacaagcacccccccgaggacggcgtgttcatccacggcctgttcctggacggcgccagctggaacagaaagatcaagaagctggccgagagccaccccaagatcctgtacgacaccgtgcccgtgatgtggctgaagccctgcaagagagccgacatccccaagagacccagctacgtggcccccctgtacaagaccagcgagagaagaggcgtgctgagcaccaccggccacagcaccaacttcgtgatcgccatgaccctgcccagcgaccagcccaaggagcactggatcggcagaggcgtggccctgctgtgccagctgaacagctag

SEQ ID NO: 200380 - DNA, 12075 bp, Artificial Sequence
  derived and/or modified sequence
atgtcaagcgagcaagataagtcggcatctaaggaaaaatccaagaagccagtgcgtttccttccacaactatccatggaaaaacttgcaagcaaggagaagttcaaggctcccgccagagcgcttccacaactctcgatggtctcgactaagccgcattggcaacaggctgccccaagcttccacctgagtgttaagcaggacgatgagtctcccgagcccttctctgtaaagaacgagcagagccacgctgagtacatggaaagatttgggaaaaagggtaagctgccccaccaggttgacgattcttatgtgggtccctccacctctaagtctaaggggaaaagcccacataaagaacgagaaaacttccgttccactctcgtgaatgtaatcatgcaacaggatgcagatctcgatagcgcggtgccagacggaagtaccataccaaaacccacagctagcgctatcgagaaggatattctacgctactactattatatccaccatgggatcgacactgaccacgtcgctcctatggaagacagctggttggaacacgttctcgacttagtcccccagcaccttaaggtctttaccgactccatagtcaccttgtccgacgagatgagggaagactaccttctgagcgtcagaaagagtattgtggatttcgtgctaaaggacccgcgcgagaaaggggatgataagaaaacagatgagctgcccgcacatcgggcggaaatggagattctgcccaagccttggcgcaaatcgttcctcgccgccagctcatacataagagatcatctaaacgcaatgaatccaacaatgcttgccgttctggacttatggcatactaacttcaagaaactccgactggtggatataaaggaatttcataactgtcaggacgctctggaactgtcttccttccaaaacatcatcatgagacacatggacagcgccaaagaaaccttactgaaaatgtggttccccgaggtgcagaacatctactaccaggggaacaagaaaaaacagttacctacaggggatagctcagctaagttagaatctttcttcaattgcgccgcagccctgatgactttgcagttgcaggatcttacccttgtctctatgcaggacttcacagacctgatcgctcaaccccccgattcagtgcgcgcctttgagcatcccggatttatcatgaggctgattcttgacaacgatactatcaagtttgagcccgagctgagcgactacattgatatattcctaaacgtgtacgatgtgatgataaaagctgtaagtttcgtaccccgcgtcgagacaaagctgtatagcaagtgggaatctaagtctaagcccacgacgctgaagcccattatcctgaacgagatcgtcgatgctcataaggagaagataaaggaagtgattatgaaagagagcgtcgctcctacagaacatctccggctgtacgacaaatatgattttctcattacacgaaaagccgagcgcgacgtcgacaatttcctcgctgagaaccatagttatgagaagatcattgatgagatctgcaagtaccagaagctgatcgaggagatccagtatacttcaattaagaccatacgcttgggtatgttcgaaatgcactgcgaggagcttatccgcgccctggtaaaacgtgccgacattatttgtgggaaattgcttgcaaagatgtttcgtgatcatcaagaagtgaacacacgcctctgcgatgagttcgaacggattgctgagaaagcattgtcaacaccccccaacacagcagaactgatggagatgaaggcctacatccagaaggtggaggtgacagatatgatcgagctcgaacaacggctggtggactctaagaactgtcttgcttttctgatcgaatatgttaacttctctccagcagatatgcggctcaataacagtgtattccagtggtacggaagaatgggcgagatcttcgaagaacatagaaaaataattaaggagaaaattgagcaatatcaggaaggtctcaagttaagatgtgagcgcttcgttgaagagttagagagctatgctaagcagtcagaggagttttactcgttcggagatctacaagacgtgcagcgttacttaaagaaggcacagatccttaatggcaagttagacctggctgctgacaagatagagcaattcaacgctgaagaggaagctttcggctggctgccctccgtgtacccccaaagaaaaaagatccaggacggcctaaacccttacttacgcctctacgagactgctgtggaattctccagtaactacagagcatggacagaggggccttatcacaaagttaatcccgaccaggtagaagcagacattggaaactactggcggggactgtacaaacttgagaagacctttcatgattccccgtacgctctggctatgaccaaaaaggtgcgtagcaaggtcgaagattttaaacagcacatacccctgatccaggtcatctgtaatccgggactgaggccgcggcattgggaagctatgagtgcaattgtcggataccctctgcagccgtccgacgacagtaccgtgtctagttttctcgacatgaacttggagccatacatagacagattcgagggcatctccgaagcagctagcaaggagtattcccttgaaaaagcgatggaaaaaatgatcaccgaatgggatgctgtggagttcgtcattcactcttaccgggagacagggacttttattcttgcatctgtcgatgagattcagatgctgcttgacgatcatatcataaaaacccagactatgagaggctcacctttcatcaagccctatgagaagcagatgagagaatgggagggcaagcttctccttctgcaagagattctggacgagtggttgaaggttcaggctacctggctgtacctagagcctatcttcagctctccagacatcatgtcgcagatgcctgaggaaggaagacggtttaccgctgttgacaagacttggcgggatattatgcggtctgtgatgcaggacaagcacgtgctcaccgtggttaccattgaccgcatgctcgaaagactcaaaaagagcaacgaactgctggagctgattctgaaaggacttaacgagtatctggagaaaaagagactgttttttcctagattctttttcctgtccaacgatgaacttcttgagattctaagcgagaccaaagatcctacccgggtccagccccacctcaaaaagtgcttcgagggcatcgccaaagtggagttcactgagacgctggatataacacacatgaaatcaagcgaaggagaagtcgtggaactgattgagataatatctaccgccaaggcaagaggccaggtcgagaagtggctagtggagctcgagcgtgtcatgataaactctatccacaaagttacaggcgacgccaccttcgcttacactaaatacgaacggatcaactgggttcgggactggcctggccagacagtgctgtgcgttagccaaatattttggaccaaggaggtccagacggccatccccatggggatcaaggcattagagcagtatctgaagacctgtaaccgacagatcgacgatatcgtgactctcgtccgaggcaagctgtccatgcagaaccgcgtcacgctgggagccctggtggtcctcgatgtccacgctcgggacgtgctgagcagcctggttaagaagaatatttcagatgactctgatttcgagtggctgtcccagctgaggtattactggcaggaaaaccatctggagactaagatgatcaacgcaggactcaggtacggctacgaataccttggcaatagccccagacttgtcattacaccccttaccgaccggtgctatagaaccctgttcggggctctccacctgcatcttgggggtgcaccagagggtcccgccggaaccggtaaaacagagaccacgaaagatctggctaaagccgtggctaagcagtgcgtggtgttcaattgcagcgacggcctcgactatctggccctgggtaagttttttaagggccttctgagctgtggggcatgggcctgctttgacgagtttaataggattgacctcgaagtgttgagtgtagtagcgcaacagattttaactatccagaggggcatcaacgctggcgcggacatcttaatgtttgagggaacagagctcaagctagatccaacctgtgccgtgttcatcacgatgaatccagggtatgccggaagaagcgaactccccgacaacttgaaggctctcttcagaacagtagctatgatggtccctgactatgctatgatcgctgaaatagtgctctattcatgcggatttgttaccgctagaccactgagtgtgaagatcgtcgccacttacaggctgtgtagcgagcagctgagttcccaacatcactacgattatgggatgagggctgttaaatcagttctcactgctgcagggaatttgaaattgaagtacccaaatgagaacgaagaaatcctcctgctgagaagtatcatcgacgtgaatttaccaaaatttctgtcgcacgacctgccgttgtttgaaggcatcacaagcgatctgtttcccggcgttaaactacccaaaccagactacaacgatcttctagccgccatcaaggataattgtgctagcatgaacctgcagatgaccgctttcttctccgaaaagattcttcaggtatacgagatgatgatagtgaggcacggcttcatgatcgtgggagagccattcggtggaaaaacaagtgcctatagggttctcgctggagctctgaatgatatctgcgaaaaaggcttgatggaagaaaataaagtccagatcactgtgttaaatcccaaatcagtcaccatgggccagctctacggccagtttgacagcgttagtcatgaatggagcgatggagtactggccgtgagcttccgtgctttcgcttcaagcgttacccctgacagaaagtggctgatcttcgacggaccagtcgacgctgtctggatagaaaacatgaatacagtcctagacgacaacaagaaattgtgtctgatgtccggtgaaatcatccagatgagtccacaaatgaatttaatcttcgagccgatggacctggaggtcgcttcaccggccacagtttccaggtgcggaatgatttacatggaaccacacatgctcggttggaggccacttatgctcagctgggtcaaccttcttcccgccagtgtcagcgtcatccagaaagagttcataatgggcctcttcgatcgtatggtgccggtgagtgtcgaattcattaggaaacacacaaaagaactgtcccctacatcagacaccaacctcgtgcgctctcttatgaacctgatagattgctttatggacgatttcgccgacgaagtaaagctaaaggaacggaacgatcgagaaacgtatagtttgctggaaggaattttcctgttcagtctgatttggtctgtgggtgcaagttgtacggatgacgacaggttaaaattcaacaagattctgagggagctgatggagtccccaattagtgaccggacccggaacacctttaaacttcagtctggcactgagcagacttctagcaaagctcttaccgttccttttcccgagaagggaaccatttatgactatcaattcgtgactgaaggcattgggaaatgggagccatggattaagaaactgaaggaagcaccccctatcccgaaagacgtaatgttcaacgaaatcatcgtgccaacacttgacactatacggtattcagcgttgatggagctgctcacaacacaccagaaaccttccatattcgtgggcccgacagggacaggcaagtccgtgtacatcactaacttcctgctcaaccagctgaacaaggaaatttacaaacctttactcataaattttagtgcgcagacgaccgctgcgcagacacaaaacattgtaatgtctaagttggacaagcgcaggaaaggtgtattcggaccccctttgggcaagaggatggttgtattcgttgacgacgtgaatatgccggcgcgagaagtctacggggcgcagccccccatcgagttgctcagacagtggctagaccactggaattggtatgacctgaaagattgctcaatgataaagctggtggacattcaaatcatgtgtgcaatggggccaccgggtggcgggaggaaccccgtcaccccacgctacatgaggcacttcaacataatcaccatcaatgaattctcagacaagagcatgtacactatcttttcccgcattctgacatggcatttagagatatgctataagtttcccgatgaattcttagacctgacgacacagatcgtgaacggtacaatgactctgtataaggaggctatgaagaacctgctccctacacctgcaaagagccactatctgtttaaccttagggacttctctcgtgttatacaaggcgtgtgcctgagtcgccctgaaaccacggagaccacagaagtcatcaagagactgtgggtgcacgaggtgctgagggtgtattacgaccgcttgctcgacaacacggatcggtcttggctaattaattacatccaggagatcctcaggaattacatgtacgaggattttcatgaactcttccaacgactcgatttcgacaatgacggcatggtcgaagctgacgatctgcgatcattaatgttttgtgactttcacgatcccaagcgggaagatacaaactatcgcgagattgcagacgtggataatctgcggatgattgtcgagatccacctcgaggaatacaacaatatttcaaagaagccaatgaacctcgtgctgtttagatttgcaatcgagcacatctcccgcatctctcgtatcttaaagcagccccgctcccacgccctgctcgtcggcgttggcggatccggaaggcagtcagtgactcgcttagcagcccatatggccgattattctgtgtttcaggtggaaatctctaagggatatgacacaacggagtggcacgaggacctgaaggtcatcctgcggaaatgcgctgaaggtgagatgcagggcgtatttttgttcactgatactcagatcaaggaggagagctttctggaggatgtatccaacctgctcaacgccggagagatcccaaacctgtttgcactagatgagaaacaggaaatctgtgacaagatgcggcagctggacagacagagggataaaaccaagcaaaccgacgggtccccaatagcactctttaacatgtttattgatcattgccgttctcagctgcatgtagtcctggccatgtctccgatcggtgacgcattccgcaatcggttacggaaattcccagctttggtcaactgctgcaccatcgactggtttcaaagttggcccgaggatgcgctccaggcagtggccagcaggttccttgaggaaatagagatgagtgaagagatcagggacggctgcatagatatgtgcaaatccttccacacctccacaattgatttgagtaagtctttcttcgtcgagctccagaggtacaattatgtcaccccaacgagctatttagaactcataagtacttttaagctccttctggagaagaagcggagcgaagtcatgaaaatgaagaagcgatacgaggtgggtcttgaaaagctagactccgcctcgtcccaagtcgcaaccatgcagatggagcttgaggcactgcaccctcagctgaaagtggcatccaaggaggtggacgagatgatgattatgattgaaaaggaaagcgtggaggtagcgaagacggaaaaaattgttaaagcggacgaaaccatcgccaatgagcaggctatggccagcaaagctattaaggatgagtgcgatgcggacttggcgggtgcattgcctatactcgaatcagcccttgccgccctggatactttgacagcccaggatattacagtggtgaaatcaatgaagtctccacctgcaggcgtaaagctagtgatggaggccatttgcattttaaagggcatcaaagcagataaaattcctgaccctactgggtccggaaagaaaattgaagatttctggggccccgctaagcgtctcctgggagacatgcgatttcttcagtctttgcatgagtacgataaggacaacatccctcccgcctacatgaacatcattcgcaagaactatatacccaatcctgacttcgtcccggaaaaaatcaggaatgcatctaccgccgcggagggtctctgtaaatgggtcattgccatggactcctacgataaagtggccaaaatcgtggctcccaagaaaatcaaacttgctgccgcagagggggagttaaagatcgcgatggatggattgaggaaaaaacaggcggcccttaaagaggtccaagacaagcttgctcggctgcaggatactctggagctgaataaacagaagaaggctgaccttgagaaccaggtcgatttatgctctaagaagctggaacgtgcagagcagttaatcggaggactggggggcgagaaaaccagatggtctcatacggcccttgagctggggcagctgtatatcaatctcacaggcgacattctgatcagtagcggtgtcgtggcatatcttggcgcatttacttccacgtacaggcagaaccaaacaaaagagtggaccactttatgcaagggacgcgacattccctgctccgatgactgctcgctgatgggaacgttgggcgaagctgtgaccatccgcacctggaatatcgctggcttgccctcggactctttctccatcgacaatggcatcattatcatgaatgccaggcggtggcccctgatgatagatccacagagccaggcaaataaatggattaaaaatatggaaaaggccaactcattatacgttataaagttgtcagaaccagattacgttcggactctcgaaaattgcatccagtttgggactcctgttctgttggagaatgtaggagaggagctggacccaatcctcgaacctctgctgctgaaacagacctttaaacaagggggaagcacttgcatacgcctgggtgatagcactattgagtatgcaccggactttcggttttatatcacaacgaaactgcggaatccgcactacctgcccgaaaccagcgtgaaggttaccctgcttaactttatgatcacccctgagggcatgcaggaccagctgctgggcatcgtggtagcgcaggaaagacctgatttagaggaagaaaagcaggccttgatccttcaaggggccgaaaataaaaggcaactcaaagagatcgaggataagatcctggaggtgctgagttcatccgaggggaatatactggaggacgaaacggcaattaagatactaagttcttctaaggctcttgccaatgagatcagccagaaacaggaagtggcagaagagacagaaaaaaaaattgataccacacggatgggctatcggcccatcgcaatacattcctccatcctcttcttcagcctggcagacctcgcgaatatcgaacctatgtatcagtattctcttacatggtttataaacctgttcatactatccatcgaaaacagcgaaaaaagtgagatcttggctaagcggctgcaaattttaaaggaccatttcacctactccctgtacgtgaacgtttgcagaagcctgtttgagaaggacaagctcctgttcagtttctgtctaactattaatcttcttctgcatgaacgcgcaatcaataaggccgaatggcgctttttgctgacggggggaattgggctcgacaacccttatgcgaatctctgtacctggctgccacagaagtcctgggatgaaatatgcagactcgacgaccttcccgcctttaagaccatccgccgggaattcatgcgactgaaagatgggtggaagaaggtctatgattctttagagcctcaccatgaagtgttcccggaggaatgggaggacaaagccaacgagtttcaacgcatgctgattattagatgcctcagaccagataaggtgatcccgatgcttcaggaattcattatcaaccgcctggggcgcgcattcatcgagcccccaccttttgatcttgcgaaggcatttggggacagcaactgctgtgccccactcatctttgtcttgtcccctggggccgatccgatggcagcactgctgaagttcgctgatgaccagggttatggcggcagcaaactgtcctccctctcgcttgggcagggtcagggacccatcgcgatgaagatgctcgagaaggccgtaaaggaaggcacctgggtagtgctccagaactgtcacctggctactagctggatgcctaccctcgagaaggtctgcgaggaactttctcctgaaagtacacacccagattttaggatgtggctgacaagctaccctagtcctaactttccagtttcagtgctgcaaaacggggtgaaaatgactaacgaggcccctaaaggactgcgggctaacattatccggtcataccttatggatccgatttccgaccccgagttttttggctcgtgtaaaaagccggaggagtttaagaagttactctacggactgtgttttttccatgctctggttcaggagagacggaagttcgggccacttggctggaacattccttacgaattcaatgagactgacctccgcatttcggttcagcagctgcacatgttcttgaatcagtatgaggaacttccatatgaagcgctacgctacatgacaggcgagtgcaattatggtgggcgggtcaccgatgactgggataggcgcactctgcgcagcatcctcaataagttttttaatccagagctcgttgagaactccgactacaaattcgatagctctggaatttactttgtgccacctagcggcgaccataagtcttacatcgagtatacaaagacactgccgcttactcctgcccctgagattttcggtatgaacgccaatgccgacattactaaggaccaaagtgaaactcagttgctcttcgataacattctgctgactcagtcaaggagcgccggggccggtgcaaaatcttccgatgaagtggtgaacgaggttgctagcgacatcctcggtaaattgccaaacaacttcgatatcgaagcggccatgaggcggtaccctaccacctacacgcagtctatgaacacagttctcgtacaggagatgggacgcttcaataaactgcttaagaccattcgtgattcctgcgtaaatatacagaaggccatcaaaggtctggccgtgatgtccacggacctagaggaagttgtgtctagtattctgaacgttaagattcctgagatgtggatggggaagtcctatccaagcctgaagccattggggtcatacgttaatgactttcttgccaggctgaagttcttacagcaatggtatgaggtgggtcccccaccagttttttggctgtccggatttttcttcacacaggccttcctgaccggggcacagcagaattacgcccgtaagtacaccatacctattgacctgctgggattcgattacgaagtgatggaggacaaagagtacaaacatccccctgaagatggtgtattcatccacgggctgttcctcgatggggcgtcctggaaccgaaagataaagaaattagccgaatcacatcccaaaatcttatatgacacagtgcctgtgatgtggcttaagccttgcaagcgggcggatattcccaaacggcccagctatgttgccccactctataagacttcagagaggcggggggtcctctctaccactggccacagcaccaatttcgtcatcgctatgaccctgccctccgatcagcccaaggaacattggattggccggggcgtagcactgctgtgccaactgaactcgtag

SEQ ID NO: 200381 - DNA, 1524 bp, Artificial Sequence
  derived and/or modified sequence
atgtggcttacttcttacccatccccaaatttccctgtgtccgtactgcaaaacggggtcaaaatgaccaacgaggctcccaagggactccgggcgaacattatacgctcctatttaatggaccctatcagtgacccagagttcttcgggagctgtaagaagcctgaggagttcaagaagttgctgtatggactatgttttttccatgccctggtacaggagaggcgcaagttcggccccctgggatggaacattccatatgaattcaacgagacagaccttcgaatctcagtgcagcagctccacatgtttctgaatcagtatgaagaactgccctatgaagcgctccggtatatgactggagaatgcaattatggggggcgggtgacggacgactgggatcgaaggaccctgcgctcgattctgaataaattcttcaaccccgagctcgttgagaatagtgattacaagttcgattcctctggcatctattttgttccaccctccggcgaccacaagtcctatatcgagtacactaagacgcttcccctgacccccgccccagagatattcggaatgaacgccaacgcggatataacaaaggatcagtctgagacacagctgctttttgataatatcctgctgactcagtcacgatctgccggagctggggctaagagctccgacgaggtcgtgaacgaggttgctagcgatattctcggtaaattgcctaacaacttcgatattgaggcagcaatgcgcagatatccaaccacatacacacaaagcatgaacactgtgctggtacaggagatggggcgttttaacaagttgctcaagactattcgcgattcatgtgttaacattcagaaggctatcaagggtctggccgtgatgtctaccgatctggaagaggtggttagctcaatactgaatgtgaagattcctgagatgtggatggggaagtcgtatccctctctgaaaccactcggcagctacgtcaatgactttctggccagactcaagtttcttcagcagtggtacgaagtgggccctcctcctgttttttggctgtcgggcttcttcttcacccaggcgtttctcaccggggctcaacagaactacgcaaggaagtataccattcccatagacctcttggggttcgactacgaggttatggaggataaagagtacaaacacccaccagaggacggtgtgtttatacacggactgttccttgacggtgcatcatggaataggaagattaaaaagctcgctgaatcccatccaaagatattatacgacacagtgcccgtgatgtggctgaagccctgtaagcgcgctgatattccaaagcgtcctagctatgtggcacccctttacaaaacaagcgagagacgcggggtgctctccacaaccggacattccacaaactttgttatagcaatgacattaccgagcgaccagcctaaggaacattggataggtcggggtgtggcacttctgtgtcagttgaattcgtag

SEQ ID NO: 200382 - DNA, 12075 bp, Artificial Sequence
  derived and/or modified sequence
atgagcagcgagcaggacaagagcgccagcaaggagaagagcaagaagcctgtgcgcttcctgccccagctgtccatggagaagctggccagcaaggagaagttcaaggccccagcccgggccctgccccagctgtccatggtgtccaccaagccccactggcagcaggccgcccccagcttccacctgtctgtgaagcaggatgatgagagccctgagcccttctctgtgaagaatgagcagagccacgccgagtacatggagagatttgggaagaagggcaagctgccccaccaggtggatgacagctatgtgggccccagcaccagcaagagcaagggcaagagcccccacaaggagcgggagaacttccgcagcaccctggtgaatgtcatcatgcagcaggatgctgacctggacagcgctgtgcctgatggcagcaccatccccaagcccacagccagcgccatcgagaaggacatcctgcgctactactactacatccaccacggcatcgacacagaccacgtggcccccatggaggacagctggctggagcacgtgctggacctggtgccccagcacctgaaggtgttcacagacagcatcgtgaccctgagtgatgagatgagggaggactacctgctgtctgtgaggaagagcatcgtggactttgtgctgaaggacccccgggagaagggagatgacaagaagacagatgagctgcctgcccacagagctgagatggagatcctgcccaagccctggaggaagagcttcctggccgccagcagctacatccgggaccacctgaatgccatgaaccccaccatgctggccgtgctggacctgtggcacaccaacttcaagaagctgcggctggtggacatcaaggagttccacaactgccaggatgccctggagctgagcagcttccagaacatcatcatgaggcacatggacagcgccaaggagaccctgctgaagatgtggttccctgaggtgcagaacatctactaccagggcaacaagaagaagcagctgcccaccggggacagcagcgccaagctggagagcttcttcaactgtgccgccgccctgatgaccctgcagctgcaggacctgaccctggtgtccatgcaggacttcacagacctgattgcccagcccccagattctgtgcgggcctttgagcaccctggcttcatcatgaggctcatcctggacaatgacaccatcaagtttgagcctgagctgagtgactacatcgacatcttcctgaatgtgtatgatgtgatgatcaaggctgtgtcctttgtgccccgggtggagaccaagctgtacagcaagtgggagagcaagagcaagcccaccaccctgaagcccatcatcctgaatgagatcgtggatgcccacaaggagaagatcaaggaggtgatcatgaaggagagcgtggcccccacagagcacctgcggctgtatgacaagtatgacttcctgatcaccaggaaggccgagagagatgtggacaacttcctggccgagaaccacagctatgagaagatcattgatgagatctgcaagtaccagaagctgattgaggagatccagtacaccagcatcaagaccatccggctgggcatgtttgagatgcactgtgaggagctgatccgggccctggtgaagagagctgacatcatctgtgggaagctgctggccaagatgttccgggaccaccaggaggtgaacacccggctgtgtgatgaatttgaaagaattgctgagaaggccctgagcaccccacccaacacagctgagctgatggagatgaaggcctacatccagaaggtggaggtgacagacatgattgagctggagcagaggctggtggacagcaagaactgcctggccttcctgattgaatatgtgaacttctccccagctgacatgaggctgaacaacagcgtcttccagtggtacggccgcatgggagagatctttgaggagcacaggaagatcatcaaggagaagattgagcagtaccaggagggcctgaagctgcgctgtgaaagatttgtggaggagctggagagctatgccaagcagagcgaggagttctacagctttggagacctgcaggatgtgcagcgctacctgaagaaggcccagatcctgaatggcaagctggacctggccgctgacaagattgagcagttcaatgctgaggaggaggccttcggctggctgcccagcgtgtacccccagaggaagaagatccaggacggcctgaacccctacctgcggctgtatgaaacagctgtggagttcagcagcaactaccgggcctggacagagggcccctaccacaaggtgaacccagaccaggtggaggccgacatcggcaactactggaggggcctgtacaagctggagaagaccttccatgacagcccctatgccctggccatgaccaagaaggtgcgcagcaaggtggaggacttcaagcagcacatccccctcatccaggtgatctgcaaccctggcctgcggcccaggcactgggaggccatgtctgccatcgtgggctaccccctgcagcccagtgatgacagcacagtgtcctccttcctggacatgaacctggagccctacatcgacagatttgagggcatcagcgaggccgccagcaaggagtacagcctggagaaggccatggagaagatgatcacagagtgggatgctgtggagtttgtgatccacagctaccgggagaccggcaccttcatcctggcctctgtggatgagatccagatgctgctggatgaccacatcatcaagacccagaccatgaggggcagccccttcatcaagccctatgagaagcagatgagggagtgggagggcaagctgctgctgctgcaggagatcctggatgagtggctgaaggtgcaggccacctggctgtacctggagcccatcttcagcagcccagacatcatgagccagatgcctgaggagggccgccgcttcaccgctgtggacaagacctggagggacatcatgaggtctgtgatgcaggacaagcacgtgctgactgtggtgaccatcgacaggatgctggagcggctgaagaagagcaatgagctgctggagctgatcctgaagggcctgaatgagtacctggagaagaagaggctcttcttcccccgcttcttcttcctgagcaatgatgagctgctggagatcctgtctgagaccaaggaccccaccagggtgcagccccacctgaagaagtgctttgagggcatcgccaaggtggagttcacagagaccctggacatcacccacatgaagagcagcgagggggaggtggtggagctgattgagatcatcagcacagccaaggcccggggccaggtggagaagtggctggtggagctggagcgggtgatgatcaacagcatccacaaggtgactggagatgccacctttgcctacaccaagtatgagcgcatcaactgggtgcgggactggccaggccagacagtgctgtgtgtgtcccagatcttctggaccaaggaggtgcagacagccatccccatgggcatcaaggccctggagcagtacctgaagacctgcaaccggcagattgatgacatcgtgaccctggtgcggggcaagctgtccatgcagaacagagtgaccctgggcgccctggtggtgctggatgtgcacgccagagatgtgctgagcagcctggtgaagaagaacatcagtgatgacagcgactttgagtggctgagccagctgcgctactactggcaggagaaccacctggagaccaagatgatcaatgccggcctgcgctatggctatgagtacctgggcaacagcccccggctggtgatcacccccctgacagaccgctgctaccgcaccctgtttggagccctgcacctgcacctgggcggggcccctgagggccctgctggcaccgggaagacagagaccaccaaggacctggccaaggctgtggccaagcagtgtgtggtgttcaactgcagtgatggcctggactacctggccctgggcaagttcttcaagggcctgctgagctgtggggcctgggcctgctttgatgagttcaacagaattgacctggaggtgctgtctgtggtggcccagcagatcctgaccatccagaggggcatcaatgctggagctgacatcctgatgtttgagggcacagagctgaagctggaccccacctgtgctgtgttcatcaccatgaaccctggctacgccggccgctctgagctgcctgacaacctgaaggccctcttcagaacagtggccatgatggtgcctgactatgccatgattgctgagatcgtgctgtacagctgtggctttgtgacagcccggcccctgtctgtgaagatcgtggccacctaccgcctgtgcagcgagcagctgagcagccagcaccactatgactatggcatgagagctgtgaagtctgtgctgacagctgctggcaacctgaagctgaagtacccaaatgaaaatgaggagatcctgctgctgcggagcatcattgatgtgaacctgcccaagttcctgagccatgacctgcccctgtttgagggcatcaccagtgacctcttccctggggtgaagctgcccaagccagactacaatgacctgctggccgccatcaaggacaactgtgcctccatgaacctgcagatgacagccttcttcagcgagaagatcctgcaggtgtatgagatgatgattgtgagacatggcttcatgattgtgggggagccctttggaggcaagaccagcgcctacagagtgctggccggggccctgaatgacatctgtgagaagggcctgatggaggagaacaaggtgcagatcaccgtgctgaaccccaagtctgtgaccatgggccagctgtatggccagtttgattctgtgtcccatgagtggagcgatggagtgctggccgtgtccttccgggcctttgccagctctgtgaccccagacaggaagtggctgatctttgatggccctgtggatgctgtgtggattgagaacatgaacacagtgctggatgacaacaagaagctgtgcctgatgtctggagagatcatccagatgagcccccagatgaacctgatctttgagcccatggacctggaggtggccagccctgccaccgtgagccgctgtggcatgatctacatggagccccacatgctgggctggaggcccctgatgctgtcctgggtgaacctgctgcctgcctctgtgtctgtcatccagaaggagttcatcatgggcctgtttgacaggatggtgcctgtgtctgtggagttcatcaggaagcacaccaaggagctgagccccaccagtgacaccaacctggtgcgcagcctgatgaacctgattgactgcttcatggatgactttgctgatgaggtgaagctgaaggagagaaatgaccgggagacctacagcctgctggagggcatcttcctgttcagcctcatctggagcgtgggcgccagctgcacagatgatgaccggctgaagttcaacaagatcctgcgggagctgatggagagccccatcagtgacaggaccaggaacaccttcaagctgcagagcggcacagagcagaccagcagcaaggccctgactgtgcccttccctgagaagggcaccatctatgactaccagtttgtgacagagggcatcggcaagtgggagccctggatcaagaagctgaaggaggccccacccatccccaaggatgtgatgtttaatgagatcatcgtgcccaccctggacaccatccgctacagcgccctgatggagctgctgaccacccaccagaagcccagcatctttgtgggccccaccggcaccgggaagtctgtgtacatcaccaacttcctgctgaaccagctgaacaaggagatctacaagcccctgctgatcaacttcagcgcccagaccacagctgcccagacccagaacatcgtgatgagcaagctggacaagaggaggaagggcgtgtttggaccacccctgggcaagaggatggtggtgtttgtggatgatgtgaacatgcctgcccgggaggtgtatggagcccagccccccatcgagctgctgcggcagtggctggaccactggaactggtatgacctgaaggactgcagcatgatcaagctggtggacatccagatcatgtgtgccatgggccccccaggcggcggcagaaatcctgtgaccccccgctacatgaggcacttcaacatcatcaccatcaatgagttcagtgacaagtccatgtacaccatcttcagccgcatcctgacctggcacctggagatctgctacaagttcccagatgagttcctggacctgaccacccagatcgtgaatggcaccatgaccctgtacaaggaggccatgaagaacctgctgcccaccccagccaagagccactacctgttcaacctgcgggacttcagcagggtcatccagggcgtgtgcctgagcaggcctgagaccacagagaccacagaggtgatcaagaggctgtgggtgcatgaggtgctgcgggtgtactatgaccggctgctggacaacacagaccgctcctggctgatcaactacatccaggagatcctgaggaactacatgtatgaggacttccacgagctgttccagaggctggactttgacaatgatggcatggtggaggctgatgacctgcggagcctgatgttctgtgacttccatgaccccaagcgggaggacaccaactaccgggagattgctgatgtggacaacctgaggatgattgtggagatccacctggaggagtacaacaacatcagcaagaagcccatgaacctggtgctcttccgctttgccatcgagcacatcagccgcatcagccgcatcctgaagcagcccaggagccacgccctgctggtgggcgtgggcggcagcggccggcagagcgtgacccggctggccgcccacatggctgactacagcgtcttccaggtggagatcagcaagggctatgacaccacagagtggcatgaggacctgaaggtgatcctgaggaaatgtgccgagggggagatgcagggcgtcttcctgttcacagacacccagatcaaggaggagagcttcctggaggatgtgagcaacctgctgaatgctggggagatccccaacctgtttgccctggatgagaagcaggagatctgtgacaagatgaggcagctggaccggcagagggacaagaccaagcagacagatggcagccccatcgccctcttcaacatgttcatcgaccactgccgcagccagctgcacgtggtgctggccatgagccccatcggagatgccttcaggaaccggctgaggaagtttcctgccctggtgaactgctgcaccatcgactggttccagagctggccagaagatgccctgcaggccgtggccagccgcttcctggaggagattgagatgtctgaggagatcagagatggctgcatcgacatgtgcaagagcttccacaccagcaccatcgacctgagcaagagcttctttgtggagctgcagcgctacaactacgtgacccccaccagctacctggagctgatcagcaccttcaagctgctgctggagaagaagaggtctgaggtgatgaagatgaagaagagatatgaggtgggcctggagaagctggacagcgccagcagccaggtggccaccatgcagatggagctggaggccctgcacccccagctgaaggtggccagcaaggaggtggatgagatgatgatcatgattgagaaggagagcgtggaggtggccaagacagagaagatcgtgaaggcagatgagaccatcgccaatgagcaggccatggccagcaaggccatcaaggatgaatgtgatgctgacctggccggggccctgcccatcctggagagcgccctggccgccctggacaccctgacagcccaggacatcaccgtggtgaagtccatgaagagccccccagctggggtgaagctggtgatggaggccatctgcatcctgaagggcatcaaggctgacaagatcccagaccccaccggcagcggcaagaagattgaggacttctggggccctgccaagaggctgctgggggacatgaggttcctgcagagcctgcatgaatatgacaaggacaacatccccccagcctacatgaacatcatcaggaagaactacatccccaacccagactttgtgcctgagaagatcagaaatgccagcacagctgctgagggcctgtgcaagtgggtgattgccatggacagctatgacaaggtggccaagatcgtggcccccaagaagatcaagctggccgctgctgagggggagctgaagatcgccatggatggcctgaggaagaagcaggccgccctgaaggaggtgcaggacaagctggcccggctgcaggacaccctggagctgaacaagcagaagaaggctgacctggagaaccaggtggacctgtgcagcaagaagctggagcgggcagagcagctgattggaggcctgggcggggagaagacccgctggagccacacagccctggagctgggccagctgtacatcaacctgactggagacatcctgatcagcagcggcgtggtggcctacctgggcgccttcaccagcacctaccggcagaaccagaccaaggagtggaccaccctgtgcaagggccgggacatcccctgcagtgatgactgcagcctgatgggcaccctgggggaggccgtgaccatccgcacctggaacattgctggcctgcccagcgacagcttcagcattgacaatggcatcatcatcatgaatgcccggcgctggcccctgatgattgacccccagagccaggccaacaagtggatcaagaacatggagaaggccaacagcctgtatgtgatcaagctgtctgagccagactatgtgaggaccctggagaactgcatccagtttggcacccctgtgctgctggagaatgtgggggaggagctggaccccatcctggagcccctgctgctgaagcagaccttcaagcagggcggcagcacctgcatccggctgggggacagcaccattgaatatgccccagacttccgcttctacatcaccaccaagctgaggaacccccactacctgcctgagacctctgtgaaggtgaccctgctgaacttcatgatcaccccagagggcatgcaggaccagctgctgggcatcgtggtggcccaggagaggccagacctggaggaggagaagcaggccctgatcctgcagggcgctgagaacaagaggcagctgaaggagattgaggacaagatcctggaggtgctgagcagcagcgagggcaacatcctggaggatgaaacagccatcaagatcctgagcagcagcaaggccctggccaatgagatcagccagaagcaggaggtggccgaggagacagagaagaagattgacaccaccaggatgggctaccggcccatcgccatccacagcagcatcctcttcttcagcctggccgacctggccaacatcgagcccatgtaccagtacagcctgacctggttcatcaacctcttcatcctgagcattgaaaattctgagaagtctgagatcctggccaagaggctgcagatcctgaaggaccacttcacctacagcctgtatgtgaatgtgtgccgcagcctgtttgagaaggacaagctgctcttctccttctgcctgaccatcaacctgctgctgcacgagcgggccatcaacaaggccgagtggaggttcctgctgactggaggcatcggcctggacaacccctatgccaacctgtgcacctggctgccccagaagtcctgggatgagatctgccgcctggatgacctgcctgccttcaagaccatccggcgggagttcatgaggctgaaggatggctggaagaaggtgtatgacagcctggagccccaccacgaggtgtttcctgaggagtgggaggacaaggccaatgagttccagaggatgctgatcatccgctgcctgcggccagacaaggtgatccccatgctgcaggagttcatcatcaaccggctgggccgggccttcatcgagcccccaccatttgacctggccaaggcctttggagacagcaactgctgtgcccccctcatctttgtgctgagccctggagctgaccccatggccgccctgctgaagtttgctgatgaccagggctatggaggcagcaagctgagcagcctgagcctgggccagggccagggccccatcgccatgaagatgctggagaaggctgtgaaggagggcacctgggtggtgctgcagaactgccacctggccacctcctggatgcccaccctggagaaggtgtgtgaggagctgagccctgagagcacccacccagacttcaggatgtggctgaccagctaccccagccccaacttccctgtgtctgtgctgcagaatggagtgaagatgaccaatgaggcccccaagggcctgcgggccaacatcatccgcagctacctgatggaccccatcagtgaccctgagttcttcggcagctgcaagaagccagaggagttcaagaagctgctgtatggcctgtgcttcttccacgccctggtgcaggagaggaggaagtttggccccctgggctggaacatcccctatgagttcaatgaaacagacctgcgcatctctgtgcagcagctgcacatgttcctgaaccagtatgaggagctgccctatgaggccctgcgctacatgactggagagtgcaactacggcggccgggtgacagatgactgggacaggaggaccctgcggagcatcctgaacaagttcttcaaccctgagctggtggagaacagcgactacaagtttgacagcagcggcatctactttgtgccccccagcggggaccacaagagctacatcgagtacaccaagaccctgcccctgaccccagcccctgagatcttcggcatgaatgccaatgctgacatcaccaaggaccagagcgagacccagctgctgtttgacaacatcctgctgacccagagccgctctgctggggccggggccaagagcagtgatgaggtggtgaatgaggtggccagtgacatcctgggcaagctgcccaacaactttgacatcgaggccgccatgaggcgctaccccaccacctacacccagagcatgaacacagtgctggtgcaggagatgggccgcttcaacaagctgctgaagaccatccgggacagctgtgtgaacatccagaaggccatcaagggcctggccgtgatgagcacagacctggaggaggtggtgagcagcatcctgaatgtgaagatccctgagatgtggatgggcaagagctaccccagcctgaagcccctgggcagctatgtgaatgacttcctggcccggctgaagttcctgcagcagtggtatgaggtgggccccccacctgtgttctggctgagcggcttcttcttcacccaggccttcctgaccggggcccagcagaactatgccaggaagtacaccatccccatcgacctgctgggctttgattatgaggtgatggaggacaaggagtacaagcaccccccagaagatggagtcttcatccacggcctcttcctggatggagcctcctggaacaggaagatcaagaagctggccgagagccaccccaagatcctgtatgacacagtgcctgtgatgtggctgaagccctgcaagagagctgacatccccaagaggcccagctatgtggcccccctgtacaagaccagcgagaggagaggagtgctgagcaccaccggccacagcaccaacttcgtcatcgccatgaccctgcccagcgaccagcccaaggagcactggattggccggggcgtggccctgctgtgccagctgaacagctag

SEQ ID NO: 200383 - DNA, 1524 bp, Artificial Sequence
  derived and/or modified sequence
atgtggctgaccagctaccccagccccaacttccctgtgtctgtgctgcagaatggagtgaagatgaccaatgaggcccccaagggcctgcgggccaacatcatccgcagctacctgatggaccccatcagtgaccctgagttcttcggcagctgcaagaagccagaggagttcaagaagctgctgtatggcctgtgcttcttccacgccctggtgcaggagaggaggaagtttggccccctgggctggaacatcccctatgagttcaatgaaacagacctgcgcatctctgtgcagcagctgcacatgttcctgaaccagtatgaggagctgccctatgaggccctgcgctacatgaccggggagtgcaactatggaggccgggtgacagatgactgggacaggaggaccctgcggagcatcctgaacaagttcttcaaccctgagctggtggagaacagcgactacaagtttgacagcagcggcatctactttgtgcccccatctggggaccacaagagctacatcgagtacaccaagaccctgcccctgaccccagcccctgagatcttcggcatgaatgccaatgctgacatcaccaaggaccagagcgagacccagctgctgtttgacaacatcctgctgacccagagccgctctgctggagctggggccaagagcagtgatgaggtggtgaatgaggtggccagtgacatcctgggcaagctgcccaacaactttgatattgaagctgccatgaggcgctaccccaccacctacacccagagcatgaacacagtgctggtgcaggagatgggccgcttcaacaagctgctgaagaccatccgggacagctgtgtgaacatccagaaggccatcaagggcctggccgtgatgagcacagacctggaggaggtggtgagcagcatcctgaatgtgaagatccctgagatgtggatgggcaagagctaccccagcctgaagcccctgggcagctatgtgaatgacttcctggcccggctgaagttcctgcagcagtggtatgaggtgggccccccacctgtgttctggctgagcggcttcttcttcacccaggccttcctgactggagcccagcagaactatgccaggaagtacaccatccccatcgacctgctgggctttgattatgaggtgatggaggacaaggagtacaagcaccccccagaagatggagtcttcatccacggcctcttcctggatggagcctcctggaacaggaagatcaagaagctggccgagagccaccccaagatcctgtatgacacagtgcctgtgatgtggctgaagccctgcaagagagctgacatccccaagaggcccagctatgtggcccccctgtacaagaccagcgagcggcggggcgtgctgagcaccaccggccacagcaccaactttgtgattgccatgaccctgcccagcgaccagcccaaggagcactggattggccggggcgtggccctgctgtgccagctgaacagctag

SEQ ID NO: 200384 - DNA, 12075 bp, Artificial Sequence
  derived and/or modified sequence
atgagcagcgagcaggacaagagcgccagcaaggagaagagcaagaagcccgtcagattcttaccccagctcagtatggagaagcttgccagcaaggaaaagttcaaggccccagcccgcgctcttccgcagctgtccatggtgtccaccaaaccacactggcagcaggccgcccccagttttcacctttcagtaaagcaagatgatgagtcccccgaaccgttttctgtgaaaaatgaacagtcacatgcggaatacatggaacgcttcggaaagaaaggcaaattgccccaccaggtcgatgactcatacgtgggccccagcacaagcaaaagcaagggaaagtctccccataaggaaagggaaaacttccgaagcactctggtcaatgttatcatgcaacaagacgccgacctggattcggccgttcctgacggctccactattcccaagcctaccgctagtgccattgagaaggacatcttacgatactactattacatccaccacggcattgataccgaccatgttgctcctatggaggactcctggctggagcacgtgttggatctcgtaccccagcatctgaaggtgttcaccgactccatcgtcacactctctgatgagatgagggaagattatctgctcagcgtccgcaagagtatagttgactttgtcctcaaggacccccgggagaaaggtgatgataaaaagactgatgagctccctgcccacagagccgagatggagatcctgcccaaaccctggcggaagagttttctcgcagctagttcctacatccgggatcatctaaatgctatgaaccctaccatgctggcggtcctggacctatggcacacaaatttcaaaaaactcaggctcgtggacataaaggagtttcataactgccaggatgccctggagctgagtagcttccagaacatcatcatgcgacatatggactcggctaaagagactttgttgaagatgtggtttccggaggttcagaacatctactaccagggcaacaagaagaaacagcttcctacaggtgacagcagcgccaaattagagagcttctttaactgtgctgctgccctaatgacacttcagctgcaggacctgaccttagtgtccatgcaggattttaccgacttgattgctcagccacccgacagcgtgagggcatttgaacatcccggctttattatgcgcttgattcttgacaatgacactatcaaatttgagccagaattatcggactacattgacatttttctaaacgtgtacgacgtgatgattaaggcagtgtccttcgtccctagggtagaaaccaaactttactcaaaatgggagagcaaaagtaagccaacaacactgaagcctatcattctcaacgagatagtggatgctcacaaggagaagatcaaggaggtgataatgaaggaaagtgtggcccccactgaacacctgagactttacgataaatatgactttctgatcacacgtaaggctgaacgggatgtcgacaatttcctcgctgagaaccactcttacgagaaaattatcgatgaaatttgcaaatatcaaaagctcattgaggagatccagtacactagtattaagacaattcgactcggtatgtttgagatgcattgtgaagaactgattcgtgctttggtcaaacgtgccgacatcatttgtggaaagctgttagctaagatgttcagagaccaccaggaggtaaacacaaggctgtgcgacgagttcgaaagaatagctgaaaaggctctttccactcctcctaacactgcagaactgatggagatgaaagcctatatccagaaggtggaagttacagatatgattgaattggaacaaagactggtcgactcaaagaactgtcttgctttcctgattgaatacgtcaatttcagtcccgccgatatgcgccttaacaatagcgtatttcagtggtatggcaggatgggagaaattttcgaagagcatcggaagattatcaaagagaagatagaacagtaccaggaaggtcttaaactgcgctgtgaaagattcgtcgaggagctggagagttatgccaagcaatctgaggagttttacagttttggggacctccaggatgtgcagaggtacttaaaaaaggctcaaatcctcaatggaaagctggacctcgccgcagacaaaattgaacaattcaatgcagaggaggaagctttcgggtggttaccgagcgtgtatcctcagaggaagaagattcaagatggcctgaacccataccttcgactatatgaaactgccgtggagttcagcagtaactaccgcgcctggaccgaaggcccgtatcataaagtcaatcccgaccaggtagaagccgacatcggaaactactggcgggggttgtataagcttgagaagacgttccatgatagcccttacgctctcgccatgaccaagaaagttcgcagtaaggtggaggatttcaaacagcacatcccccttattcaagttatctgtaatcccggtcttcgaccccggcactgggaagctatgagcgcaattgtcggctaccccctacagccttctgacgacagcactgttagttcctttctcgatatgaatctcgaaccatacatcgatagatttgagggcatttctgaggctgctagcaaggaatacagtcttgaaaaagctatggagaaaatgatcacagagtgggatgctgtggagttcgtgatccattcttaccgggaaactggcactttcattctcgcctcagttgatgagattcagatgctgcttgacgatcatattattaaaacccagaccatgcgaggctcaccttttattaagccttacgagaagcagatgcgggaatgggagggcaagcttctactgctccaggaaattctcgacgagtggctgaaggttcaggctacttggttatacctcgaacccatctttagttcccccgacattatgagtcagatgccagaagaggggcgtcgattcacagcagtggataaaacctggcgagacatcatgagatcggtgatgcaggataaacacgtccttacagtcgtaacaattgatcgcatgctggaaagactcaaaaaatctaacgagcttctcgagctgatcctgaaagggcttaatgagtatctcgaaaagaagaggctgttctttcctcgctttttctttttgtcaaatgacgaactcctagaaatactgtcagagaccaaagaccccactagggttcagcctcacttgaaaaaatgctttgagggcatagccaaggtggagttcaccgagaccttggatatcacccacatgaagagtagcgaaggggaagtcgtcgagctcatcgagatcatcagcactgccaaagcaagaggccaggtcgaaaagtggcttgtggagcttgagagggtgatgatcaacagcattcataaggtaactggcgacgccaccttcgcatatacaaagtacgaaaggatcaactgggttagagattggcccggccaaacagtgctgtgcgtaagccagattttttggactaaagaagtgcaaaccgccatccctatgggaattaaggctttggaacagtacctgaaaacctgtaatcgccaaattgatgacatcgttacactggttagaggaaaactcagcatgcagaaccgcgtgaccttgggagccctggtggtgctggacgtgcatgctagggatgtacttagctcactcgttaaaaagaatatctcggacgactccgactttgagtggctaagccagctgcggtattattggcaggagaaccaccttgaaactaagatgattaacgccggattgcggtacggctatgaatacctcgggaacagcccaaggttagttataacaccacttaccgaccgctgctatcgaacactgttcggcgctctacatctgcatttgggcggcgcgcccgagggacctgcagggactgggaagactgagaccacaaaagacctggcaaaagctgttgcgaaacagtgcgtcgtttttaactgctctgacggcctggactacctcgcactcgggaaatttttcaaaggacttctatcttgtggcgcatgggcctgctttgatgagtttaatcggattgacctggaggtgctgtccgtggttgcgcagcagattttgactatccaacgcggaatcaacgctggggcggatatcctgatgtttgaagggacggaattgaagctggaccccacatgtgccgtgtttatcacaatgaatcctggctatgctggcagatcagaacttccggacaatcttaaggcactgttccggactgtggccatgatggtgcccgactacgccatgatcgccgaaatcgttctttactcctgcggatttgtgacagcccgtccactgagtgtcaaaatagtcgctacctaccggctttgttcagagcagttgagctctcagcatcactatgactacggcatgcgggcggtcaagtccgttctgaccgccgcaggtaacttaaagttgaaataccccaatgagaatgaagagattttgttgcttcgttctatcattgatgttaatctcccaaaattcctgagtcacgatctacctctgtttgaagggatcactagcgatctgttcccaggagtgaagctaccaaagccggactataatgacctccttgccgcaatcaaagacaattgcgccagtatgaatttacagatgaccgctttcttcagcgagaaaatcctccaggtgtatgaaatgatgattgtcagacacgggttcatgattgtcggggagcccttcggtggaaaaacatccgcctatagagttttggccggtgccctaaatgacatatgcgagaaaggtctgatggaggaaaataaagtgcagattactgtcctgaatccaaagagcgtaacaatgggacaactgtatggccaattcgattccgtgagccatgagtggtctgacggtgtgttagccgtctctttccgcgctttcgcatcctcagtaacacctgatcgtaaatggttgatttttgacggtccagtagatgctgtttggatagagaatatgaatacagtgctggacgataataagaagttgtgtttgatgtctggagaaatcatccagatgagcccccaaatgaatctgatttttgaacccatggacctggaggtcgcttccccagctaccgtttcaagatgtggaatgatctatatggagccacacatgttaggatggaggccacttatgttgtcatgggtgaacctgttgccagccagtgtaagcgtgatccagaaagagtttataatgggactgtttgatagaatggtgcctgtatcggtagaatttatcaggaaacacacaaaggagctgtcccccacctccgatacaaacctcgttcgttctctgatgaaccttatagactgctttatggacgatttcgcggacgaagtaaagctgaaagagcggaacgatagggagacctacagccttctggagggaatttttctgttttcacttatctggtccgtgggtgccagttgtacagatgatgatcgactgaagttcaacaagattctgagggagctaatggagtcgccaatctcagatcgaaccaggaacacattcaaactccagagcggaacggaacagacctcctcgaaggcgttgaccgtgccctttccggagaagggcaccatctacgattatcaatttgtcaccgaagggatcggaaaatgggagccatggattaagaagcttaaggaggccccccccattcccaaagatgtgatgttcaatgagataatagtaccaacactggacactattaggtactccgcgttaatggaactgttgaccactcaccagaagccaagtatctttgtggggcctactggcaccggcaagtcagtgtatattacaaattttttactgaatcaactcaataaggaaatttacaagccacttctgataaatttttccgctcagacaacagccgcacagactcagaacattgtgatgagcaaactggacaagcgtcgcaaaggcgtatttggaccccctctggggaagagaatggtggtgttcgttgatgacgtcaacatgcccgctcgagaagtctatggagcacagccccctattgaactcctgcgccaatggctggaccactggaactggtacgatctcaaggactgttcaatgattaagttggtcgatatccagattatgtgtgctatggggccccctggcggaggtcgcaatccagtcactcccaggtacatgagacattttaatatcattacgattaacgaattcagcgacaagtccatgtacactatcttctcacgcattttgacatggcatttggagatctgttacaaattccccgatgagttcctggacctgacaacgcagatcgtcaacggaactatgacactttataaggaggcaatgaaaaatctcttgcccacccccgccaaaagccattacctctttaacttgcgggattttagccgagtgatacaaggggtttgtctctccagaccggagacgaccgagaccacagaggtcatcaaacggctttgggttcacgaagtcctgagggtatattacgatcggctgttggacaataccgatcgaagttggctaattaattacattcaagagatactgaggaattacatgtacgaggatttccatgaactttttcaaagattagattttgacaatgacggaatggtagaggctgatgaccttcgctcattgatgttttgcgactttcacgatccaaaacgggaagacaccaactatcgagagattgcggatgtggataaccttagaatgatcgtggagatccatttagaggagtacaataacatctctaaaaagcctatgaaccttgtgctcttcaggttcgcaatcgaacatatcagcagaatctcacgtatcctaaagcagccacgcagccacgccctgctggtcggcgtcggaggctctggtcgccagagtgtaactcgactcgccgctcacatggccgactatagcgtgtttcaagtggaaatttccaagggctacgataccacagagtggcacgaagacctgaaggtcatcctgcgtaagtgcgctgaaggggaaatgcagggggtctttttattcacagacacacaaatcaaagaagagagctttttagaggacgttagcaatttgctgaatgctggcgagatccccaacctgttcgcactggacgagaagcaggagatctgcgacaagatgagacagctggatcgccagcgagacaaaaccaagcagactgacggaagtccaattgctctgttcaacatgtttatagaccactgtagatcacagttacacgtggtcctggccatgtctcctattggcgatgcttttagaaacaggctgcgcaaattcccagccttggtgaattgttgcaccatcgattggttccaaagctggcccgaagacgcccttcaagctgtggctagccgttttctggaagaaatcgaaatgtccgaggagatcagagacggatgtatcgacatgtgcaaatcttttcacacctctactattgatctctccaagtctttctttgtggagctccagagatacaactatgtgacccccactagctaccttgaactgatcagcactttcaagctgttactggagaagaaacggagtgaagtgatgaagatgaagaaacggtatgaggtggggctggagaagctggattccgcctcgtcacaggtcgctacaatgcagatggagctggaggctctgcacccacagttgaaagtggctagcaaggaggtggatgagatgatgattatgatcgaaaaagaaagcgtggaggtagctaagacagagaaaattgtgaaggctgatgagaccatcgcgaatgaacaggctatggcaagcaaggccattaaagacgagtgtgatgctgatcttgccggtgctctcccaattttagagtcagcgctggcggccctggatacactgacagcccaggatattaccgttgtgaagagcatgaaaagtccccctgcaggcgtaaaactggtgatggaagcaatttgtatactgaaaggcataaaagccgacaagatccccgaccctacgggctctgggaaaaaaatagaagatttctggggaccagcaaagcggctcctgggggatatgagatttcttcagtccctgcacgaatatgataaggataatataccccccgcttatatgaacattatacggaaaaattacatccccaaccctgattttgtccctgaaaagataaggaacgcctcaacagcagctgagggattgtgtaagtgggtcatcgctatggattcttacgacaaggtcgccaagatcgtcgcacccaagaagattaaacttgccgccgccgagggggaactcaagatagccatggatggcctgagaaaaaagcaagccgccctgaaggaggtgcaggataaattggccagactccaggataccctcgagcttaacaagcaaaaaaaagccgatctcgagaatcaagtggatttgtgctctaagaagttagaacgggcagagcagctcatcggcgggttgggcggggaaaaaactcgctggtcacacacggctttagagctcgggcagctgtatatcaatttaaccggcgatatcttgattagttcgggcgttgtggcttatttgggagcctttacttctacctacagacagaatcagacgaaggagtggactacactctgcaagggtcgagatataccatgtagcgacgactgctcactgatggggaccctgggcgaggcggtaaccatccgcacatggaacatcgctggacttccctcagacagcttctctattgataatggcataatcataatgaacgccagacgctggccattgatgatagaccctcagtctcaagctaataagtggattaaaaatatggaaaaggctaactctctatacgtgatcaagttgtctgaacccgattatgtccgcacactcgagaattgcatccagtttggcacaccagtgcttttagaaaatgtgggagaggagttggatcccatccttgaacctctgcttttgaaacagaccttcaaacagggtggctctacttgcatcagacttggagattccaccatagagtatgctcccgacttcagattttacatcactactaagttacgcaacccccactacttaccagaaacgtcagtgaaagtgactctgctcaatttcatgatcactcccgaaggtatgcaggatcagctgcttggcattgtcgtggcgcaggagaggcctgatttagaggaggagaagcaggctttgatattacagggcgcagagaacaaacgacagctgaaagaaatcgaggacaaaatcctggaggtgctgtccagctctgagggaaatatcctggaggatgagacagcaattaagattctgagctcctctaaagctttggctaacgagatcagtcaaaagcaggaagtggcggaggagactgagaaaaagatagatacaacccgtatggggtataggccaatagctatccactctagtattttgttcttttcccttgctgacctggcgaatatcgagccaatgtaccagtactccctgacgtggtttatcaatctgtttatcctgagtatcgaaaactctgagaaatctgaaattctggccaaacggttgcaaatcctgaaggatcactttacctacagcctgtacgtaaacgtgtgcagaagcctatttgaaaaagacaaattgttattttccttttgtctgacaatcaacctgctcttacacgagcgggcaatcaataaggccgagtggagattcttgctaactggaggcattggccttgataatccctatgcgaatttgtgtacgtggcttccccagaagagctgggacgaaatttgtcgactagacgatctgcccgctttcaaaacaatccgccgcgaatttatgaggctgaaagacgggtggaaaaaggtgtatgactcacttgaaccacatcacgaggtttttcctgaggaatgggaggataaggcgaacgagttccagagaatgctaatcattcggtgcttgcgcccagacaaggttatccccatgctgcaggagttcattattaacaggttgggtcgcgccttcatcgagccacctccattcgatttagcaaaggcctttggggacagtaactgttgtgcccctttgatcttcgtgctgtcacccggcgccgacccaatggccgccctcctgaaattcgccgatgatcagggatacggtggctccaagctcagttcactgtctctcggccaaggccagggtcctatagcaatgaaaatgctggaaaaggccgtgaaggaagggacatgggttgtgcttcaaaattgtcatctcgccaccagctggatgcccacactggaaaaagtctgtgaggaactgagccctgagagtacgcatcccgattttcgcatgtggcttacaagttaccctagccccaatttcccggtgagtgttttgcaaaacggggtgaaaatgaccaacgaggcccccaaaggcctaagagcgaacattattaggtcctatctaatggatcccatatccgatcccgagttctttggcagctgtaaaaaacccgaggaatttaagaaattactgtatggactttgcttcttccatgcactggtgcaggaacggcggaaattcggtcctcttggatggaacattccatatgagttcaacgagacagatctgcgcattagtgttcagcagcttcatatgttcctgaaccaatacgaagagctgccttacgaggctttgcgctatatgaccggcgagtgcaactatggggggcgagtcaccgacgactgggaccgccgaactttgagatcaatcctgaataaattcttcaatccagagttagtggagaacagtgattacaagtttgatagtagcggcatttacttcgttccccctagcggtgatcataaatcctacattgaatatacaaaaacactgcctctgacgcccgccccagaaattttcgggatgaacgctaacgctgacataaccaaagatcaaagcgaaacccaactattatttgacaacatactactgacacagtctcggtctgccggcgcaggagccaaatcgtctgacgaagtggtgaacgaggtggcctctgatattctcgggaagttgccaaacaatttcgacattgaagcagccatgcggagataccctacaacttacactcagtccatgaatacagtactggtccaggagatggggcgattcaacaaactgttgaaaacgatcagggacagttgcgtcaacattcaaaaagcaatcaagggcctggcagttatgtccactgatctggaggaagtggtttcctccattctgaacgtaaagatccccgaaatgtggatgggtaaatcctatccctctctcaaaccactggggagttacgtgaacgattttctcgccaggttgaagttcctccagcaatggtacgaagtggggccccccccagttttttggctgagtggcttctttttcactcaggctttcttaactggcgctcagcagaattatgcccgtaaatatactatccccattgacctgttggggtttgactatgaagtcatggaagataaggagtataagcacccaccagaggatggcgttttcatccatggtctgtttctggacggcgcatcttggaatcgcaagattaagaagttggccgaaagtcaccctaaaatcctctatgacactgtgccagtaatgtggctgaaaccttgtaaaagggccgacatcccaaaacgccctagctacgttgcacctctctacaaaaccagtgaaagacgcggagtgttgtccactacagggcattccaccaattttgttatagctatgacactgccaagcgaccagccaaaggaacactggattggtagaggtgtcgccttgctatgccagctcaattcatag

SEQ ID NO: 200385 - DNA, 1524 bp, Artificial Sequence
  derived and/or modified sequence
atgtggctgaccagctaccccagccccaacttccccgtgagcgtgctgcagaacggcgtgaaaatgaccaacgaagcccctaagggtcttcgcgcaaatatcattcgatcttacctgatggatcccatctcagatccagagttcttcggtagctgtaaaaaaccagaagaattcaagaaattgctatacggcctctgtttctttcatgcactggtacaggagcgtaggaagttcgggcctctcggctggaacatcccatacgaatttaatgaaacagatttgcgtattagtgtccagcaacttcatatgttcctgaatcagtacgaggaactgccctacgaggccttaaggtacatgaccggtgagtgcaattacggtggtcgcgtcactgacgattgggacaggcggacattaaggtcgatcctgaacaaatttttcaatccagagctcgtcgagaactctgactataaatttgacagcagcggaatatatttcgttccgccttctggtgaccacaaaagctacatcgagtatacaaaaacgctgccgcttactccagctccggaaattttcggcatgaacgctaacgccgacatcaccaaagatcagtcagaaacacagctcctctttgacaatattctgttgacacagagcagaagtgccggggccggggccaagagcagtgatgaggtggtgaacgaggtcgcctccgacattctcggaaaactgccgaataattttgacatcgaggccgcaatgcggaggtacccaaccacctacacccagtccatgaacacagtcctggtccaagagatgggccggtttaacaagctgttaaaaacaatcagagattcctgcgtgaacatacaaaaagctattaaagggctcgctgtgatgtcaacagaccttgaagaggtcgtcagttccattcttaacgtgaagatacctgaaatgtggatgggcaagagctatcccagtcttaagccactgggctcctatgtgaacgattttctggcacgcctcaaattcctgcagcagtggtacgaggtgggcccccccccggtgttttggctgtccggcttcttctttacacaggcatttctgacgggtgcccaacagaactacgctcgcaagtacactatcccaatcgatctccttggattcgattatgaggtaatggaggacaaagagtataaacatccacctgaggacggtgtgttcatacacgggcttttcctggatggagcctcgtggaaccgtaagatcaagaaactcgccgagtcccatccaaagatcctgtatgacacagtgcctgttatgtggctcaagccctgtaagagagcagatatccccaagcgaccgagctatgtcgctcctctgtacaagacaagtgagagacgaggggtgttatccaccactggccatagcaccaacttcgttatcgccatgactttgccatcggatcagcctaaagagcactggatcggtcgcggagtggccctgctctgtcagttaaactcctag

SEQ ID NO: 200386 - DNA, 1845 bp, Artificial Sequence
  derived and/or modified sequence
atctggctttgttttttctttacgtcacttagcgccagtttgttctggccgtgtctcccactagaatgagttaagcccagagtcaacacatccagatttccgaatgtggctaacgagttacccatctccaaatttccctgtgtcagtactgcagaatggagtgaaaatgaccaatgaagcaccaaaaggtttacgggctaatatcattcgatcatacctcatggacccgatctctgatccggagttctttggcagctgcaaaaagcctgaggaattcaagaaattgctttatggcctgtgtttctttcatgctttggtacaagaaagacggaaatttggacccctagggtggaatattccttatgagttcaatgagacagatctgagaatcagcgtacagcagctccacatgttcctgaaccagtatgaggaactgccgtatgaggctctgcggtacatgactggcgaatgcaattacggaggcagagtgaccgatgactgggaccggcgcacgctgcgcagcattctaaacaaattcttcaatcccgaattagttgaaaattcagactataagttcgactcaagtggcatctattttgttcctccttctggtgatcacaaaagctacatcgaatacacaaagactctgccactgaccccagcaccagaaatctttgggatgaatgccaatgcagatatcactaaggatcagtcagaaactcagctgctatttgataacattcttcttacacagtctcgttcagcaggtgctggtgcaaaatcatcagatgaagtagtgaatgaggtcgctagtgacatcttgggcaaacttccaaacaacttcgacatcgaggctgccatgaggaggtacccaacaacttatactcagagcatgaacactgtacttgtccaagagatgggacggttcaataagttactgaagaccataagagattcgtgcgtaaatattcaaaaagcaatcaaggggcttgcagtcatgtctacagatcttgaagaagtggttagcagcattttgaatgtcaaaattccagaaatgtggatgggtaaatcctacccaagccttaaaccacttggcagctatgtgaatgacttccttgcaagactaaaattcttgcagcaatggtatgaggttggtcctcctccagtcttctggctttctggcttcttcttcacacaagccttcctgaccggtgcccagcagaactacgccaggaaatacacaattcctattgatcttcttgggtttgactatgaagtgatggaagacaaagaatacaagcatcctcctgaggatggtgttttcattcacggattatttctggatggagcttcctggaatagaaagatcaagaaacttgcagaatcgcatcccaaaattctttatgatacagtgcctgtgatgtggctaaagccctgtaagagggcagatataccaaaacggccaagttatgttgctccattgtataagacaagtgagcggagaggagtattatccaccactggccattccacgaattttgtgattgccatgactcttccctctgaccaacccaaggaacactggattggacgaggtgtagcactgttatgtcaacttaattcataaccagaagacatcatttccttgttcctatttcttgttggctggctgagtagagaaagcatattttactacttaaacctttttttttgtttgtttaaatacatttgactaaagttataattatgaatttacttatgagcaaatgcagctaaacttaatatgactcatacttaaatgtaaggaaatgttctgaaataaagactaaagaaaacacactggca

SEQ ID NO: 200387 - DNA, 12075 bp, Artificial Sequence
  derived and/or modified sequence
atgtcctccgagcaggataagtccgcgtctaaagagaagagcaaaaagcctgtccgctttctgccacagctgtcaatggaaaagctggcttctaaggaaaaatttaaggccccagctagagcactccctcaattaagcatggtatcaacaaagccgcattggcagcaggcagcaccctcatttcacttgagtgtgaagcaggacgacgaatcccccgaaccattctcagtcaagaatgagcaatcccatgccgaatatatggagcggtttggcaagaagggcaagctcccccaccaagtagacgactcgtacgtgggacctagcaccagcaaatctaaggggaaaagtccccataaagagagagaaaactttagaagcaccctggtgaatgtaattatgcagcaagatgcggatctggattctgcagttcctgatggttcaacaatccccaaacccacagcttcagccatcgagaaagacatcctccgctactattactatattcaccacggcattgatacagaccatgtcgccccaatggaagacagttggctggaacacgttttggacctggtcccccagcatctgaaggtctttacggattctatcgtgactctttctgatgaaatgcgggaagattacctactgtctgtgaggaaaagcattgtggactttgtgcttaaggacccccgtgagaaaggtgatgataagaaaactgacgagctgcccgcacaccgtgcagagatggaaatcctcccgaagccctggaggaagtccttcctcgccgcaagttcctatatccgtgaccacctaaatgctatgaatccaactatgctggccgttctcgacctctggcatactaacttcaagaaactgaggttagtggatatcaaagaattccataattgccaggatgcactggaattaagcagttttcagaatattattatgcgccatatggacagcgccaaggagacgcttctgaaaatgtggttccccgaggttcagaacatctattaccaggggaataagaagaagcaactgccaactggggattctagcgccaagctagaaagcttttttaattgtgccgctgccttgatgaccttacaacttcaagatctgacactggtatcgatgcaagactttactgatctcatcgcccagccacccgactccgtcagggcttttgaacatcctggctttatcatgcgcctgattctcgataacgatactatcaaattcgagcctgaactgagtgattatatcgatatcttcctcaacgtgtacgacgtaatgattaaggctgttagcttcgtacctcgcgtagagaccaagctgtattcaaaatgggaaagcaaaagcaaaccgactacactcaagccaattattcttaacgagatcgtcgatgcccataaggagaagataaaggaggttattatgaaggagtcagtcgcacccactgagcatttacgcttgtatgacaagtacgactttctgatcaccagaaaagcagaaagggatgtggataacttcctggccgagaatcattcatatgagaagatcatcgatgagatttgcaaataccagaagttaatcgaggaaatacaatatacatccatcaaaacgatcaggctgggcatgtttgagatgcactgtgaagaattgatacgggctctggttaagcgcgctgacatcatctgcggtaagctgttggccaaaatgttccgggatcaccaggaggttaacactagactgtgtgacgagtttgagcgcattgccgagaaagccctctccactcccccaaacactgctgaactcatggagatgaaggcctatattcagaaggtggaggtgacagacatgatcgagctggaacaacgacttgtggattcaaagaactgcctggcctttctcatagagtatgttaacttcagcccagcagatatgcggctgaacaattcagtgttccagtggtacgggcgtatgggagagatattcgaagagcacaggaagattatcaaagagaaaatcgaacagtatcaggagggcctaaagctgaggtgtgaaaggttcgtggaagaactggagtcctacgcaaagcagagtgaggaattttatagtttcggagatctgcaagacgtgcaaaggtaccttaaaaaggctcagattctgaatgggaaactggaccttgctgccgataaaatcgagcaattcaatgccgaggaggaagccttcgggtggttgccatctgtgtaccctcagagaaaaaaaatacaggacgggctgaatccctatctccggttatacgagaccgcggttgaattcagtagcaattacagggcctggacagaggggccttaccataaggtaaatccggaccaggtggaagcagatataggcaattattggaggggtctgtataagttggaaaagaccttccacgattcaccctacgctctagccatgactaagaaagtccgcagcaaggtggaagatttcaagcagcacattccactgatacaggtgatctgtaatccgggactgcgacctcgacattgggaggcgatgtcagccatcgtggggtaccctctccagccttctgatgactctacggtgagcagtttcctagacatgaatttagaaccatacatagatcggttcgagggaattagcgaggctgcctcaaaggagtatagtcttgaaaaggctatggagaagatgattacagagtgggacgctgtcgaatttgtgattcactcctacagggaaactggcactttcatcctagcctctgttgacgaaattcagatgttgctagacgatcatattattaagacccagaccatgcgagggtccccctttatcaagccctatgaaaaacaaatgagagaatgggaaggaaagctgctgctgttacaagagatcctcgatgagtggctcaaggtgcaagcgacttggctttatctggaaccaatcttctctagccccgacatcatgtctcagatgcccgaggagggccgtagatttaccgcggttgacaaaacatggcgggacattatgaggagcgtaatgcaggataagcacgtcctaaccgtagttaccattgacagaatgctggagaggcttaagaagagcaacgagctcctggagctgatcctaaagggcctgaatgaatatttagagaagaagagactgttctttcctaggtttttcttcctgagtaacgatgaactgctggaaatcctcagtgaaacgaaggaccccacccgtgtgcagccacacctcaagaagtgttttgaaggtatcgccaaggtcgaatttactgaaaccttggacattacccatatgaaaagctccgagggagaagtagtggagttaatcgaaatcatttccaccgccaaggccagggggcaggtcgagaaatggttggtggaactggagagagtgatgattaactctatccataaggtgaccggcgacgccacgttcgcctacaccaagtatgaacggattaactgggtgcgggactggcccggtcagacagtcctttgcgtctcgcagatattttggacaaaagaagtgcaaaccgccattcccatggggatcaaggccttggaacagtacctcaaaacatgtaataggcagattgacgatattgtcacccttgtacggggaaagttgagcatgcagaaccgtgtcacacttggggctctggtcgttctggacgtacacgccagagacgtcctctcatctctggttaagaaaaacatatctgacgacagtgattttgagtggttaagtcaactcaggtactactggcaggaaaatcatctggaaacgaaaatgattaacgccggactgcggtacggctatgagtacctgggcaattccccccgactcgttatcacgccgttgaccgaccggtgctatcggaccttattcggtgcactccacctccacctggggggagcaccggagggcccagccggaactgggaaaacagagacaaccaaggatctggcaaaggcagtggcaaagcagtgcgttgtcttcaactgtagtgacggcctggattatctcgcgcttggcaagtttttcaagggcctgctttcatgcggggcatgggcttgcttcgatgaatttaacaggattgacctagaggtgctctccgtcgtcgctcagcagattctaacaatccagcgcggtataaacgccggagccgatattctgatgttcgaaggcacagaactcaagctcgatccgacctgtgccgtgtttattaccatgaaccccggttacgccggtagaagtgagttgccggacaacctgaaagcattgtttaggacagtagcgatgatggtgcctgactacgcgatgatagccgagatcgttctctattcctgcggctttgtgactgccagaccattaagcgtgaagatcgtggccacatacaggctgtgctcagaacagctgtcaagccagcaccattacgactacgggatgcgggcagttaaaagtgtgctaaccgcggcaggaaatctgaagttgaagtatcctaatgagaacgaggagattctactcctgcggtcaattattgacgtgaacctccctaaattcctcagtcatgacctacccctcttcgaagggatcacatctgacctgttccctggggtcaaattacccaagcctgactacaatgatttgctcgcagccatcaaagataactgcgcctcaatgaacttgcagatgactgcctttttctctgagaaaattctacaggtctatgaaatgatgatcgtccgacatgggttcatgatcgtcggggagcccttcggcggaaagacatcagcttaccgcgtcttagctggggctctcaacgacatctgcgaaaaaggattaatggaggagaataaggttcagatcactgtgcttaatcccaagtccgtgacaatgggacagctgtacggacagttcgactcggtttcccacgagtggagcgatggagtgttagccgtgtccttccgcgcattcgctagttccgtcacacccgataggaaatggctgatctttgatgggccagtggatgcggtgtggattgaaaatatgaatactgtccttgatgataataagaagctatgcctaatgagtggtgaaataattcaaatgtcaccacagatgaatctcatcttcgagccgatggatctcgaagtagcatccccagccacagtatcaagatgcggcatgatctacatggagccacacatgctgggctggaggcctctgatgctgtcctgggtcaacctcctgccagcaagcgtcagtgtgattcagaaggaattcatcatgggactgttcgacaggatggtgcccgtatcagtggagttcataagaaagcacacaaaggaactgtcgcctacctccgacacgaaccttgtgcgctccctaatgaacctgatcgactgcttcatggatgactttgcagatgaggtcaagctcaaagagaggaacgaccgcgaaacatactccctcttggaaggcatcttcctattttctttaatctggagcgttggggcaagctgcaccgacgacgacagactgaagttcaataagatcctgcgggagctgatggagagcccaatttctgaccggactcgcaacaccttcaagctccagtccggcacagaacagacgagctcaaaggctctcacagtcccctttcctgaaaaggggactatctacgattaccaattcgtaacagagggaatcggaaaatgggagccctggatcaagaagctaaaggaagcccctccaatccctaaggacgtgatgttcaacgaaatcatcgtcccaacactggacacaatcagatattccgccctgatggaactgttgaccactcatcagaagcctagtattttcgttggccctacgggcaccggcaagagtgtgtatatcacgaatttcttgctgaaccagttgaacaaggagatctataaaccacttctgattaatttcagtgctcagacaacagctgcccaaactcaaaatatcgtgatgagtaaacttgacaaacggagaaaaggagtatttggtccgccacttggcaaaagaatggtggtgtttgtcgatgatgtgaatatgcccgctagggaggtctacggcgcacagccaccaatcgagttattacgccagtggttggatcattggaattggtacgacctgaaggattgtagtatgatcaaattggtagacatccaaatcatgtgcgccatgggccctcccggaggcggtcgcaatcccgtgacacctcgctacatgagacactttaacatcattaccattaatgaattctcagacaagtctatgtatactatcttcagcagaatactaacgtggcacctcgagatatgttacaagttccctgatgagtttctcgaccttacaacacagattgtgaatggtaccatgaccctctacaaggaggcaatgaagaacctgctccctacacccgctaagagtcactatctatttaatctacgcgacttctccagagttatccagggggtatgtctttccagacccgagacaactgagaccacggaggtaatcaaacgcctctgggtgcatgaggtgctccgggtttattacgatcgccttttggacaacacagataggtcctggctgattaactatatccaggagatcctgcgaaactatatgtacgaggattttcatgagctttttcagcgcctcgatttcgataacgatggaatggtggaggccgacgacttgaggtccttaatgttctgcgacttccacgatccgaaacgagaagatacaaactatcgtgagattgcagatgtagacaatttacgcatgattgtcgagatccacctggaagaatacaacaacatttctaagaagcctatgaatctggtgctgttcaggttcgcaatagagcatatcagtcgaatctcgcggatactgaagcagcccaggtctcatgctctcttggtcggcgtgggtggatctgggaggcagtctgtgacccgcctagctgcacacatggcagactactccgttttccaggtcgagatttccaaaggctatgacacaacagaatggcacgaagaccttaaggtcatcctgagaaaatgcgctgaaggggagatgcaaggcgtattcctgttcacagacacccaaatcaaggaggaatccttcttggaagacgtttccaatcttctgaatgctggagaaatccccaatctctttgcacttgatgaaaaacaagagatctgcgacaagatgaggcagctggaccggcagagagacaagactaaacagacggatggaagccccatcgccttgtttaatatgttcatcgatcattgtcgcagccagctccacgtggtcttggctatgtctcccattggagacgcttttagaaatcggctgcggaaatttcccgctctggtgaactgttgtactattgactggttccagtcatggcctgaagacgcactacaggctgttgcatcccggttcctggaagagattgaaatgtctgaagagattcgtgacggctgcattgacatgtgtaagtcatttcatacctccaccatcgacctcagcaaatccttcttcgtagaactgcagcgctacaattacgttacacctaccagctatcttgagctgatcagcacatttaaattgctgttagagaaaaagcgctccgaagtgatgaagatgaagaaaaggtacgaagtggggttggaaaaacttgattctgcatcctcccaggttgccacaatgcagatggaattggaggccctacatcctcagctgaaggtggcctcaaaggaggtcgatgagatgatgattatgatcgaaaaagagtctgttgaagtcgcaaaaactgaaaaaatcgtgaaggctgatgaaaccattgccaatgaacaggctatggccagcaaggccattaaggatgaatgcgacgccgaccttgctggcgctctgcctatccttgagagcgctctcgcagcactggacacgctgactgcacaggatatcacagtcgtgaagtcaatgaagtcaccacccgctggcgttaagctcgtgatggaagccatctgtatcctgaaaggcatcaaggccgacaagattccagatccaactggctctggcaaaaagatagaagacttttggggtccagcaaagcgtttgcttggggatatgcggttcctacaaagcctccacgagtacgacaaagataacattcctccagcatatatgaacataattaggaaaaactatattccaaaccccgattttgtgcccgagaagatccggaacgcaagcacagctgccgaaggcctctgcaagtgggtgatcgcaatggacagctacgacaaagtggctaagatcgtagcaccgaagaagattaagctggcggcagccgaaggagagctgaaaatcgcaatggacgggttgcgcaagaagcaggctgccttgaaggaagtgcaggacaaactcgcccgattacaggataccctggagctgaacaagcaaaagaaagccgatctcgagaaccaggttgatctgtgttctaagaagctcgaacgggcagagcaattgataggcggactggggggagaaaagactaggtggagccacaccgccttagaactgggacaattgtatatcaatctgactggggacatcctgatatccagtggggttgtggcttatctgggagcattcaccagcacttatcggcagaatcaaacaaaagagtggacaacactgtgtaagggaagggatattccttgtagtgatgattgctccctcatgggcaccctaggagaagcagtgacaatacgcacctggaatatcgcgggattacctagtgatagttttagcatcgacaacggtatcattattatgaacgcacgcagatggcccctcatgatagacccacagtctcaagctaacaaatggatcaagaatatggagaaagccaactctctctacgtgatcaaacttagtgagccagactatgtccgtacgttggagaattgtatccaatttggtacgcccgtgctgttagaaaacgtgggcgaggagctggaccctatcttggagcctctccttctgaagcagacctttaagcaaggcggaagtacatgcatcagactgggcgattctaccatagagtacgcaccagacttccgtttttatatcacgacaaaactgcgcaatccccactatctcccagagacttccgtaaaagttaccttactgaatttcatgataacacctgagggaatgcaagatcagctcctgggcatcgtcgtcgctcaggaacgccctgacttggaagaggagaaacaggcgttgatcctgcaaggcgcagagaacaagcgccagctcaaggagattgaagacaaaatccttgaggtgctctcctcttccgagggtaatattctggaggacgagacggccattaagatcctctctagttcaaaggcactggctaacgaaatatcacagaaacaagaggtcgccgaagaaacagagaagaaaatcgacacaacccgcatgggctacagacctatcgcaattcattcctctatactgtttttttcgttggccgacttggcaaacatcgaaccaatgtatcagtatagcctgacctggttcattaaccttttcatcctaagcatcgagaatagcgagaaatcagaaatcctcgcgaaaaggctgcagatcctaaaagatcacttcacatacagcttgtatgtgaacgtgtgtcggagcctgtttgaaaaggacaaactgctgttctccttctgcctgacaataaacttgttactacacgaacgagctatcaataaggcagagtggagattcttactgactgggggtataggcctcgacaacccctacgcaaatttgtgtacctggctgccacaaaaatcctgggatgaaatctgtagattagacgatctgcccgcttttaagaccattaggcgggagttcatgaggctcaaggatggatggaagaaggtgtatgactctttggagcctcaccacgaggtcttccctgaagagtgggaagacaaagcaaacgagtttcagcggatgcttattatacggtgtctgagacctgataaagtgattccaatgctgcaggagtttattatcaatcgtctgggacgcgctttcatagagccacccccattcgaccttgctaaagcatttggagattcaaattgctgcgcaccactgatatttgtgctcagcccaggagcggatcctatggccgctctcctgaaatttgccgacgaccaggggtacggagggtctaagctcagctctctttcattgggacaagggcaaggacccatcgcgatgaagatgctcgagaaagccgtgaaggaagggacttgggtggtactccaaaattgccacttggcaacatcctggatgcccaccctcgagaaggtgtgtgaggagctttcccccgagagcacgcatcccgactttcggatgtggttaactagctacccaagcccaaacttccccgtgagcgtgctccagaacggggtgaagatgacaaacgaggcccctaaagggttgcgtgccaacatcattcgaagttacctaatggaccccatttctgatcctgagttttttggtagctgtaagaagcccgaggaatttaagaagttactgtacgggctctgcttcttccacgccctcgtgcaggagcgacgaaaattcggtccactcgggtggaatataccctatgagtttaatgagaccgaccttagaatctcggtgcagcaactccacatgtttctcaatcaatatgaagaactgccttatgaagctcttcggtatatgacaggggagtgtaattacggcggacgcgtcaccgacgactgggacagaaggacactgaggagtatactcaataagtttttcaaccctgagcttgtggagaattcagactacaagtttgatagttcaggcatctatttcgtgcctccctctggtgaccataagtcttatatcgaatacaccaaaaccttgccactgacacctgctcccgaaatctttggcatgaacgccaatgccgacattacaaaagaccagtcagagacccaactcttgtttgataacattctgctgacccagtcaaggtccgccggagcgggtgccaagtcaagtgatgaggtcgtgaatgaagttgccagcgacattctgggaaagctccctaacaacttcgacatcgaggcagccatgcggaggtacccgacaacatacacacaatccatgaacaccgtattagtacaggagatgggaagatttaacaagctcctgaaaacgattagggatagctgtgtgaacatccagaaagcaatcaaaggcctcgccgttatgtcgaccgacctggaggaggtggtgtcgagcatcctcaacgtgaagattccggagatgtggatgggcaagtcttaccccagccttaagcccttaggtagctacgttaacgacttcttggcgaggctaaagtttctgcagcaatggtacgaggtgggacccccacccgtgttctggctaagcgggtttttttttacccaggcttttcttacaggcgcacaacagaattatgcacgaaaatatacaatccctatcgacctactcggctttgattacgaggtcatggaagataaagagtataaacacccgccagaggatggagtctttatccatggattattcctggacggggcttcatggaaccgcaagatcaaaaagctggccgagagccaccccaaaattctctatgataccgtgcccgtaatgtggctaaaaccatgcaaacgcgcagacatccctaagcggccttcttacgtggccccactttataagacaagtgagcggagaggcgtgctgtccaccacaggacattctactaattttgtcattgcaatgacgttgccatctgatcagcccaaggaacattggatagggaggggcgtggcactgctttgccagctcaactcctag

SEQ ID NO: 200388 - DNA, 1524 bp, Artificial Sequence
  derived and/or modified sequence
atgtggttaacgtcgtaccctagcccgaacttcccggtgtctgtgcttcagaacggagttaagatgacaaacgaggctcctaagggactgcgggctaacattatcagaagttacctgatggaccccatttccgatcctgaattcttcggtagctgcaaaaagcccgaggaattcaaaaaactattgtacggcctgtgcttctttcatgcccttgttcaggaaagacggaagttcggcccactggggtggaatatcccgtacgagttcaatgagactgatcttcggatatcggttcagcagctccatatgtttctgaaccagtatgaggagctcccttatgaagccctacggtacatgaccggggaatgcaattacggcggacgcgtgaccgatgactgggacaggcgtactctccggtccatactgaacaaattctttaacccagagttagtggaaaactccgattataagttcgattcatcaggcatctacttcgtgcctccatctggagaccataagtcttatattgagtatacgaagaccctccctttgacacctgcccctgaaattttcgggatgaatgctaacgccgacatcactaaggatcagagcgaaacccagctacttttcgataatatattgctgacccaatccagaagtgcgggagctggagctaaaagcagcgatgaagttgtaaatgaggtggcttcagacattctgggcaagttacccaacaattttgatatagaagcagccatgaggcgctaccctaccacgtatacacaaagcatgaatactgtgctggttcaggaaatggggcgtttcaataaactcctcaaaactatacgcgattcatgtgttaatatacagaaggccattaaggggctggcagtgatgtccaccgacctcgaggaagtcgtgtccagcatcttgaacgtgaagatccccgagatgtggatgggcaaatcttatccctcactgaagcccctcggttcatatgtcaatgacttcctggcacgcctgaaattccttcaacagtggtacgaagtgggcccaccacccgtattttggttatcgggatttttcttcacacaagccttcctcaccggtgcccagcagaattatgccagaaaatatacgatccctatcgacctgcttggatttgactacgaggtcatggaggataaggagtataagcatccccctgaggatggggtgttcatacatgggctgtttctcgacggcgcatcctggaatcggaaaattaagaagctggccgagagccatcccaagatcttatatgatacagtgccggtaatgtggttgaagccatgcaaacgcgcagatattcccaaacgaccttcttacgtcgccccactctataaaacctctgaacgccgaggcgtgctctctacgactggccactccaccaactttgtcatcgccatgaccctgcccagcgatcagcctaaggagcactggatcgggaggggcgtagcattattatgccagttgaattcatag

SEQ ID NO: 200389 - DNA, 12394 bp, Artificial Sequence
  derived and/or modified sequence
gagaccgctgcaagtcccggggccctgcctctatcgtcctaggggttccgcgggcaggagcaacccagaagcaccggtgaggccagcgcgtcctcgcagccatgagcagtgagcaggataaatcggccagcaaagaaaaatccaagaaaccagtaagatttctaccacagctgtctatggagaaattagccagcaaagaaaagttcaaggcaccagcaagagctttaccacagctgtctatggtgagtacaaagccccactggcagcaggcagctccatcattccatttgagtgtaaagcaggatgatgagagtccagaaccatttagtgttaaaaatgaacagtcccatgctgaatacatggaacgttttggaaaaaagggcaaattaccccaccaagttgatgatagttatgttggaccatctacttccaaatcaaagggcaaatctccacataaagaacgagaaaactttagaagtactcttgttaatgtcattatgcaacaagatgctgacttagactcagctgtccctgatggaagcacaattccaaaaccgaccgcttctgctatagagaaagacatcttgagatattactattatattcaccatggaattgatacagaccatgtagccccaatggaagattcttggctagaacacgtactggatttagttccacaacatctgaaagtcttcactgacagcatagttacattatctgatgaaatgagagaggattatcttcttagtgtaaggaaatccatagttgattttgttttaaaagatcctcgagagaaaggagatgataagaagacagatgaacttccagcccatcgtgctgaaatggaaattctgccaaaaccttggaggaaatcttttttagctgcaagcagttatattagggatcacttgaatgcaatgaaccccacaatgctggctgtactagatttgtggcacactaattttaaaaaattacgtttagttgatatcaaagaatttcataattgccaggatgcattagagctgtcaagttttcagaacattatcatgagacacatggactctgccaaagagactctacttaaaatgtggtttccagaagtgcagaatatttattaccaaggtaataaaaaaaagcaattgccaactggtgacagcagtgccaaattggaatcttttttcaactgtgctgctgcacttatgactttacagctgcaggacctcactttagtctccatgcaagatttcacggacttaattgcacaacccccagattctgttagagcttttgaacatccaggtttcatcatgaggctgattcttgataatgacaccattaagtttgaacctgagttgagtgactatatagatatctttctaaatgtttatgacgtcatgattaaagctgtcagttttgtgccaagagttgagacaaaattgtattccaagtgggaaagtaagtctaaaccaacaaccttgaagcccataattctgaatgaaattgtagatgctcacaaagaaaagatcaaggaagttattatgaaagagagtgtggcacctactgagcacctcagactctatgacaagtatgactttttaattaccagaaaagctgagcgagatgttgataacttcctcgcagaaaatcatagttatgaaaaaataatagatgaaatttgcaaataccagaaactaatagaggaaatacagtacacatccataaagactattcgtttaggaatgtttgaaatgcactgtgaggaattaatcagagctttggtgaagcgagcagatattatttgtgggaaacttctagctaaaatgttcagagatcatcaggaagtaaatacaagattatgcgatgaatttgagaggatagctgaaaaagctcttagcactcctccaaatacagcagaactaatggaaatgaaggcttacattcagaaagtggaggtaactgatatgattgaactagaacagagattagtggattccaaaaactgcctcgccttcctcatcgagtatgtcaacttttctccagcagacatgaggctaaataatagtgttttccagtggtatggaaggatgggagaaatttttgaagaacacaggaaaatcattaaagagaaaatagaacaatatcaagaaggtctgaagttacggtgtgaacggtttgtggaggaattggagagttatgctaagcaatcagaagaattttattcatttggagatcttcaggatgttcagcggtacctaaaaaaggctcaaatactgaatggaaagttggatttagctgcagataagattgagcagtttaatgctgaagaggaagcatttggttggctaccatctgtatatcctcaacgtaaaaaaatccaagatggcttgaacccttatcttcgtctttatgaaactgctgtcgaatttagcagcaactatagagcatggacagaagggccatatcataaagtgaatccagaccaagtagaagcagatattggaaattactggagaggattatataaactggagaaaacctttcatgattctccatatgcattggcaatgacaaaaaaagtaagatcaaaggtggaagatttcaagcagcacattcctctcattcaagtgatctgtaatcctggtttgcgccccaggcactgggaggccatgtctgccattgttggttaccctttgcagccatcagatgactccacagtctcctcttttttagacatgaatctggaaccatatatagaccgatttgaaggtattagtgaagcagctagcaaagaatattctcttgaaaaggcgatggagaagatgattactgagtgggatgcagtggaatttgtcatccattcttatagagaaactgggacatttattttggcatcagttgatgaaattcagatgttgttggatgaccatattattaaaacacaaactatgcgaggatctcctttcattaagccttatgaaaaacaaatgagagaatgggagggcaagctcctactgcttcaggagattctggatgaatggctcaaagtccaagccacgtggctgtatctggagcccattttcagctctccagacattatgtctcaaatgcctgaggaaggcagacgatttacagctgtggataagacatggagagatataatgagaagtgtcatgcaggataaacatgttctgacagttgtaaccattgacagaatgctggaaaggctgaaaaaatctaatgaacttttggagctcattcttaaaggacttaatgaatatttggaaaagaaacgcctctttttccccagattcttttttttgtccaatgatgaacttcttgagatactatctgagactaaagatcccactagggtgcaacctcacttgaagaaatgttttgaaggaatcgcaaaggtagaatttacggaaactttagacattactcacatgaagagcagcgaaggagaggttgtagaactcatagagattatttcaacagccaaagccagaggtcaagtggagaagtggttggttgaattagagagagttatgattaactccatccacaaggtaactggagatgcaacttttgcctatacaaaatatgaacgaattaactgggtaagggattggcctggacagactgttctctgtgtatcccaaatcttttggacaaaagaagtacaaacagctattccaatggggataaaggctcttgagcaatacttgaaaacatgtaacagacaaattgatgatattgtcactttggtgcgtggcaaattgtccatgcagaatcgcgtaactctgggagcacttgtggtactggatgtccatgctagagatgtcctctcatcacttgtaaaaaaaaatattagcgatgactctgactttgaatggttaagtcagcttaggtactactggcaagaaaatcatttagaaacaaaaatgatcaatgctggtttgcgatatggatatgaatatctgggtaattcccctaggctggttattacaccactcacggatagatgttacagaaccttatttggagcccttcatttgcaccttggaggagcacctgagggtccagctggcactgggaagactgaaactaccaaggatttggcaaaagctgtagccaaacaatgtgttgttttcaactgctctgatgggttggattatttggctttgggaaaattctttaagggactgttatcttgtggagcctgggcttgctttgatgagtttaacagaattgatttggaagtactctctgtggttgctcaacaaatccttactatccaaagaggtattaatgcaggtgctgatatactgatgtttgaaggaactgaactaaaacttgaccccacatgtgctgtctttataacaatgaaccctgggtatgctgggcgatcagaactgccagataacctgaaggctctctttcggacagtagcaatgatggtacctgactatgccatgattgctgaaatagtcctatactcctgtgggtttgtcactgctcgaccactgtctgtaaaaattgtggctacgtatcgcttgtgttcagagcagctgtcatctcaacatcactacgactatggaatgagagccgtgaagtcagttcttactgctgctgggaatctgaagctgaaatatccaaatgaaaatgaagaaattttgctgcttagatctatcattgatgtaaatctgccaaaatttttatcccatgatttaccactctttgagggaattacttcggatttgtttcctggggtaaaattaccaaaaccagattacaatgatttgctggcagctatcaaagacaattgtgcctccatgaatttgcaaatgactgcattcttttccgagaagattcttcaagtatatgaaatgatgattgtgcgtcatggttttatgattgttggagaaccatttggaggaaaaactagtgcatatcgtgtcttagctggagcactaaatgatatatgtgaaaaggggctaatggaagaaaacaaagttcaaataactgttttaaatcctaagtctgtcaccatgggccaactgtacggacagtttgattcagtgtcccatgaatggtctgatggggtccttgctgtcagttttagagcatttgcctcttcagtgactccagataggaaatggttaatttttgatggcccagtagatgcagtgtggattgagaatatgaacactgtgctggatgacaacaagaagctatgtctgatgagtggggagattattcagatgtcaccacaaatgaatctaatttttgagccaatggatttagaagttgcttcccctgccactgtttccagatgtggcatgatttacatggagcctcacatgttaggctggagaccactgatgttgtcctgggtgaatctgttacctgcgtcagtcagtgttattcaaaaggaattcataatgggcttatttgacagaatggtccctgtttcggttgaatttattagaaagcatacaaaggaattatctcctacttccgatacaaacttggtccggtccttaatgaatctaatagactgttttatggatgattttgctgatgaagtcaaactaaaggagagaaatgatcgagaaacttactctttgcttgagggcatttttctgttttcattgatctggtccgttggtgcttcttgtacagatgatgatcgattgaaatttaataagattcttcgagaactaatggaaagtccaatttcagatcgaactcgaaatacgtttaaattacagagtggtactgagcaaacatcctcaaaggcactaactgtcccatttcctgaaaaaggaacaatttatgattatcaatttgtcactgagggaataggaaaatgggaaccatggataaagaaattgaaagaagctcctccaattcctaaagatgtaatgtttaatgaaatcattgtgccaactctggacacaattcgatactctgcattaatggaattgctgaccacccatcaaaagccttcaatatttgtaggaccaacaggaactgggaaaagtgtttacattacgaattttcttttaaatcaactaaataaggaaatctacaaacctctgctaattaacttctcagcacaaactacagcagctcaaactcagaatattgtcatgtcaaaattggacaagagaagaaagggagtttttggtcctcctttgggcaagagaatggttgtctttgtagatgatgtcaatatgcctgctcgggaggtatatggggctcaacctcccattgagttacttagacagtggttagaccactggaactggtatgatctaaaagattgttccatgattaaactagtggacattcagatcatgtgtgctatgggacctccaggtggtggtcgaaatccagtaactcctcgatacatgcgacatttcaatattataacaatcaatgagtttagtgataaatccatgtatacaatcttctctagaatcttaacttggcatttagaaatctgttataaatttccagatgaatttctagatttgaccacacaaatcgtaaatggcacaatgactctgtataaagaagcaatgaagaatctcttgcctactccagctaaatctcactacttgttcaacctccgtgatttctcccgtgtcattcaaggtgtttgtttgtcaagaccagaaacaacagaaaccacagaagtgattaaacgtctttgggttcatgaggtccttcgagtgtattatgaccgccttctggacaatacagacagaagctggctcatcaactacattcaagaaattttgagaaactacatgtatgaagattttcatgagctttttcagcgtttggattttgataatgatggcatggtggaagcagatgacttacgcagcttaatgttttgtgatttccatgatcccaagagggaggataccaactacagagaaatcgcagatgtggataatcttcgaatgatagtagaaattcacctagaagaatacaacaatataagcaaaaaacccatgaaccttgtcttgtttcgatttgccatagagcacatcagcagaatttccaggatcctgaagcagcctcgcagccatgctctcctagtaggggttggagggagtggaaggcagtctgtcaccagattagctgcccacatggctgattattcagttttccaagttgaaatctctaaggggtatgatactactgaatggcatgaagatttaaaagtgatcttaaggaaatgtgcggaaggtgagatgcagggtgtcttcctgtttacagatactcaaattaaagaagagtcttttctggaagatgtcagtaatctgctaaatgctggggagattccaaatctctttgcattagatgagaagcaagagatatgtgataagatgcgtcagttagatcgccagcgggataaaaccaagcaaacagatggcagccccatagcccttttcaacatgtttattgatcattgccgcagccaactgcatgtggtccttgccatgagtcccattggagatgcatttcggaatcgtcttagaaagttccctgctcttgttaactgctgtaccattgactggtttcagtcatggcctgaagatgcactccaggcagttgcctcacgattcttggaagaaattgaaatgtcagaggaaatacgagatggctgtatcgacatgtgtaaaagcttccacacttctactatagatttatccaaatctttctttgttgaacttcaaagatacaattatgtgactcctacctcttacctcgaattaatctccaccttcaaactgttgttagaaaagaaaagaagtgaagtaatgaaaatgaaaaagagatatgaagtgggtttggagaaactggattctgcttcatctcaagtagccacaatgcagatggagttggaggcactacatcctcaattaaaagttgctagcaaagaggttgatgaaatgatgataatgattgagaaagagtctgtagaagttgccaaaactgaaaaaatagtgaaagctgatgaaacaatagcgaatgaacaagctatggcttccaaagccatcaaagatgagtgcgatgctgacctggcaggtgccttgccaatattagagtcagcactggccgcccttgatactcttactgcacaggatattacagtggtaaaatccatgaagagtcctcctgctggtgtcaagcttgttatggaagctatatgcatcttgaaaggaatcaaagctgacaaaatccctgacccaacaggttcagggaaaaaaattgaggatttctggggcccagctaagagacttcttggtgacatgaggtttctgcagtcacttcatgaatatgacaaggacaatattcctccagcttatatgaatatcataagaaaaaattatattccaaatccagattttgtaccagaaaaaatcagaaatgcttctacagcggccgaaggtctgtgcaaatgggtcatagcaatggattcatatgataaagtggcaaaaatagtagctcccaaaaagataaaactggctgcagctgaaggggagcttaaaattgccatggatggtcttagaaagaagcaggcagcccttaaggaagttcaggacaagctggccaggcttcaagacacacttgaattaaataaacaaaagaaggctgacctggaaaaccaggttgacctttgcagcaaaaaactagaacgagctgaacagttgattggaggccttggaggtgagaaaactcgatggagccacacagctctggagctaggtcagctgtacatcaacttgactggggatatcctcatttcctccggagtggttgcttacctcggagccttcacatccacctatagacagaatcaaactaaagagtggacaactttgtgcaaaggaagagatatcccctgctcagatgattgctctcttatgggtaccctgggagaagctgtgacaattcgaacttggaatattgctggattaccttctgactcattttccattgataatgggataatcataatgaatgcaagaaggtggcctctgatgatagatcctcaaagtcaggctaataaatggatcaagaacatggaaaaagccaatagtctttatgtgattaaacttagtgaacctgactatgtcaggactctggaaaattgcatccagtttggtactcctgtgttgctagaaaatgttggcgaagaactagatcctattttggaacctcttctactaaaacaaacctttaagcagggtgggagtacatgtatccggcttggggactccacaattgaatatgcacctgacttccgcttctatattactaccaagttaagaaatcctcattatcttcctgaaacatcagtaaaggtaacattattaaacttcatgataacccctgagggaatgcaagatcagcttctgggaattgtggtggcacaagaaaggccagaccttgaagaagaaaagcaagccttgatattacaaggagctgaaaataaaaggcagttaaaagaaatagaagacaagattttagaagttctttcatcttcggaaggcaatatattagaagatgaaactgctattaagatattatcttcctccaaggccttggctaatgagatttctcagaagcaggaagtagccgaagagacagagaaaaagattgacaccacccgcatgggctatcgtcctattgccatccattcttccatcctatttttttctcttgctgatttagccaacattgagcccatgtaccagtattcactgacctggtttattaaccttttcatcctgtctattgaaaattcagagaaatcagaaattttggcaaaaaggcttcagattctcaaggatcactttacttattcactgtatgttaatgtctgccggtcactctttgaaaaggataagctgctcttttccttttgtctaaccataaatctactgctgcatgagcgggcgattaataaagctgagtggagatttctgctaactggtggcattggactggataatccttatgccaacctttgtacatggcttcctcagaaatcctgggatgaaatatgtcgattagatgatttgcctgccttcaaaaccattcgtagagagtttatgcgcttaaaggatggatggaagaaagtatatgatagtttggaaccacaccatgaggttttccctgaagaatgggaagataaagcaaatgagtttcaaaggatgcttattattcgttgcttgaggccagacaaggttattccaatgttgcaggaatttataatcaacagattgggacgtgcattcattgaaccacccccctttgatttagccaaggcatttggagacagtaactgctgtgcaccactgattttcgtgctctctcctggagcagatcccatggctgcccttctaaaatttgctgatgaccagggatatgggggatcaaaacttagctctttatctcttggtcaaggccaagggcccattgctatgaagatgttagaaaaagctgtcaaggaaggaacatgggttgttcttcagaattgtcaccttgccacctcttggatgccaacccttgagaaagtctgtgaggagttaagcccagagtcaacacatccagatttccgaatgtggctaacgagttacccatctccaaatttccctgtgtcagtactgcagaatggagtgaaaatgaccaatgaagcaccaaaaggtttacgggctaatatcattcgatcatacctcatggacccgatctctgatccggagttctttggcagctgcaaaaagcctgaggaattcaagaaattgctttatggcctgtgtttctttcatgctttggtacaagaaagacggaaatttggacccctagggtggaatattccttatgagttcaatgagacagatctgagaatcagcgtacagcagctccacatgttcctgaaccagtatgaggaactgccgtatgaggctctgcggtacatgactggcgaatgcaattacggaggcagagtgaccgatgactgggaccggcgcacgctgcgcagcattctaaacaaattcttcaatcccgaattagttgaaaattcagactataagttcgactcaagtggcatctattttgttcctccttctggtgatcacaaaagctacatcgaatacacaaagactctgccactgaccccagcaccagaaatctttgggatgaatgccaatgcagatatcactaaggatcagtcagaaactcagctgctatttgataacattcttcttacacagtctcgttcagcaggtgctggtgcaaaatcatcagatgaagtagtgaatgaggtcgctagtgacatcttgggcaaacttccaaacaacttcgacatcgaggctgccatgaggaggtacccaacaacttatactcagagcatgaacactgtacttgtccaagagatgggacggttcaataagttactgaagaccataagagattcgtgcgtaaatattcaaaaagcaatcaaggggcttgcagtcatgtctacagatcttgaagaagtggttagcagcattttgaatgtcaaaattccagaaatgtggatgggtaaatcctacccaagccttaaaccacttggcagctatgtgaatgacttccttgcaagactaaaattcttgcagcaatggtatgaggttggtcctcctccagtcttctggctttctggcttcttcttcacacaagccttcctgaccggtgcccagcagaactacgccaggaaatacacaattcctattgatcttcttgggtttgactatgaagtgatggaagacaaagaatacaagcatcctcctgaggatggtgttttcattcacggattatttctggatggagcttcctggaatagaaagatcaagaaacttgcagaatcgcatcccaaaattctttatgatacagtgcctgtgatgtggctaaagccctgtaagagggcagatataccaaaacggccaagttatgttgctccattgtataagacaagtgagcggagaggagtattatccaccactggccattccacgaattttgtgattgccatgactcttccctctgaccaacccaaggaacactggattggacgaggtgtagcactgttatgtcaacttaattcataaccagaagacatcatttccttgttcctatttcttgttggctggctgagtagagaaagcatattttactacttaaacctttttttttgtttgtttaaatacatttgactaaagttataattatgaatttacttatgagcaaatgcagctaaacttaatatgactcatacttaaatgtaaggaaatgttctgaaataaagactaaagaaaacacactggca

SEQ ID NO: 200390 - DNA, 12075 bp, Artificial Sequence
  derived and/or modified sequence
atgagcagcgagcaggacaagagcgccagcaaggagaagagcaagaagcccgtgagattcctgccccagctgagcatggagaagctggccagcaaggagaagttcaaggcccccgccagagccctgccccagctgagcatggtgagcaccaagccccactggcagcaggccgcccccagcttccacctgagcgtgaagcaggacgacgagagccccgagcccttcagcgtgaagaacgagcagagccacgccgagtacatggagagattcggcaagaagggcaagctgccccaccaggtggacgacagctacgtgggccccagcaccagcaagagcaagggcaagagcccccacaaggagagagagaacttcagaagcaccctggtgaacgtgatcatgcagcaggacgccgacctggacagcgccgtgcccgacggcagcaccatccccaagcccaccgccagcgccatcgagaaggacatcctgagatactactactacatccaccacggcatcgacaccgaccacgtggcccccatggaggacagctggctggagcacgtgctggacctggtgccccagcacctgaaggtgttcaccgacagcatcgtgaccctgagcgacgagatgagagaggactacctgctgagcgtgagaaagagcatcgtggacttcgtgctgaaggaccccagagagaagggcgacgacaagaagaccgacgagctgcccgcccacagagccgagatggagatcctgcccaagccctggagaaagagcttcctggccgccagcagctacatcagagaccacctgaacgccatgaaccccaccatgctggccgtgctggacctgtggcacaccaacttcaagaagctgagactggtggacatcaaggagttccacaactgccaggacgccctggagctgagcagcttccagaacatcatcatgagacacatggacagcgccaaggagaccctgctgaagatgtggttccccgaggtgcagaacatctactaccagggcaacaagaagaagcagctgcccaccggcgacagcagcgccaagctggagagcttcttcaactgcgccgccgccctgatgaccctgcagctgcaggacctgaccctggtgagcatgcaggacttcaccgacctgatcgcccagccccccgacagcgtgagagccttcgagcaccccggcttcatcatgagactgatcctggacaacgacaccatcaagttcgagcccgagctgagcgactacatcgacatcttcctgaacgtgtacgacgtgatgatcaaggccgtgagcttcgtgcccagagtggagaccaagctgtacagcaagtgggagagcaagagcaagcccaccaccctgaagcccatcatcctgaacgagatcgtggacgcccacaaggagaagatcaaggaggtgatcatgaaggagagcgtggcccccaccgagcacctgagactgtacgacaagtacgacttcctgatcaccagaaaggccgagagagacgtggacaacttcctggccgagaaccacagctacgagaagatcatcgacgagatctgcaagtaccagaagctgatcgaggagatccagtacaccagcatcaagaccatcagactgggcatgttcgagatgcactgcgaggagctgatcagagccctggtgaagagagccgacatcatctgcggcaagctgctggccaagatgttcagagaccaccaggaggtgaacaccagactgtgcgacgagttcgagagaatcgccgagaaggccctgagcaccccccccaacaccgccgagctgatggagatgaaggcctacatccagaaggtggaggtgaccgacatgatcgagctggagcagagactggtggacagcaagaactgcctggccttcctgatcgagtacgtgaacttcagccccgccgacatgagactgaacaacagcgtgttccagtggtacggcagaatgggcgagatcttcgaggagcacagaaagatcatcaaggagaagatcgagcagtaccaggagggcctgaagctgagatgcgagagattcgtggaggagctggagagctacgccaagcagagcgaggagttctacagcttcggcgacctgcaggacgtgcagagatacctgaagaaggcccagatcctgaacggcaagctggacctggccgccgacaagatcgagcagttcaacgccgaggaggaggccttcggctggctgcccagcgtgtacccccagagaaagaagatccaggacggcctgaacccctacctgagactgtacgagaccgccgtggagttcagcagcaactacagagcctggaccgagggcccctaccacaaggtgaaccccgaccaggtggaggccgacatcggcaactactggagaggcctgtacaagctggagaagaccttccacgacagcccctacgccctggccatgaccaagaaggtgagaagcaaggtggaggacttcaagcagcacatccccctgatccaggtgatctgcaaccccggcctgagacccagacactgggaggccatgagcgccatcgtgggctaccccctgcagcccagcgacgacagcaccgtgagcagcttcctggacatgaacctggagccctacatcgacagattcgagggcatcagcgaggccgccagcaaggagtacagcctggagaaggccatggagaagatgatcaccgagtgggacgccgtggagttcgtgatccacagctacagagagaccggcaccttcatcctggccagcgtggacgagatccagatgctgctggacgaccacatcatcaagacccagaccatgagaggcagccccttcatcaagccctacgagaagcagatgagagagtgggagggcaagctgctgctgctgcaggagatcctggacgagtggctgaaggtgcaggccacctggctgtacctggagcccatcttcagcagccccgacatcatgagccagatgcccgaggagggcagaagattcaccgccgtggacaagacctggagagacatcatgagaagcgtgatgcaggacaagcacgtgctgaccgtggtgaccatcgacagaatgctggagagactgaagaagagcaacgagctgctggagctgatcctgaagggcctgaacgagtacctggagaagaagagactgttcttccccagattcttcttcctgagcaacgacgagctgctggagatcctgagcgagaccaaggaccccaccagagtgcagccccacctgaagaagtgcttcgagggcatcgccaaggtggagttcaccgagaccctggacatcacccacatgaagagcagcgagggcgaggtggtggagctgatcgagatcatcagcaccgccaaggccagaggccaggtggagaagtggctggtggagctggagagagtgatgatcaacagcatccacaaggtgaccggcgacgccaccttcgcctacaccaagtacgagagaatcaactgggtgagagactggcccggccagaccgtgctgtgcgtgagccagatcttctggaccaaggaggtgcagaccgccatccccatgggcatcaaggccctggagcagtacctgaagacctgcaacagacagatcgacgacatcgtgaccctggtgagaggcaagctgagcatgcagaacagagtgaccctgggcgccctggtggtgctggacgtgcacgccagagacgtgctgagcagcctggtgaagaagaacatcagcgacgacagcgacttcgagtggctgagccagctgagatactactggcaggagaaccacctggagaccaagatgatcaacgccggcctgagatacggctacgagtacctgggcaacagccccagactggtgatcacccccctgaccgacagatgctacagaaccctgttcggcgccctgcacctgcacctgggcggcgcccccgagggccccgccggcaccggcaagaccgagaccaccaaggacctggccaaggccgtggccaagcagtgcgtggtgttcaactgcagcgacggcctggactacctggccctgggcaagttcttcaagggcctgctgagctgcggcgcctgggcctgcttcgacgagttcaacagaatcgacctggaggtgctgagcgtggtggcccagcagatcctgaccatccagagaggcatcaacgccggcgccgacatcctgatgttcgagggcaccgagctgaagctggaccccacctgcgccgtgttcatcaccatgaaccccggctacgccggcagaagcgagctgcccgacaacctgaaggccctgttcagaaccgtggccatgatggtgcccgactacgccatgatcgccgagatcgtgctgtacagctgcggcttcgtgaccgccagacccctgagcgtgaagatcgtggccacctacagactgtgcagcgagcagctgagcagccagcaccactacgactacggcatgagagccgtgaagagcgtgctgaccgccgccggcaacctgaagctgaagtaccccaacgagaacgaggagatcctgctgctgagaagcatcatcgacgtgaacctgcccaagttcctgagccacgacctgcccctgttcgagggcatcaccagcgacctgttccccggcgtgaagctgcccaagcccgactacaacgacctgctggccgccatcaaggacaactgcgccagcatgaacctgcagatgaccgccttcttcagcgagaagatcctgcaggtgtacgagatgatgatcgtgagacacggcttcatgatcgtgggcgagcccttcggcggcaagaccagcgcctacagagtgctggccggcgccctgaacgacatctgcgagaagggcctgatggaggagaacaaggtgcagatcaccgtgctgaaccccaagagcgtgaccatgggccagctgtacggccagttcgacagcgtgagccacgagtggagcgacggcgtgctggccgtgagcttcagagccttcgccagcagcgtgacccccgacagaaagtggctgatcttcgacggccccgtggacgccgtgtggatcgagaacatgaacaccgtgctggacgacaacaagaagctgtgcctgatgagcggcgagatcatccagatgagcccccagatgaacctgatcttcgagcccatggacctggaggtggccagccccgccaccgtgagcagatgcggcatgatctacatggagccccacatgctgggctggagacccctgatgctgagctgggtgaacctgctgcccgccagcgtgagcgtgatccagaaggagttcatcatgggcctgttcgacagaatggtgcccgtgagcgtggagttcatcagaaagcacaccaaggagctgagccccaccagcgacaccaacctggtgagaagcctgatgaacctgatcgactgcttcatggacgacttcgccgacgaggtgaagctgaaggagagaaacgacagagagacctacagcctgctggagggcatcttcctgttcagcctgatctggagcgtgggcgccagctgcaccgacgacgacagactgaagttcaacaagatcctgagagagctgatggagagccccatcagcgacagaaccagaaacaccttcaagctgcagagcggcaccgagcagaccagcagcaaggccctgaccgtgcccttccccgagaagggcaccatctacgactaccagttcgtgaccgagggcatcggcaagtgggagccctggatcaagaagctgaaggaggccccccccatccccaaggacgtgatgttcaacgagatcatcgtgcccaccctggacaccatcagatacagcgccctgatggagctgctgaccacccaccagaagcccagcatcttcgtgggccccaccggcaccggcaagagcgtgtacatcaccaacttcctgctgaaccagctgaacaaggagatctacaagcccctgctgatcaacttcagcgcccagaccaccgccgcccagacccagaacatcgtgatgagcaagctggacaagagaagaaagggcgtgttcggcccccccctgggcaagagaatggtggtgttcgtggacgacgtgaacatgcccgccagagaggtgtacggcgcccagccccccatcgagctgctgagacagtggctggaccactggaactggtacgacctgaaggactgcagcatgatcaagctggtggacatccagatcatgtgcgccatgggcccccccggcggcggcagaaaccccgtgacccccagatacatgagacacttcaacatcatcaccatcaacgagttcagcgacaagagcatgtacaccatcttcagcagaatcctgacctggcacctggagatctgctacaagttccccgacgagttcctggacctgaccacccagatcgtgaacggcaccatgaccctgtacaaggaggccatgaagaacctgctgcccacccccgccaagagccactacctgttcaacctgagagacttcagcagagtgatccagggcgtgtgcctgagcagacccgagaccaccgagaccaccgaggtgatcaagagactgtgggtgcacgaggtgctgagagtgtactacgacagactgctggacaacaccgacagaagctggctgatcaactacatccaggagatcctgagaaactacatgtacgaggacttccacgagctgttccagagactggacttcgacaacgacggcatggtggaggccgacgacctgagaagcctgatgttctgcgacttccacgaccccaagagagaggacaccaactacagagagatcgccgacgtggacaacctgagaatgatcgtggagatccacctggaggagtacaacaacatcagcaagaagcccatgaacctggtgctgttcagattcgccatcgagcacatcagcagaatcagcagaatcctgaagcagcccagaagccacgccctgctggtgggcgtgggcggcagcggcagacagagcgtgaccagactggccgcccacatggccgactacagcgtgttccaggtggagatcagcaagggctacgacaccaccgagtggcacgaggacctgaaggtgatcctgagaaagtgcgccgagggcgagatgcagggcgtgttcctgttcaccgacacccagatcaaggaggagagcttcctggaggacgtgagcaacctgctgaacgccggcgagatccccaacctgttcgccctggacgagaagcaggagatctgcgacaagatgagacagctggacagacagagagacaagaccaagcagaccgacggcagccccatcgccctgttcaacatgttcatcgaccactgcagaagccagctgcacgtggtgctggccatgagccccatcggcgacgccttcagaaacagactgagaaagttccccgccctggtgaactgctgcaccatcgactggttccagagctggcccgaggacgccctgcaggccgtggccagcagattcctggaggagatcgagatgagcgaggagatcagagacggctgcatcgacatgtgcaagagcttccacaccagcaccatcgacctgagcaagagcttcttcgtggagctgcagagatacaactacgtgacccccaccagctacctggagctgatcagcaccttcaagctgctgctggagaagaagagaagcgaggtgatgaagatgaagaagagatacgaggtgggcctggagaagctggacagcgccagcagccaggtggccaccatgcagatggagctggaggccctgcacccccagctgaaggtggccagcaaggaggtggacgagatgatgatcatgatcgagaaggagagcgtggaggtggccaagaccgagaagatcgtgaaggccgacgagaccatcgccaacgagcaggccatggccagcaaggccatcaaggacgagtgcgacgccgacctggccggcgccctgcccatcctggagagcgccctggccgccctggacaccctgaccgcccaggacatcaccgtggtgaagagcatgaagagcccccccgccggcgtgaagctggtgatggaggccatctgcatcctgaagggcatcaaggccgacaagatccccgaccccaccggcagcggcaagaagatcgaggacttctggggccccgccaagagactgctgggcgacatgagattcctgcagagcctgcacgagtacgacaaggacaacatcccccccgcctacatgaacatcatcagaaagaactacatccccaaccccgacttcgtgcccgagaagatcagaaacgccagcaccgccgccgagggcctgtgcaagtgggtgatcgccatggacagctacgacaaggtggccaagatcgtggcccccaagaagatcaagctggccgccgccgagggcgagctgaagatcgccatggacggcctgagaaagaagcaggccgccctgaaggaggtgcaggacaagctggccagactgcaggacaccctggagctgaacaagcagaagaaggccgacctggagaaccaggtggacctgtgcagcaagaagctggagagagccgagcagctgatcggcggcctgggcggcgagaagaccagatggagccacaccgccctggagctgggccagctgtacatcaacctgaccggcgacatcctgatcagcagcggcgtggtggcctacctgggcgccttcaccagcacctacagacagaaccagaccaaggagtggaccaccctgtgcaagggcagagacatcccctgcagcgacgactgcagcctgatgggcaccctgggcgaggccgtgaccatcagaacctggaacatcgccggcctgcccagcgacagcttcagcatcgacaacggcatcatcatcatgaacgccagaagatggcccctgatgatcgacccccagagccaggccaacaagtggatcaagaacatggagaaggccaacagcctgtacgtgatcaagctgagcgagcccgactacgtgagaaccctggagaactgcatccagttcggcacccccgtgctgctggagaacgtgggcgaggagctggaccccatcctggagcccctgctgctgaagcagaccttcaagcagggcggcagcacctgcatcagactgggcgacagcaccatcgagtacgcccccgacttcagattctacatcaccaccaagctgagaaacccccactacctgcccgagaccagcgtgaaggtgaccctgctgaacttcatgatcacccccgagggcatgcaggaccagctgctgggcatcgtggtggcccaggagagacccgacctggaggaggagaagcaggccctgatcctgcagggcgccgagaacaagagacagctgaaggagatcgaggacaagatcctggaggtgctgagcagcagcgagggcaacatcctggaggacgagaccgccatcaagatcctgagcagcagcaaggccctggccaacgagatcagccagaagcaggaggtggccgaggagaccgagaagaagatcgacaccaccagaatgggctacagacccatcgccatccacagcagcatcctgttcttcagcctggccgacctggccaacatcgagcccatgtaccagtacagcctgacctggttcatcaacctgttcatcctgagcatcgagaacagcgagaagagcgagatcctggccaagagactgcagatcctgaaggaccacttcacctacagcctgtacgtgaacgtgtgcagaagcctgttcgagaaggacaagctgctgttcagcttctgcctgaccatcaacctgctgctgcacgagagagccatcaacaaggccgagtggagattcctgctgaccggcggcatcggcctggacaacccctacgccaacctgtgcacctggctgccccagaagagctgggacgagatctgcagactggacgacctgcccgccttcaagaccatcagaagagagttcatgagactgaaggacggctggaagaaggtgtacgacagcctggagccccaccacgaggtgttccccgaggagtgggaggacaaggccaacgagttccagagaatgctgatcatcagatgcctgagacccgacaaggtgatccccatgctgcaggagttcatcatcaacagactgggcagagccttcatcgagcccccccccttcgacctggccaaggccttcggcgacagcaactgctgcgcccccctgatcttcgtgctgagccccggcgccgaccccatggccgccctgctgaagttcgccgacgaccagggctacggcggcagcaagctgagcagcctgagcctgggccagggccagggccccatcgccatgaagatgctggagaaggccgtgaaggagggcacctgggtggtgctgcagaactgccacctggccaccagctggatgcccaccctggagaaggtgtgcgaggagctgagccccgagagcacccaccccgacttcagaatgtggctgaccagctaccccagccccaacttccccgtgagcgtgctgcagaacggcgtgaagatgaccaacgaggcccccaagggcctgagagccaacatcatcagaagctacctgatggaccccatcagcgaccccgagttcttcggcagctgcaagaagcccgaggagttcaagaagctgctgtacggcctgtgcttcttccacgccctggtgcaggagagaagaaagttcggccccctgggctggaacatcccctacgagttcaacgagaccgacctgagaatcagcgtgcagcagctgcacatgttcctgaaccagtacgaggagctgccctacgaggccctgagatacatgaccggcgagtgcaactacggcggcagagtgaccgacgactgggacagaagaaccctgagaagcatcctgaacaagttcttcaaccccgagctggtggagaacagcgactacaagttcgacagcagcggcatctacttcgtgccccccagcggcgaccacaagagctacatcgagtacaccaagaccctgcccctgacccccgcccccgagatcttcggcatgaacgccaacgccgacatcaccaaggaccagagcgagacccagctgctgttcgacaacatcctgctgacccagagcagaagcgccggcgccggcgccaagagcagcgacgaggtggtgaacgaggtggccagcgacatcctgggcaagctgcccaacaacttcgacatcgaggccgccatgagaagataccccaccacctacacccagagcatgaacaccgtgctggtgcaggagatgggcagattcaacaagctgctgaagaccatcagagacagctgcgtgaacatccagaaggccatcaagggcctggccgtgatgagcaccgacctggaggaggtggtgagcagcatcctgaacgtgaagatccccgagatgtggatgggcaagagctaccccagcctgaagcccctgggcagctacgtgaacgacttcctggccagactgaagttcctgcagcagtggtacgaggtgggccccccccccgtgttctggctgagcggcttcttcttcacccaggccttcctgaccggcgcccagcagaactacgccagaaagtacaccatccccatcgacctgctgggcttcgactacgaggtgatggaggacaaggagtacaagcacccccccgaggacggcgtgttcatccacggcctgttcctggacggcgccagctggaacagaaagatcaagaagctggccgagagccaccccaagatcctgtacgacaccgtgcccgtgatgtggctgaagccctgcaagagagccgacatccccaagagacccagctacgtggcccccctgtacaagaccagcgagagaagaggcgtgctgagcaccaccggccacagcaccaacttcgtgatcgccatgaccctgcccagcgaccagcccaaggagcactggatcggcagaggcgtggccctgctgtgccagctgaacagctag

SEQ ID NO: 200391 - protein, 950 aa, Artificial Sequence
  derived and/or modified sequence
MVFSRRGGLGARDLLLWLLLLAAWEVGSGQLHYSIPEEAKHGTFVGRVAQDLGLELAELVPRLFRVASKTHRDLLEVNLQNGILFVNSRIDREELCQWSAECSIHLELIADRPLQVFHVEVKVKDINDNPPVFRGREQIIFIPESRLLNSRFPIEGAADADIGANALLTYTLSPSDYFSLDVEASDELSKSLWLELRKYLDREETPELHLLLTATDGGKPELQGTVELLITVLDVNDNAPLFDQAVYRVHLLETTANGTLVTTLNASDADEGVNGEVVFSFDSGISRDIQEKFKVDSSSGEIRLIDKLDYEETKSYEIQVKAVDKGSPPMSNHCKVLVKVLDVNDNAPELAVTSLYLPIREDAPLSTVIALITVSDRDSGANGQVTCSLMPHVPFKLVSTFKNYYSLVLDSALDRESLSVYELVVTARDGGSPSLWATARVSVEVADVNDNAPAFAQPEYTVFVKENNPPGCHIFTVSARDADAQENALVSYSLVERRVGERALSNYVSVHAESGKVYALQPLDHEELELLQFQVSARDAGVPPLGSNVTLQVFVLDENDNAPALLAPRVGGTIGAVSELVPRLVGAGHVVAKVRAVDADSGYNAWLSYELQPAAGGARIPFRVGLYTGEISTTRVLDEADLSRYRLLVLVKDHGEPALTATATVLVSLVESGQAPKASSRASVGVAGPEAALVDVNVYLIIAICAVSSLLVLTLLLYTALRCSVPPTEGAYVPGKPTLVCSSALGSWSNSQQRRQRVCSSEGPPKTDLMAFSPGLSPSLNTSERNEQPEANLDLSGNPRQPNPDWRYSASLRAGMHSSVHLEEAGILRAGPGGPDQQWPTVSSATPEPEAGEVSPPVGAGVNSNSWTFKYGPGNPKQSGPGELPDKFIIPGSPAIISIRQEPTNSQIDKSDFITFGKKEETKKKKKKKKGNKTQEKKEKGNSTTDNSDQ

SEQ ID NO: 200392 - DNA, 2853 bp, Artificial Sequence
  derived and/or modified sequence
atggttttttcaaggagaggcggtctgggcgcgagagacctgctcctttggttgctgctgctggcagcgtgggaggtcggatccgggcagctccattatagcattcctgaggaggccaaacatggtaccttcgtgggtagggtcgcccaggacttaggtctagaactcgccgaacttgtgccccgcctctttcgcgttgcgagcaagacccaccgagaccttttggaggttaacctacagaacggaattctcttcgtgaactctcggattgatcgtgaagagctatgtcaatggtctgcagaatgcagtattcatttggagctaatcgctgacaggcccctccaagtcttccatgtggaagttaaggtcaaagacatcaatgacaatccgcctgtgtttcggggaagagaacagatcattttcataccggagagcagactgcttaactcccgctttcccattgaaggcgcagccgatgcagacatcggggcaaatgcactgctaacgtacacactgagcccatctgactatttttctttggacgtagaagcatcagacgagctgtccaagagtttatggctggaactgcggaaatatctggacagggaggaaacaccagagctacatcttctgctcacggccactgatggaggaaaaccagagctgcaggggacagtggaactcctgataactgttctagacgttaatgacaatgctcccctgtttgaccaggcagtctatagggttcatcttttggagaccacagccaacggaacgctcgtgacaacactcaatgcaagtgacgcagacgagggagtaaatggtgaggtggtcttctcatttgactcagggattagccgggacatccaagaaaagtttaaggtcgattcttcatccggagagatccggctcatcgacaagctggattatgaagagaccaaatcctatgaaatacaagtcaaggccgtggataagggctcgccaccaatgtctaaccactgtaaggttctggtgaaggtcctggatgtgaacgacaatgctcctgagctggcagtaacctcattatatttgcctataagagaagatgcacccttaagcaccgtaattgcacttattactgtgagcgatcgcgacagcggcgctaatggacaggtcacctgcagtctcatgcctcacgtcccctttaagctcgtgagtacatttaaaaattactacagcttggtcctggattcagcgcttgaccgcgagtctctgagcgtctacgagctcgtggtgaccgcccgggacggcgggagccctagcctgtgggccaccgccagagtgagtgtcgaagtggctgatgtcaatgacaacgctccagccttcgcgcaacctgaatataccgtatttgtgaaagaaaacaacccacctggatgccacatctttacagtatcggcgagagatgctgacgctcaggagaacgcactagtctcctactcccttgtggagaggagggttggtgagagggctctatctaactacgtatccgttcacgctgaatctggcaaggtttatgcattacagcccctagatcacgaagagcttgagctgctgcaattccaggtgtctgcaagggacgcaggtgtgcccccgctgggatccaacgtcaccctgcaagtgttcgtcctggatgagaatgacaatgcccccgctctgttggcccctagggtgggtggtaccatcggtgcagtctcagagctcgtgccccgattggttggtgctggtcacgtagtcgctaaagtccgtgccgtcgacgccgacagtgggtacaatgcgtggctcagttatgagctacagccggctgcaggtggggcgcggatcccattccgggtcggtctctatactggggagatctccaccactcgggtgctcgacgaagcagacctgtcaagataccgacttctcgtcctggtgaaagatcatggtgaacccgccctgacagcgactgctactgtcttagtcagccttgttgaaagtggccaagctccgaaagcatccagtcgggccagcgtcggagtcgcaggccctgaggcagctttggtggatgtgaacgtttacttgatcatagcgatctgcgctgtctcctcgctgctggtcctcacccttttactctataccgctctgaggtgctccgtccctcctacagagggcgcctacgtgcccggcaaaccaaccctggtctgttcctccgcactcggaagttggtcgaacagccaacagaggcggcagcgcgtgtgctccagcgagggtccccctaagaccgatcttatggccttctctcctggcctgtctccttcattaaacactagcgaaagaaacgagcaacccgaggctaacctggatctctcagggaacccccggcaacctaatccagactggcgctatagcgcgtctttgcgcgctggaatgcacagctccgtacacctggaagaagccggtatactaagagctggccctggaggccctgatcagcaatggccgacggtttcaagcgcgactccagaaccagaggccggcgaagtgtcaccacctgtcggagctggggtgaacagcaattcatggaccttcaaatatggcccgggaaatcccaagcagagcggacccggggagttacctgataaatttattatcccaggatccccagcaatcatctctatccgccaggaaccgacaaatagtcagatcgacaaaagcgattttattaccttcggcaagaaggaggagacaaaaaagaagaaaaaaaagaagaaaggcaataagacccaggaaaaaaaggagaagggtaattccactaccgataatagcgaccaatag

SEQ ID NO: 200393 - DNA, 2853 bp, Artificial Sequence
  derived and/or modified sequence
atggtgttcagcagaagaggaggcctgggcgcccgggacctgctgctgtggctgctgctgctggccgcctgggaggtgggcagcggccagctgcactacagcatccctgaggaggccaagcacggcacctttgtgggccgggtggcccaggacctgggcctggagctggccgagctggtgcccaggctcttccgggtggccagcaagacccaccgggacctgctggaggtgaacctgcagaatggcatcctgtttgtgaacagcagaattgaccgggaggagctgtgccagtggagcgcagaatgttccatccacctggagctgattgctgaccggcccctgcaggtgttccacgtggaggtgaaggtgaaggacatcaatgacaacccccctgtgttccggggccgggagcagatcatcttcatccctgagagccggctgctgaacagccgcttccccatcgagggcgctgctgatgctgacatcggggccaatgccctgctgacctacaccctgagccccagcgactacttcagcctggatgtggaggccagtgatgagctgagcaagagcctgtggctggagctgaggaagtacctggaccgggaggagaccccagagctgcacctgctgctgacagccacagatggcggcaagccagagctgcagggcaccgtggagctgctgatcaccgtgctggatgtgaatgacaatgcccccctgtttgaccaggccgtgtacagagtgcacctgctggagaccacagccaacggcaccctggtgaccaccctgaatgccagtgatgctgatgagggcgtgaatggagaggtggtgttctcctttgattctggcatcagccgggacatccaggagaagttcaaggtggacagcagcagtggagagatccggctgattgacaagctggactatgaggagaccaagagctatgagatccaggtgaaggctgtggacaagggcagcccccccatgagcaaccactgcaaggtgctggtgaaggtgctggatgtgaatgacaatgcccctgagctggccgtgaccagcctgtacctgcccatcagagaagatgcccccctgagcacagtgattgccctgatcaccgtgtctgaccgggacagcggggccaacggccaggtgacctgcagcctgatgccccacgtgcccttcaagctggtgtccaccttcaagaactactacagcctggtgctggacagcgccctggaccgggagagcctgtctgtgtatgagctggtggtgacagccagagatggcggcagccccagcctgtgggccacagcccgggtgtctgtggaggtggctgatgtgaatgacaatgccccagcctttgcccagcctgagtacacagtgtttgtgaaggagaacaaccccccaggctgccacatcttcaccgtgtctgccagagatgctgatgcccaggagaatgccctggtgtcctacagcctggtggagaggagagtgggggagcgggccctgagcaactacgtgtctgtgcacgccgagagcggcaaggtgtatgccctgcagcccctggaccacgaggagctggagctgctgcagttccaggtgtctgccagagatgctggggtgccccccctgggcagcaatgtgaccctgcaggtgtttgtgctggatgaaaatgacaatgccccagccctgctggccccccgggtgggcggcaccatcggggctgtgtctgagctggtgccccggctggtgggcgccggccacgtggtggccaaggtgcgggctgtggatgctgacagcggctacaatgcctggctgtcctatgagctgcagcctgctgctggaggagcccgcatccccttccgggtgggcctgtacaccggggagatcagcaccaccagggtgctggatgaggccgacctgagccgctaccgcctgctggtgctggtgaaggaccacggggagcccgccctgacagccacagccaccgtgctggtgtccctggtggagagcggccaggcccccaaggccagcagccgggcctctgtgggcgtggccggccctgaggccgccctggtggatgtgaatgtgtacctgatcatcgccatctgtgctgtgagcagcctgctggtgctgaccctgctgctgtacacagccctgcgctgcagcgtgcccccaacagagggcgcctacgtgcctgggaagcccaccctggtgtgcagcagcgccctgggctcctggagcaacagccagcagaggcggcagagggtgtgcagcagcgagggcccccccaagacagacctgatggccttcagccctggcctgagccccagcctgaacaccagcgagagaaatgagcagcctgaggccaacctggacctgagcggcaacccccggcagcccaacccagactggagatacagcgccagcctgcgggccggcatgcacagctctgtgcacctggaggaggccggcatcctgcgggccggccctgggggccctgaccagcagtggcccaccgtgagcagcgccaccccagagcctgaggccggggaggtgagcccccctgtgggcgctggggtgaacagcaacagctggaccttcaagtatggccctggcaaccccaagcagagcggccctggagagctgcctgacaagttcatcatccctggcagccctgccatcatcagcatccggcaggagcccaccaacagccagattgacaagagtgacttcatcaccttcggcaagaaggaggagaccaagaagaagaagaagaagaagaagggcaacaagacccaggagaagaaggagaagggcaacagcaccacagacaacagcgaccagtag

SEQ ID NO: 200394 - DNA, 2853 bp, Artificial Sequence
  derived and/or modified sequence
atggtgttcagccggcggggcggcctgggcgcccgggacctgctgttatggcttcttctccttgctgcctgggaggtcgggtccggccaacttcattattccatccctgaagaagctaagcacgggacatttgtgggacgagtggcccaggacctgggactggagttggctgagctagtgccccgactgttcagagtggcgtcgaagactcatcgtgatcttctggaagtgaacctgcaaaacgggatcctgttcgtcaatagccgcattgatagggaggaattgtgtcagtggagtgctgagtgttccattcacctggaacttattgccgataggccgttacaggtgtttcacgtggaggttaaggtcaaagacatcaacgacaatccccccgtcttcaggggccgtgaacagatcatcttcatcccggagagccggcttctgaatagccgctttcctattgagggtgcagcagatgctgacatcggagccaacgctctgctcacttacacactatcccctagcgattacttctcccttgacgtggaggcctccgacgagctgtccaagagcctttggttagaactcaggaagtacctggatagagaagaaactcctgagctgcatctcctgctcacagccacagacggcggaaagcccgagctccagggcaccgttgaactgctgataacagtgctggacgtcaacgataacgctccccttttcgaccaggccgtataccgggtccacctgctggaaacaacggctaatggcaccctcgtgacaactctgaatgcgagtgacgccgacgaaggggtgaatggcgaagtcgtattctcctttgacagtggaatcagcagagacatccaggaaaagttcaaagtagatagcagttccggtgagattagactgattgacaagttagactacgaagaaaccaaaagttatgagatccaggtcaaggccgtggacaaggggtcgcctccgatgagtaatcactgtaaggttctcgtgaaagttctcgatgtgaacgacaacgctcccgagctggccgtaactagtctgtacctgcccatacgggaggatgctcccctctccactgtcatagccttgattacggtgagtgacagggatagcggagctaacgggcaggtaacatgtagcttgatgccccacgtcccgttcaagttggtgagcacctttaaaaattactatagtctcgtgctggattctgccttagaccgagagtctctctctgtctacgagctggtggtgacggctagggatggtggatcccctagtctgtgggctactgccagagtgagcgtcgaagtagccgacgttaacgacaatgcacctgcttttgcccagccagagtatacagtgttcgtaaaggaaaacaatcccccgggttgccacatatttacagtgtctgctagggacgccgacgctcaggagaatgctctggttagctattctctggtcgagcggcgcgttggggaaagggcattgtcaaattacgtgagcgtgcatgccgagagtggcaaggtgtacgctctgcagccattggaccacgaagagctggagcttctgcagttccaggtaagtgccagagatgctggcgtgcccccactcggatccaatgtgaccctgcaggtgttcgtgctggatgagaatgataatgcacccgccctcctggccccaagagtaggcgggaccatcggtgctgtgtcagaactcgtcccccgcctagtgggcgccggtcacgtagtggctaaagtgagggccgtggacgccgacagcggttacaatgcctggctcagctatgaactgcagcctgcagccgggggtgctcgcatcccattccgcgtggggctctatactggagagataagcacaacacgcgttctcgacgaagcagacttgtcacggtacaggctgctggtcctggtgaaggaccatggagagcccgcactgacagctaccgctaccgtcctggtgtccttagtcgaatccggccaggccccgaaggcttccagcagggccagtgttggagtcgcgggcccggaggctgcactggtcgatgtcaatgtctacctgatcatagccatctgtgctgtttcttctcttctcgttctcacccttctcctctacaccgcattacgatgctcggttccaccgacagagggcgcctatgtgcccgggaagcctacattggtgtgcagcagcgcccttggatcttggagtaactcccagcagaggaggcagagagtgtgcagtagcgaagggccacctaaaaccgacttgatggccttcagccccggcctgtctcctagcctgaatactagtgaacgcaacgaacaacccgaggccaatttggacctgtccggcaatcctcgacaacctaaccccgactggcgttattccgcaagcctgcgcgccggtatgcactctagtgtccacttggaagaggctgggatcctccgtgcgggacctggcggccccgatcagcagtggcccacagtatcaagcgctacacccgaacccgaggctggcgaggtcagtccccccgtgggggccggtgtaaattctaattcatggacattcaaatacgggcctggaaaccccaaacagtccggacccggcgaactgcccgacaaatttattatccccggaagccccgccattatttcgatacgccaggagcccaccaattctcagatcgataagagtgatttcatcaccttcggcaaaaaggaagagaccaagaaaaagaagaagaaaaagaaaggaaataagactcaggaaaaaaaagagaaagggaattcaactacagataactctgaccaatag

SEQ ID NO: 200395 - DNA, 2853 bp, Artificial Sequence
  derived and/or modified sequence
atggtgttttcgagacgaggtggtctgggggcacgcgacctgctgctgtggctcttgctactggccgcatgggaagtcggctcgggtcaactgcattatagcataccggaagaagcgaaacacgggactttcgtggggagggtcgcacaagatcttggtctcgagctagcagagctggtgccaagactgttccgcgtggcgagtaaaacccaccgcgaccttttggaggtgaacttgcagaacggtattctgttcgtcaattccaggatcgatagagaggaactctgtcagtggtctgctgagtgctccattcaccttgaacttattgcagacaggcccctgcaagtttttcatgtagaggtcaaagtgaaagacatcaatgacaatcctccagtctttcggggtagagagcaaatcatctttatacctgagtccagattgctgaactccaggttccccattgagggcgcagctgatgctgatattggagccaatgcactactaacgtacacgttaagccccagtgactacttctccctcgacgtagaggcgtcagacgagcttagcaagtctctttggctggagctgcgtaaatatctagaccgagaagaaacccctgaactgcacttacttctgaccgctactgacggaggcaaacctgagctgcaagggaccgttgagctgctcatcactgtccttgacgtgaatgacaacgctccattattcgaccaggccgtttacagggtgcatttgctggagaccaccgccaatggcaccctggtgaccacgctgaatgcttctgacgccgacgaaggggtgaatggcgaggtcgtgttctctttcgatagcggtatttcgcgcgatattcaggaaaagtttaaggtggattcaagttctggggaaattagactgatagacaagctcgattacgaggaaacaaaatcctatgagattcaggtaaaggcagtggataaggggtctcctccaatgtccaatcactgcaaagtgttagtgaaagtgctggacgtcaatgacaacgcccctgagctagcagtaacatccttatatttaccaatcagagaggacgccccactcagcacggtcatcgctttaatcaccgtttcggacagagacagtggcgctaacggacaagttacctgctccctgatgcctcatgtgccgtttaaactggtctcaaccttcaaaaattattactccttagttttggactcagccttggacagggaaagtctgtccgtgtacgaattggtcgttacggccagggatggcggatcaccatcactgtgggctacggcccgagtgagcgtggaggtggccgatgttaacgataatgcccctgcctttgctcagcccgagtacacggtgtttgtgaaagaaaacaaccctccgggatgtcatatctttacagtgagcgctagagatgccgatgcccaggaaaacgctctggtgagttattccctggtcgaaaggagagtgggggaacgcgctctgtccaattatgtgtccgtgcacgcagaatctggcaaggtgtacgccctccagcccttggaccatgaagagctggaactgcttcagtttcaagtgtctgcgagagatgctggcgtccctcctttagggtctaatgttacacttcaagtgtttgttttggatgagaacgataatgcacccgcactactggctcctagggtgggcggaaccatcggggcagttagcgagctggtgcccaggctcgtgggggcaggacacgtcgtcgcaaaggtccgtgccgtggacgccgatagcggctacaatgcttggctgtcttacgagctgcaaccagcagcgggtggcgctaggatccccttcagagtagggctgtacaccggcgaaatttcgaccactcgtgtgctggacgaagctgatctcagccgttatcgtttgcttgttcttgtgaaagatcatggagaaccagctctcacagctaccgcaaccgtgctggtgagtctggtggagagtggccaggccccaaaggcgtcatcaagggctagcgtaggagttgccggtccagaagccgcactcgtcgacgttaacgtctacctgatcattgccatatgtgcagtctctagcctgctcgtgctgacgctgctgttgtacacagcattacgctgctcagttcctccgactgaaggggcatacgtgccaggaaagcctaccctggtatgttcctccgccttgggttcgtggtctaatagccagcagcgtagacagcgggtatgcagctcagagggccctcctaagacggacttgatggccttctctccagggctctcaccctccctgaacacttccgagagaaatgaacagcctgaggccaacctggacttgagcggaaaccccaggcaaccaaacccggactggaggtacagcgcatctctcagagcaggtatgcattcttccgtgcacctggaagaggcaggcatactgagagccggaccgggaggccctgatcagcaatggccaactgtatctagcgccactcctgaacccgaagccggagaggtgtcccccccagtgggggctggtgttaatagcaacagctggacgttcaagtacggccctgggaacccaaagcagtccggcccaggagagctgccggataagttcataatcccaggttcacctgccatcataagcattcgtcaggaaccaactaattctcagatcgacaaatctgattttatcacatttggaaagaaagaagaaaccaaaaaaaaaaaaaaaaaaaaaaaaggtaacaagacccaagaaaagaaggaaaaaggcaatagcacgaccgataacagcgaccagtag

SEQ ID NO: 200396 - DNA, 5260 bp, Artificial Sequence
  derived and/or modified sequence
atggtgttttctaggagagggggcctgggagcccgggatctgcttctttggcttctgctcctcgcagcctgggaggtggggagcggccagctccactactcgatcccggaggaagccaaacacggcaccttcgttggccgcgttgctcaggacctgggactggagctggcggagctggtgcctcgcctgttccgggtggcgtccaaaacacacagggaccttctggaggtaaatctgcagaatggcattttgtttgtgaattctcggatcgatcgcgaggagctgtgccagtggagcgcggagtgcagcatccacctggagttgatcgccgacaggccgctgcaggttttccatgtggaggtgaaggtgaaagacattaacgataatccacccgtcttcaggggcagagaacaaataatatttattcctgaatctagactcctgaattcgcgttttccgatagaaggagctgctgatgcagacattggtgctaacgctcttctaacgtacacgctcagcccgagtgattatttctctttggatgtagaggcaagtgatgaactgagtaaatctctttggcttgaattgagaaaatatttggatagagaagaaacaccagaacttcacttattactgactgccactgatgggggcaaaccggagctgcaaggtacagttgagctgctgatcaccgtcctcgacgttaatgataacgccccactgtttgaccaggccgtatacagagtccacttgttagagactacagcaaatggaacattagtgaccacattaaatgcctctgatgctgacgaaggtgtaaatggtgaagtcgtcttttcctttgacagtggtatttctcgtgacattcaagaaaaattcaaagttgattccagctcaggagaaattaggttaattgataaactggattatgaagaaacaaaatcctacgaaattcaagtaaaggcagttgataaaggaagtcctccgatgtcaaatcactgtaaggttttggtgaaagtgctggatgtaaatgataatgctccagaactggcggtcacttcattgtatttgcctatcagagaggacgctccactcagcaccgtcatcgccctcatcaccgtgtctgaccgtgactcaggtgccaacgggcaggtgacttgctccttaatgccccacgtccccttcaagctggtgtccaccttcaagaattactactcgttggtgttggacagcgccctggatcgcgagagcctgtcggtctatgagctggtggtgaccgcgcgggacgggggctcgccttcgctgtgggccacggccagggtgtccgtggaggtggccgacgtgaatgacaacgcgcctgcgttcgcgcagcccgagtacacagtattcgtgaaggagaacaacccgccgggctgccacatcttcacggtgtctgcgcgggacgcggacgcgcaggagaacgcgctggtgtcctattcgctggtggaacggcgggtgggcgagcgcgcgctgtcgaactacgtgtcagtgcacgcggagagcggcaaggtgtacgcactgcagcccctggaccacgaggagctggagctgctgcagttccaggtgagcgcgcgggatgcgggcgtgccgcctctgggcagcaacgtgacgctgcaggtgttcgtgctggacgagaacgacaacgcgccggcgctgctggcgcctcgagtgggtggcactattggtgcagtcagtgagctggtgccgcgattggtgggtgcgggtcatgtggtggcgaaggtgcgcgcagtggacgccgactcgggctacaacgcgtggctgtcctatgaactgcagccggcagcaggcggcgcgcgcatcccgttccgcgtggggctgtacacgggcgagatcagcacgactcgtgtcctggacgaggctgacttgtcgcgctaccgccttctggtgctagtgaaggatcacggtgagccggcgctgacagccacggccactgtgcttgtatctctggtggagagcggccaggcgccaaaggcgtcttcgcgggcgtcggtgggtgtcgcgggcccagaggcggcgctggtggatgtcaacgtgtacctgatcatcgccatctgcgcggtgtccagcctgctggtgctcacactgctgctgtacacggcgctgcggtgctcagtgccgcccactgagggtgcgtatgtgccgggcaagcccactctggtgtgctccagcgcgttggggagctggtcgaactcacagcagaggcggcagagggtgtgctctagcgagggcccacccaagaccgacctcatggccttcagcccaggcctatctccaagtcttaacacgtcagaaagaaatgaacaaccagaagcaaatttggatctttctggtaatccacgacagcccaaccctgactggcgttactctgcctccctgagagcaggcatgcacagctctgtgcacctagaggaggctggcattctacgggctggtccaggagggcctgatcagcagtggccaacagtatccagtgcaacaccagaaccagaggcaggagaagtgtcccctccagtcggtgcgggtgtcaacagcaacagctggacctttaaatacggaccaggcaaccccaaacaatccggtcccggtgagttgcccgacaaattcattatcccaggatctcctgcaatcatctccatccggcaggagcctactaacagccaaattgacaaaagtgacttcataaccttcggcaaaaaggaggagaccaagaaaaagaagaaaaagaagaagggtaacaagacccaggagaaaaaagagaaagggaacagcacgactgacaacagtgaccagtgaggtcctcaaatggaaacaagccacttagccagtttttgtaataatggcaaatctctcccatgtagcaattccctgctcctttttcctatctacatgagccctcttagagacctcagaaatctgcagaaagttccctgtgtctgtctagaacgcatttaacaggttttgtcgtaaaagctttactaagtctggtgttaactctttctctccactctggcttgttttcagaacctaaaaagcagacccaagtttcctttctcctccgccgcaaaggagaggcttcccagccccgccagtgagaggttggactctctgccctgtgctccggggatcctgtcttgatgacacttgcagggcaggctgaaaagttttgagattgagcagcttgggagtttgtggccactgggtatgtgtggctaccgcgggtatgcgagtgccagatattggctgagacgagccagcttagactaattggtacaaggaaggcaagaaaacaaagacaaataaacagcggaagttatcagtatggaggggaagtgtaaacttaaagggaccagactttctaaatcttacaactcaagaggtggcagccaccctctaggagacaaaactacccccactgacaaggctttaggagaccctaaagtctgttggctgtgacgtcattatacctaaaatctgcatcatacctgcaagccaacagttcagtgttttaacagagaaccaccctgggaaacagaagcagatctgatgtgtttcctatacatgtcctgtgctcactttattaaaaattcttttgcacacaatgtttatgaaaaggccagatccttttccaatacttatgcaaaagcaaaagaaaaccccgacacctcacctttcgctgtttgttgtttcatagatttatttaaaaaaagagaaagtctatagctataaatctttaaagagaaatatgaatacaattcccctaaactctcctcaaaagagaattcagtctacagccatttaaatgatcattgctgctacagaagtgctttaagagaattgcctgaaacatctgtattatatcggccacctgccaatcacagctttactctttcaggtcactctggggctgcctcttgcatgtattactaaataaaatgatctctctttctctctctctctctcttttctaagaaacaattatgtgcactttgatacacaaccttctctaaccaactatatatcaagacccaaaaattgaagaaaaatattgttttctcatacagtgagcagatttttcaatctactaattctgtgacttgtcttggtgtgctagcctacaccttctctttggtttagttttccttttctataacactctgaattgctaatcttactaacacctatgatgttacctgaaatcaatctcccatatgtatgctgtatgctatgctaagactcctgaaatatacttactctgtgcttgtgtatgtgaatgttaatgcaactattacctagagtgaactttaagctttattgttgaatgtaattccattatatttccttttgtacacctgtgaaaaagtggagtagtgtttttttaaccattgttaatcagcttttgtgtatgaaagacacagtaaaatttctttcttaaatcaagatactggtgattcaaggaattttatttatggtccagccaagagccatctcgtgccaagacttctgctggcaagggaatggataaagctgttttgttctagtaacaattttggaatgaatactgacaatattccatgagggtgtgcaagcacaaattttaccaatctgacctctttgaagttgcagaatgctttgaaattctaatggtatctgaaatatcagctcatagaaagtaacaaaatttgctgtcaccttaaataagacattttaattttgttataatgtacaatttagaagtttgattaattatattatctatttaggcattaatataaaagaggtaggagtctgttatttaaaaaaagcattaaatttaaaaaaaaactgtcttgtctacttttagcttcattctcccatattttgaagggtgtgtaacttcagctctgcaggattgcatggggtaaaacttgttaccaacacatgtgaaccattgctacattgtaggttgtgatcattttgccccactgaagcccatgtatctgaccttacgtgccttttgaactaggagaatcgggctaatttattaatgatgataattataatgtatctgtacagcactttttacatttgcgaagtgctttccaatccatgttagttactagttattacagctgtaaggataaaacacgtcatgtggattcattttgaattggtgctattggtatttcctctgttattgctaataaatgaaaatggtggtatg

SEQ ID NO: 200397 - DNA, 2853 bp, Artificial Sequence
  derived and/or modified sequence
atggtgttcagcagaagaggcggcctgggcgccagagacctgctgctgtggctgctgctgctggccgcctgggaggtgggcagcggccagctgcactacagcatccccgaggaggccaagcacggcaccttcgtgggcagagtggcccaggacctgggcctggagctggccgagctggtgcccagactgttcagagtggccagcaagacccacagagacctgctggaggtgaacctgcagaacggcatcctgttcgtgaacagcagaatcgacagagaggagctgtgccagtggagcgccgagtgcagcatccacctggagctgatcgccgacagacccctgcaggtgttccacgtggaggtgaaggtgaaggacatcaacgacaacccccccgtgttcagaggcagagagcagatcatcttcatccccgagagcagactgctgaacagcagattccccatcgagggcgccgccgacgccgacatcggcgccaacgccctgctgacctacaccctgagccccagcgactacttcagcctggacgtggaggccagcgacgagctgagcaagagcctgtggctggagctgagaaagtacctggacagagaggagacccccgagctgcacctgctgctgaccgccaccgacggcggcaagcccgagctgcagggcaccgtggagctgctgatcaccgtgctggacgtgaacgacaacgcccccctgttcgaccaggccgtgtacagagtgcacctgctggagaccaccgccaacggcaccctggtgaccaccctgaacgccagcgacgccgacgagggcgtgaacggcgaggtggtgttcagcttcgacagcggcatcagcagagacatccaggagaagttcaaggtggacagcagcagcggcgagatcagactgatcgacaagctggactacgaggagaccaagagctacgagatccaggtgaaggccgtggacaagggcagcccccccatgagcaaccactgcaaggtgctggtgaaggtgctggacgtgaacgacaacgcccccgagctggccgtgaccagcctgtacctgcccatcagagaggacgcccccctgagcaccgtgatcgccctgatcaccgtgagcgacagagacagcggcgccaacggccaggtgacctgcagcctgatgccccacgtgcccttcaagctggtgagcaccttcaagaactactacagcctggtgctggacagcgccctggacagagagagcctgagcgtgtacgagctggtggtgaccgccagagacggcggcagccccagcctgtgggccaccgccagagtgagcgtggaggtggccgacgtgaacgacaacgcccccgccttcgcccagcccgagtacaccgtgttcgtgaaggagaacaacccccccggctgccacatcttcaccgtgagcgccagagacgccgacgcccaggagaacgccctggtgagctacagcctggtggagagaagagtgggcgagagagccctgagcaactacgtgagcgtgcacgccgagagcggcaaggtgtacgccctgcagcccctggaccacgaggagctggagctgctgcagttccaggtgagcgccagagacgccggcgtgccccccctgggcagcaacgtgaccctgcaggtgttcgtgctggacgagaacgacaacgcccccgccctgctggcccccagagtgggcggcaccatcggcgccgtgagcgagctggtgcccagactggtgggcgccggccacgtggtggccaaggtgagagccgtggacgccgacagcggctacaacgcctggctgagctacgagctgcagcccgccgccggcggcgccagaatccccttcagagtgggcctgtacaccggcgagatcagcaccaccagagtgctggacgaggccgacctgagcagatacagactgctggtgctggtgaaggaccacggcgagcccgccctgaccgccaccgccaccgtgctggtgagcctggtggagagcggccaggcccccaaggccagcagcagagccagcgtgggcgtggccggccccgaggccgccctggtggacgtgaacgtgtacctgatcatcgccatctgcgccgtgagcagcctgctggtgctgaccctgctgctgtacaccgccctgagatgcagcgtgccccccaccgagggcgcctacgtgcccggcaagcccaccctggtgtgcagcagcgccctgggcagctggagcaacagccagcagagaagacagagagtgtgcagcagcgagggcccccccaagaccgacctgatggccttcagccccggcctgagccccagcctgaacaccagcgagagaaacgagcagcccgaggccaacctggacctgagcggcaaccccagacagcccaaccccgactggagatacagcgccagcctgagagccggcatgcacagcagcgtgcacctggaggaggccggcatcctgagagccggccccggcggccccgaccagcagtggcccaccgtgagcagcgccacccccgagcccgaggccggcgaggtgagcccccccgtgggcgccggcgtgaacagcaacagctggaccttcaagtacggccccggcaaccccaagcagagcggccccggcgagctgcccgacaagttcatcatccccggcagccccgccatcatcagcatcagacaggagcccaccaacagccagatcgacaagagcgacttcatcaccttcggcaagaaggaggagaccaagaagaagaagaagaagaagaagggcaacaagacccaggagaagaaggagaagggcaacagcaccaccgacaacagcgaccagtag

SEQ ID NO: 200398 - protein, 901 aa, Artificial Sequence
  derived and/or modified sequence
MEFSWGSGQESRRLLLLLLLLAAWEAGNGQLHYSVSEEAKHGTFVGRIAQDLGLELAELVPRLFRVASKGRGGLLEVNLQNGILFVNSRIDREELCRRSAECSIHLEVIVDRPLQVFHVDVEVRDINDNPPVFPATQKNLSIAESRPLDSRFPLEGASDADIGENALLTYRLSPNEYFSLEKPPDDELVKGLGLILRKSLDREEAPEIFLVLTATDGGKPELTGTVQLLITVLDANDNAPAFDRTIYKVRLLENVPNGTLVIKLNASDLDEGLNGDIVYSFSNDISPNVKSKFHIDPITGQIIVKGYIDFEESKSYEIIVEGIDKGQLPLSGHCRVIVEVEDNNDNVPDLEFKSLSLPIREDAPLGTVIALISVSDKDMGVNGLVTCSLTSHVPFKLVSTFKNYYSLVLDSALDRESVSAYELVVTARDGGSPSLWATASVSVEVADVNDNAPAFAQPEYTVFVKENNPPGCHIFTVSAWDADAQENALVSYSLVERRVGERALSSYVSVHAESGKVYALQPLDHEELELLQFQVTARDAGVPPLGSNVTLQVFVLDENDNAPALLAPRAGGTGGAVSELVPWSVGVGHVVAKVRAVDADSGYNAWLSYELQPGTGGARIPFRVGLYTGEISTTRALDETDAPRHRLLVLVKDHGEPALTATATVLVSLVESGQAPKASSRALVGAVGPDAALVDVNVYLIIAICAVSSLLVLTLLLYTALRCSALPTEGACAPGKPTLVCSSAVGSWSYSQQRRPRVCSGEGPPKTDLMAFSPSLPDSRDREDQLQTTEESFAKPRQPNPDWRYSASLRAGMHSSVHLEEAGILRAGPGGPDQQWPTVSSATPEPEAGEVSPPVGAGVNSNSWTFKYGPGNPKQSGPEPKKQTQVSFLLRRKGEASQPRQ

SEQ ID NO: 200399 - protein, 947 aa, Artificial Sequence
  derived and/or modified sequence
MEFSWGSGQESRRLLLLLLLLAAWEAGNGQLHYSVSEEAKHGTFVGRIAQDLGLELAELVPRLFRVASKGRGGLLEVNLQNGILFVNSRIDREELCRRSAECSIHLEVIVDRPLQVFHVDVEVRDINDNPPVFPATQKNLSIAESRPLDSRFPLEGASDADIGENALLTYRLSPNEYFSLEKPPDDELVKGLGLILRKSLDREEAPEIFLVLTATDGGKPELTGTVQLLITVLDANDNAPAFDRTIYKVRLLENVPNGTLVIKLNASDLDEGLNGDIVYSFSNDISPNVKSKFHIDPITGQIIVKGYIDFEESKSYEIIVEGIDKGQLPLSGHCRVIVEVEDNNDNVPDLEFKSLSLPIREDAPLGTVIALISVSDKDMGVNGLVTCSLTSHVPFKLVSTFKNYYSLVLDSALDRESVSAYELVVTARDGGSPSLWATASVSVEVADVNDNAPAFAQPEYTVFVKENNPPGCHIFTVSAWDADAQENALVSYSLVERRVGERALSSYVSVHAESGKVYALQPLDHEELELLQFQVTARDAGVPPLGSNVTLQVFVLDENDNAPALLAPRAGGTGGAVSELVPWSVGVGHVVAKVRAVDADSGYNAWLSYELQPGTGGARIPFRVGLYTGEISTTRALDETDAPRHRLLVLVKDHGEPALTATATVLVSLVESGQAPKASSRALVGAVGPDAALVDVNVYLIIAICAVSSLLVLTLLLYTALRCSALPTEGACAPGKPTLVCSSAVGSWSYSQQRRPRVCSGEGPPKTDLMAFSPSLPDSRDREDQLQTTEESFAKPRQPNPDWRYSASLRAGMHSSVHLEEAGILRAGPGGPDQQWPTVSSATPEPEAGEVSPPVGAGVNSNSWTFKYGPGNPKQSGPGELPDKFIIPGSPAIISIRQEPTNSQIDKSDFITFGKKEETKKKKKKKKGNKTQEKKEKGNSTTDNSDQ

SEQ ID NO: 200400 - DNA, 2706 bp, Artificial Sequence
  derived and/or modified sequence
atggagttcagctggggcagcggccaggagagcagaagactgctgctgctgctgctgctgctggccgcctgggaggccggcaacggccagctgcactacagcgtgagcgaggaggccaagcacggcaccttcgtgggcagaatcgcccaggacctgggcctggagctggccgagctggtgcccagactgttcagagtggccagcaagggcagaggcggcctgctggaggtgaacctgcagaacggcatcctgttcgtgaacagcagaatcgacagagaggagctgtgcagaagaagcgccgagtgcagcatccacctggaggtgatcgtggacagacccctgcaggtgttccacgtggacgtggaggtgagagacatcaacgacaacccccccgtgttccccgccacccagaagaacctgagcatcgccgagagcagacccctggacagcagattccccctggagggcgccagcgacgccgacatcggcgagaacgccctgctgacctacagactgagccccaacgagtacttcagcctggagaagccccccgacgacgagctggtgaagggcctgggcctgatcctgagaaagagcctggacagagaggaggcccccgagatcttcctggtgctgaccgccaccgacggcggcaagcccgagctgaccggcaccgtgcagctgctgatcaccgtgctggacgccaacgacaacgcccccgccttcgacagaaccatctacaaggtgagactgctggagaacgtgcccaacggcaccctggtgatcaagctgaacgccagcgacctggacgagggcctgaacggcgacatcgtgtacagcttcagcaacgacatcagccccaacgtgaagagcaagttccacatcgaccccatcaccggccagatcatcgtgaagggctacatcgacttcgaggagagcaagagctacgagatcatcgtggagggcatcgacaagggccagctgcccctgagcggccactgcagagtgatcgtggaggtggaggacaacaacgacaacgtgcccgacctggagttcaagagcctgagcctgcccatcagagaggacgcccccctgggcaccgtgatcgccctgatcagcgtgagcgacaaggacatgggcgtgaacggcctggtgacctgcagcctgaccagccacgtgcccttcaagctggtgagcaccttcaagaactactacagcctggtgctggacagcgccctggacagagagagcgtgagcgcctacgagctggtggtgaccgccagagacggcggcagccccagcctgtgggccaccgccagcgtgagcgtggaggtggccgacgtgaacgacaacgcccccgccttcgcccagcccgagtacaccgtgttcgtgaaggagaacaacccccccggctgccacatcttcaccgtgagcgcctgggacgccgacgcccaggagaacgccctggtgagctacagcctggtggagagaagagtgggcgagagagccctgagcagctacgtgagcgtgcacgccgagagcggcaaggtgtacgccctgcagcccctggaccacgaggagctggagctgctgcagttccaggtgaccgccagagacgccggcgtgccccccctgggcagcaacgtgaccctgcaggtgttcgtgctggacgagaacgacaacgcccccgccctgctggcccccagagccggcggcaccggcggcgccgtgagcgagctggtgccctggagcgtgggcgtgggccacgtggtggccaaggtgagagccgtggacgccgacagcggctacaacgcctggctgagctacgagctgcagcccggcaccggcggcgccagaatccccttcagagtgggcctgtacaccggcgagatcagcaccaccagagccctggacgagaccgacgcccccagacacagactgctggtgctggtgaaggaccacggcgagcccgccctgaccgccaccgccaccgtgctggtgagcctggtggagagcggccaggcccccaaggccagcagcagagccctggtgggcgccgtgggccccgacgccgccctggtggacgtgaacgtgtacctgatcatcgccatctgcgccgtgagcagcctgctggtgctgaccctgctgctgtacaccgccctgagatgcagcgccctgcccaccgagggcgcctgcgcccccggcaagcccaccctggtgtgcagcagcgccgtgggcagctggagctacagccagcagagaagacccagagtgtgcagcggcgagggcccccccaagaccgacctgatggccttcagccccagcctgcccgacagcagagacagagaggaccagctgcagaccaccgaggagagcttcgccaagcccagacagcccaaccccgactggagatacagcgccagcctgagagccggcatgcacagcagcgtgcacctggaggaggccggcatcctgagagccggccccggcggccccgaccagcagtggcccaccgtgagcagcgccacccccgagcccgaggccggcgaggtgagcccccccgtgggcgccggcgtgaacagcaacagctggaccttcaagtacggccccggcaaccccaagcagagcggccccgagcccaagaagcagacccaggtgagcttcctgctgagaagaaagggcgaggccagccagcccagacagtag

SEQ ID NO: 200401 - DNA, 2844 bp, Artificial Sequence
  derived and/or modified sequence
atggagttcagctggggcagcggccaggagagcagaagactgctgctgctgctgctgctgctggccgcctgggaggccggcaacggccagctgcactacagcgtgagcgaggaggccaagcacggcaccttcgtgggcagaatcgcccaggacctgggcctggagctggccgagctggtgcccagactgttcagagtggccagcaagggcagaggcggcctgctggaggtgaacctgcagaacggcatcctgttcgtgaacagcagaatcgacagagaggagctgtgcagaagaagcgccgagtgcagcatccacctggaggtgatcgtggacagacccctgcaggtgttccacgtggacgtggaggtgagagacatcaacgacaacccccccgtgttccccgccacccagaagaacctgagcatcgccgagagcagacccctggacagcagattccccctggagggcgccagcgacgccgacatcggcgagaacgccctgctgacctacagactgagccccaacgagtacttcagcctggagaagccccccgacgacgagctggtgaagggcctgggcctgatcctgagaaagagcctggacagagaggaggcccccgagatcttcctggtgctgaccgccaccgacggcggcaagcccgagctgaccggcaccgtgcagctgctgatcaccgtgctggacgccaacgacaacgcccccgccttcgacagaaccatctacaaggtgagactgctggagaacgtgcccaacggcaccctggtgatcaagctgaacgccagcgacctggacgagggcctgaacggcgacatcgtgtacagcttcagcaacgacatcagccccaacgtgaagagcaagttccacatcgaccccatcaccggccagatcatcgtgaagggctacatcgacttcgaggagagcaagagctacgagatcatcgtggagggcatcgacaagggccagctgcccctgagcggccactgcagagtgatcgtggaggtggaggacaacaacgacaacgtgcccgacctggagttcaagagcctgagcctgcccatcagagaggacgcccccctgggcaccgtgatcgccctgatcagcgtgagcgacaaggacatgggcgtgaacggcctggtgacctgcagcctgaccagccacgtgcccttcaagctggtgagcaccttcaagaactactacagcctggtgctggacagcgccctggacagagagagcgtgagcgcctacgagctggtggtgaccgccagagacggcggcagccccagcctgtgggccaccgccagcgtgagcgtggaggtggccgacgtgaacgacaacgcccccgccttcgcccagcccgagtacaccgtgttcgtgaaggagaacaacccccccggctgccacatcttcaccgtgagcgcctgggacgccgacgcccaggagaacgccctggtgagctacagcctggtggagagaagagtgggcgagagagccctgagcagctacgtgagcgtgcacgccgagagcggcaaggtgtacgccctgcagcccctggaccacgaggagctggagctgctgcagttccaggtgaccgccagagacgccggcgtgccccccctgggcagcaacgtgaccctgcaggtgttcgtgctggacgagaacgacaacgcccccgccctgctggcccccagagccggcggcaccggcggcgccgtgagcgagctggtgccctggagcgtgggcgtgggccacgtggtggccaaggtgagagccgtggacgccgacagcggctacaacgcctggctgagctacgagctgcagcccggcaccggcggcgccagaatccccttcagagtgggcctgtacaccggcgagatcagcaccaccagagccctggacgagaccgacgcccccagacacagactgctggtgctggtgaaggaccacggcgagcccgccctgaccgccaccgccaccgtgctggtgagcctggtggagagcggccaggcccccaaggccagcagcagagccctggtgggcgccgtgggccccgacgccgccctggtggacgtgaacgtgtacctgatcatcgccatctgcgccgtgagcagcctgctggtgctgaccctgctgctgtacaccgccctgagatgcagcgccctgcccaccgagggcgcctgcgcccccggcaagcccaccctggtgtgcagcagcgccgtgggcagctggagctacagccagcagagaagacccagagtgtgcagcggcgagggcccccccaagaccgacctgatggccttcagccccagcctgcccgacagcagagacagagaggaccagctgcagaccaccgaggagagcttcgccaagcccagacagcccaaccccgactggagatacagcgccagcctgagagccggcatgcacagcagcgtgcacctggaggaggccggcatcctgagagccggccccggcggccccgaccagcagtggcccaccgtgagcagcgccacccccgagcccgaggccggcgaggtgagcccccccgtgggcgccggcgtgaacagcaacagctggaccttcaagtacggccccggcaaccccaagcagagcggccccggcgagctgcccgacaagttcatcatccccggcagccccgccatcatcagcatcagacaggagcccaccaacagccagatcgacaagagcgacttcatcaccttcggcaagaaggaggagaccaagaagaagaagaagaagaagaagggcaacaagacccaggagaagaaggagaagggcaacagcaccaccgacaacagcgaccagtag

SEQ ID NO: 200402 - DNA, 2706 bp, Artificial Sequence
  derived and/or modified sequence
atggagttctcatggggctctggacaagaaagccgccgcctgctgctgctgctgttgttacttgccgcctgggaagccggcaatggccaactacactacagtgtgtcagaagaggctaaacatggaacatttgtcgggagaattgcacaggacctgggtttagaacttgctgagctagtgccgcgactgtttagggttgcctctaagggcaggggcgggctgctcgaggttaatttgcaaaacggcatcctgttcgtcaatagtaggattgaccgagaggaactttgtcgcaggagcgccgaatgctctatacacctggaggtgatcgtggacagacctctgcaggtgtttcatgtcgacgtcgaggtacgagatatcaatgacaatccaccagtgttccctgcaacccagaaaaacctcagtatcgctgagtcacggccgcttgattccagatttccgctagaaggggccagcgacgccgatatcggggagaatgctctgctcacctatcgcctgagcccgaatgaatacttttctttggagaaaccacccgatgatgaactggtgaaggggcttggcttaatcctgcggaagtctctagatagggaggaagccccagagattttcctggtcctcaccgccactgacggcgggaagcctgagttaactggaactgtgcaactgttaataacagtcctcgacgccaacgataatgcccctgcgttcgaccggaccatctataaggtccgtcttctggagaacgtgcccaatggtactctcgtgattaagctgaatgccagcgacctggatgagggactcaacggcgacatagtgtactcctttagtaacgacatttcccctaacgtgaagagcaagtttcacattgatccaatcacaggacagatcatcgtgaagggatacattgactttgaggagtctaagtcttacgagattattgtcgaaggaatcgataagggtcaactgccactgtctggacattgccgtgttattgtcgaagtggaggataacaacgacaatgtaccggacctggagttcaaaagcttaagtcttcccatacgtgaggatgctcctttgggcaccgtgatagcactgatctccgtgtccgataaggacatgggagtcaatggactggtgacctgtagtctcacctcccatgtcccctttaagttagtctcgaccttcaaaaactattactcacttgtgttagactccgctttggaccgcgagtctgtcagcgcctacgaattggtcgtgaccgcccgtgatggtggctccccatccctctgggccacagcctcagtgagtgttgaggttgccgatgtcaacgacaatgcaccagcctttgctcaacctgagtataccgtgttcgtcaaagagaataatcctcctggatgccatatttttacggtttccgcatgggacgccgacgctcaggaaaatgccctggtgtcatacagcctggtggaacggcgtgtgggggagcgcgcactgtcctcttacgtgtccgtacacgctgagtccgggaaggtctatgcactgcagccactggaccacgaagaactcgagctgctccagtttcaggtgaccgcaagggatgcaggtgttccgccattgggctctaatgttacactacaggtgttcgtgctggacgagaacgataatgctccggccctcctagcaccacgagcagggggtacaggtggagcagtatctgaactagtaccttggtctgttggagtcggccatgtggttgctaaggtgcgcgccgtggacgcagatagcggctacaatgcgtggctcagctatgaacttcagccgggcactggaggggccaggatcccctttagagtgggactatacacgggagagatctcgaccacgagagccctggatgagaccgatgcaccacggcatagattgctcgtcttggtgaaggaccatggcgaacctgctcttaccgccactgccacagtgcttgttagcctcgtggagagcgggcaagctcccaaggcctcaagtcgtgctctggtcggcgctgtcggcccagacgcagccctggtagacgtgaatgtgtatcttatcattgccatctgtgccgtctcgtctttgctcgttctgaccttgttgttgtatactgcacttaggtgttctgctctgccgacagaaggggcctgtgcccctggaaagcctaccctggtctgttcaagtgctgtgggaagttggagttattctcagcagagaaggccgagggtatgctcaggagagggtccacccaaaaccgatcttatggcttttagccccagtctccccgactcgcgcgaccgggaggaccagttacagactacagaagagtcctttgcaaaaccgcgccagcccaatccagactggaggtacagcgcctctctccgcgccggcatgcacagctctgttcacctggaagaggccggcatcttacgagccggccccggcgggcctgatcagcaatggcctacagtttccagcgctacacctgagcccgaggccggggaagtgtctccaccagtaggcgcgggtgtgaatagcaactcatggaccttcaagtatgggcctggtaatccaaaacaatccggtccagagcccaaaaagcagactcaggtttccttcctgctgagacgcaaaggagaggcctcacagcctcgccagtag

SEQ ID NO: 200403 - DNA, 2844 bp, Artificial Sequence
  derived and/or modified sequence
atggaattttcttggggctcagggcaagaaagtaggagacttttgcttcttttgctgctcctggccgcctgggaagccggaaatggacaattgcattatagcgtgtccgaggaagccaaacacggcaccttcgtaggaaggattgcgcaggatctgggcttggaactcgcagagctagtgcctcgactgttccgtgttgcttcaaaggggcgcggtggattgctggaggttaatcttcagaacgggatcctttttgttaactctaggatcgaccgtgaggagttgtgcagaaggagcgccgaatgctctatacatctggaagtgattgtggacaggcctttgcaagtctttcatgttgatgtagaagtgagggacattaatgataatcccccagtcttccccgcgacgcaaaagaatctgagtatcgctgaatcacgaccactcgactccaggttccccctggagggcgcctctgatgccgatatcggggaaaatgctctgcttacctaccgattgagtcccaatgagtacttcagcctcgagaaaccccccgacgatgaactggttaaaggattgggcctcattctcaggaagtctttggatagagaagaagctccagagattttcttggttttgaccgccaccgatggagggaagcccgagttaactggcacagtgcaactcctgatcacggttttagacgcaaatgacaacgcccctgcttttgacagaaccatttataaggtcaggctgcttgagaatgtgcccaacgggactctggttatcaagctgaatgcttcggatctagacgaaggcctgaatggcgacattgtttattctttttctaacgacatatcccccaatgtgaagtccaaattccacattgaccctattaccggccagatcatagtgaaggggtacattgactttgaggaaagcaagtcctatgaaattattgtcgagggaatagataaaggccagctgccattgtcggggcattgtcgtgttatcgtggaggttgaagacaataacgacaatgtcccagatcttgagttcaagtccctttctctacctatccgcgaagacgcccccctgggcaccgtcatcgccctcatctctgtgagcgataaggacatgggagtaaatggactggtcacctgctcactcaccagccacgtccccttcaaactggtgtcaacattcaaaaattactacagtctcgtgctcgatagcgctctagatagagagtcagtctctgcatacgaattggtcgtgacagcacgcgacggaggcagtcctagtctctgggccactgcttcagtttctgtggaggtggctgacgtgaatgacaacgcaccagcctttgctcagccagagtacacagtctttgtgaaggagaacaatcctccggggtgccacatcttcaccgtaagcgcttgggatgcggacgctcaggaaaatgcgcttgtgtcctattctctggttgaacgacgcgtgggcgaacgggcattatcttcctacgttagcgtgcacgccgagagcggtaaggtttacgccctgcagcctttggaccatgaagagctagaattgctccagtttcaggtcacagcgagggatgctggcgtcccacctcttggatccaatgttactctccaggttttcgttctggatgagaatgataatgcgcccgctctgttggcgcctagagcaggtgggaccgggggagctgtctcagagctcgttccatggagtgtgggagtgggccacgtagttgccaaagttagagccgtggacgccgatagtgggtacaacgcctggctctcttacgaattacaaccaggaaccgggggcgctaggatccctttcagggtggggctatacaccggtgagatctcgaccaccagagctttagatgaaacggacgcaccccgacatagactgttagtcctggtgaaagatcatggggagccagccttgacagcgacagctaccgtgttggtctctctagttgaatcaggtcaggcgcccaaagcatcatcccgggctcttgttggagctgtgggacccgatgcagccctcgtggacgtcaatgtttatctgatcatcgctatctgtgccgtttcttcgcttctcgtgcttacactgctgctatacaccgcactccgatgttcagcactgcctacagaaggcgcgtgcgctcccggcaaacccaccctcgtctgtagtagtgccgtcggctcatggagctactcccagcaacgcagacctcgggtctgcagcggagaggggccacccaaaacggatctgatggcattctctccaagcttaccagatagcagagatagggaagatcagctccaaactaccgaggagtcctttgctaaacctaggcagccaaaccccgactggcgctactcagccagcctgagggccgggatgcacagttccgtacatctggaggaggcaggtatcctacgagccggccccggggggcctgaccagcagtggcctaccgttagttcagctactccagaacctgaagctggggaggtgagtccacctgtgggagcaggcgtcaattccaacagttggaccttcaagtatggacctgggaatccaaagcagtccggtcctggcgaactcccagataagtttattatcccggggagccctgcaatcatctctattcgacaggagcccaccaattctcagatcgataagtctgacttcataacgttcggcaaaaaggaagagactaaaaagaaaaaaaaaaaaaagaagggcaacaaaacccaggaaaagaaagagaagggcaactcgaccacagataattcagaccaatag

SEQ ID NO: 200404 - DNA, 2706 bp, Artificial Sequence
  derived and/or modified sequence
atggagttctcctggggcagcggccaggagagccggcggctgctgctgctgctgctgctgctggccgcctgggaggccggaaatggccagctgcactacagcgtgtctgaggaggccaagcacggcacctttgtgggccgcatcgcccaggacctgggcctggagctggccgagctggtgcccaggctcttccgggtggccagcaagggccggggcggcctgctggaggtgaacctgcagaatggcatcctgtttgtgaacagcagaattgaccgggaggagctgtgcagaagatctgcagaatgttccatccacctggaggtgattgtggaccggcccctgcaggtgttccacgtggatgtggaggtgcgggacatcaatgacaacccccctgtgtttcctgccacccagaagaacctgagcattgctgagagccggcccctggacagccgcttccccctggagggcgccagtgatgctgacatcggggagaatgccctgctgacctaccgcctgagccccaatgagtacttcagcctggagaagcccccagatgatgagctggtgaagggcctgggcctcatcctgaggaagagcctggaccgggaggaggcccctgagatcttcctggtgctgacagccacagatggcggcaagccagagctgactggaacagtgcagctgctgatcaccgtgctggatgccaatgacaatgccccagcctttgacaggaccatctacaaggtgcggctgctggagaatgtgcccaacggcaccctggtgatcaagctgaatgccagtgacctggatgagggcctgaatggagacatcgtgtacagcttcagcaatgacatcagccccaacgtgaagagcaagttccacatcgaccccatcaccggccagatcatcgtgaagggctacatcgactttgaggagagcaagagctatgagatcatcgtggagggcatcgacaagggccagctgcccctgagcggccactgccgggtgattgtggaggtggaggacaacaatgacaacgtgcctgacctggagttcaagagcctgagcctgcccatcagagaagatgcccccctgggcaccgtgattgccctgatctctgtgtctgacaaggacatgggcgtgaatggcctggtgacctgcagcctgaccagccacgtgcccttcaagctggtgtccaccttcaagaactactacagcctggtgctggacagcgccctggaccgggagagcgtgtctgcctatgagctggtggtgacagccagagatggcggcagccccagcctgtgggccacagcctctgtgtctgtggaggtggctgatgtgaatgacaatgccccagcctttgcccagcctgagtacacagtgtttgtgaaggagaacaaccccccaggctgccacatcttcaccgtgtctgcctgggatgctgatgcccaggagaatgccctggtgtcctacagcctggtggagaggagagtgggggagcgggccctgagcagctatgtgtctgtgcacgccgagagcggcaaggtgtatgccctgcagcccctggaccacgaggagctggagctgctgcagttccaggtgacagccagagatgctggggtgccccccctgggcagcaatgtgaccctgcaggtgtttgtgctggatgaaaatgacaatgccccagccctgctggccccccgggccggcggcactggaggagctgtgtctgagctggtgccctggagcgtgggcgtgggccacgtggtggccaaggtgcgggctgtggatgctgacagcggctacaatgcctggctgtcctatgagctgcagcccggcactggaggagcccgcatccccttccgggtgggcctgtacaccggggagatcagcaccacccgggccctggatgaaacagatgcccccaggcaccggctgctggtgctggtgaaggaccacggggagcccgccctgacagccacagccaccgtgctggtgtccctggtggagagcggccaggcccccaaggccagcagccgggccctggtgggcgctgtgggcccagatgctgccctggtggatgtgaatgtgtacctgatcatcgccatctgtgctgtgagcagcctgctggtgctgaccctgctgctgtacacagccctgcgctgcagcgccctgcccacagagggcgcctgtgcccctgggaagcccaccctggtgtgcagcagcgctgtgggctcctggagctacagccagcagaggcggccccgggtgtgcagcggggagggcccccccaagacagacctgatggccttcagccccagcctgcctgacagccgggaccgggaggaccagctgcagaccacagaggagagctttgccaagccccggcagcccaacccagactggagatacagcgccagcctgcgggccggcatgcacagctctgtgcacctggaggaggccggcatcctgcgggccggccctgggggccctgaccagcagtggcccaccgtgtcctctgccaccccagagcctgaggccggggaggtgtccccacctgtgggcgccggcgtgaacagcaacagctggaccttcaagtatggccctggcaaccccaagcagagcggccctgagcccaagaagcagacccaggtgtccttcctgctgcggaggaaaggagaggccagccagccccggcagtag

SEQ ID NO: 200405 - DNA, 2844 bp, Artificial Sequence
  derived and/or modified sequence
atggagttctcctggggcagcggccaggagagccggcggctgctgctgctgctgctgctgctggccgcctgggaggccggaaatggccagctgcactacagcgtgtctgaggaggccaagcacggcacctttgtgggccgcatcgcccaggacctgggcctggagctggccgagctggtgcccaggctcttccgggtggccagcaagggccggggcggcctgctggaggtgaacctgcagaatggcatcctgtttgtgaacagcagaattgaccgggaggagctgtgcagaagatctgcagaatgttccatccacctggaggtgattgtggaccggcccctgcaggtgttccacgtggatgtggaggtgcgggacatcaatgacaacccccctgtgtttcctgccacccagaagaacctgagcattgctgagagccggcccctggacagccgcttccccctggagggcgccagtgatgctgacatcggggagaatgccctgctgacctaccgcctgagccccaatgagtacttcagcctggagaagcccccagatgatgagctggtgaagggcctgggcctcatcctgaggaagagcctggaccgggaggaggcccctgagatcttcctggtgctgacagccacagatggcggcaagccagagctgactggaacagtgcagctgctgatcaccgtgctggatgccaatgacaatgccccagcctttgacaggaccatctacaaggtgcggctgctggagaatgtgcccaacggcaccctggtgatcaagctgaatgccagtgacctggatgagggcctgaatggagacatcgtgtacagcttcagcaatgacatcagccccaacgtgaagagcaagttccacatcgaccccatcaccggccagatcatcgtgaagggctacatcgactttgaggagagcaagagctatgagatcatcgtggagggcatcgacaagggccagctgcccctgagcggccactgccgggtgattgtggaggtggaggacaacaatgacaacgtgcctgacctggagttcaagagcctgagcctgcccatcagagaagatgcccccctgggcaccgtgattgccctgatctctgtgtctgacaaggacatgggcgtgaatggcctggtgacctgcagcctgaccagccacgtgcccttcaagctggtgtccaccttcaagaactactacagcctggtgctggacagcgccctggaccgggagagcgtgtctgcctatgagctggtggtgacagccagagatggcggcagccccagcctgtgggccacagcctctgtgtctgtggaggtggctgatgtgaatgacaatgccccagcctttgcccagcctgagtacacagtgtttgtgaaggagaacaaccccccaggctgccacatcttcaccgtgtctgcctgggatgctgatgcccaggagaatgccctggtgtcctacagcctggtggagaggagagtgggggagcgggccctgagcagctatgtgtctgtgcacgccgagagcggcaaggtgtatgccctgcagcccctggaccacgaggagctggagctgctgcagttccaggtgacagccagagatgctggggtgccccccctgggcagcaatgtgaccctgcaggtgtttgtgctggatgaaaatgacaatgccccagccctgctggccccccgggccggcggcactggaggagctgtgtctgagctggtgccctggagcgtgggcgtgggccacgtggtggccaaggtgcgggctgtggatgctgacagcggctacaatgcctggctgtcctatgagctgcagcccggcactggaggagcccgcatccccttccgggtgggcctgtacaccggggagatcagcaccacccgggccctggatgaaacagatgcccccaggcaccggctgctggtgctggtgaaggaccacggggagcccgccctgacagccacagccaccgtgctggtgtccctggtggagagcggccaggcccccaaggccagcagccgggccctggtgggcgctgtgggcccagatgctgccctggtggatgtgaatgtgtacctgatcatcgccatctgtgctgtgagcagcctgctggtgctgaccctgctgctgtacacagccctgcgctgcagcgccctgcccacagagggcgcctgtgcccctgggaagcccaccctggtgtgcagcagcgctgtgggctcctggagctacagccagcagaggcggccccgggtgtgcagcggggagggcccccccaagacagacctgatggccttcagccccagcctgcctgacagccgggaccgggaggaccagctgcagaccacagaggagagctttgccaagccccggcagcccaacccagactggagatacagcgccagcctgcgggccggcatgcacagctctgtgcacctggaggaggccggcatcctgcgggccggccctgggggccctgaccagcagtggcccaccgtgtcctctgccaccccagagcctgaggccggggaggtgtccccacctgtgggcgccggcgtgaacagcaacagctggaccttcaagtatggccctggcaaccccaagcagagcggccctggagagctgcctgacaagttcatcatccctggcagccctgccatcatcagcatccggcaggagcccaccaacagccagattgacaagagtgacttcatcaccttcggcaagaaggaggagaccaagaagaagaagaagaagaagaagggcaacaagacccaggagaagaaggagaagggcaacagcaccacagacaacagcgaccagtag

SEQ ID NO: 200406 - DNA, 2706 bp, Artificial Sequence
  derived and/or modified sequence
atggagttcagctggggcagcggccaggagagccggcggctgctgctccttcttttactgctggctgcatgggaagccggaaatggacagctgcactactctgtgtctgaagaggcaaagcatgggactttcgtcggaagaattgcccaagacctcggactcgagcttgcagaactggtgccacggttatttcgtgtggcttctaaagggcggggcggcctgttagaggtgaacctccagaatgggatcctgtttgtaaactcgcggattgatcgggaggagctttgtcgtcgcagcgcagagtgcagcatccatctcgaggtgatcgtcgaccgaccactccaggtgtttcacgtagacgtggaggtgcgtgacattaatgataatcctcccgtcttccccgctacacaaaagaacctgagcattgctgaatcacgccctctggatagtcgttttcccctcgaaggggcgagcgatgctgacatcggagagaacgcactgctgacttaccggcttagtcctaacgagtattttagcctggagaagccccctgacgacgaacttgtgaaagggttaggccttatcctcaggaaatccctcgatcgggaggaggctccggagatcttccttgtcctgaccgctactgacggcgggaagcctgagctcactggaaccgttcaactactcattacagttctggacgccaatgacaacgccccagccttcgatcggaccatctacaaggtgcggttacttgagaacgtaccgaatggcaccctggtaattaaacttaatgcttctgacttagacgaagggcttaacggcgacatcgtgtactcattctccaacgacattagcccaaacgtcaaaagcaagttccatattgatccaatcaccggacagattattgtgaagggttacatcgacttcgaagagagtaagagttacgaaatcatcgttgaaggcatcgacaaaggacagctcccgctgtcaggacattgtcgggtcatcgtcgaggtagaggataacaacgataatgttcccgacttggagttcaagagcctatcactgcccatcagggaggatgcccccctcggaacagttatagcactgatcagcgtaagcgacaaggacatgggagtcaacggcctggtaacatgttcgctcacctcccacgtgcccttcaagcttgtgtccacttttaaaaactactatagtctggtcctggacagcgctcttgacagggagtctgtgagcgcttacgaactggtggttacggcacgagatggcggctctccgtctttgtgggcaactgcgtccgtgtctgtcgaagttgctgacgtgaacgacaacgcacccgcatttgctcagcccgagtatacggtttttgtgaaagaaaataatccccccggctgccatatattcacagtcagcgcatgggatgcggacgctcaggagaacgcattagtctcctattcactggtggagagacgcgtgggagaacgtgcactgtcctcatatgtctccgttcatgcagaatctggcaaggtttacgccctgcaaccactggaccacgaagagctcgagcttcttcaattccaggtgaccgcccgcgatgcgggtgtgccccctctggggtccaacgtaacacttcaggtttttgtgctggatgagaacgacaatgcccccgccctgctcgcccccagagcagggggtaccggcggggcagtctccgagctggtaccatggagcgttggggtggggcatgtcgtggccaaagtcagggccgtcgatgccgattcaggctataacgcttggctgtcctacgaattgcaaccagggactggcggagctcgtattccatttagagtcgggctctacactggtgagatttctacaactcgagctcttgacgaaaccgacgccccaagacaccgcctgcttgtgctggtgaaggaccatggcgagcctgcgctgaccgcaacagccacagttctggtctcgctggtagaatcagggcaggctccaaaagcaagcagccgcgcgctcgtcggcgccgtgggtcctgatgccgctctcgtcgatgtcaacgtgtatctcatcattgctatctgcgcggtgtcctcactgctggtgctaactctcttgctgtacaccgctttgcgttgcagcgctctccctaccgaaggggcctgcgctcctggcaagccaacactcgtctgttcaagtgcagttgggagctggagttactcccagcagagaaggccgcgagtgtgcagcggcgagggacctcccaaaaccgatctaatggctttctccccttccctgccagactccagagaccgcgaggaccaattgcagacaacggaggagtctttcgctaagccacggcagccaaatccagattggcgctatagcgcaagcctcagagctggcatgcactctagtgtgcacttggaggaggcgggaatactgcgggccgggcctggaggccctgatcagcagtggcccaccgtgtcttccgccacccctgaacccgaagcaggagaggtgagtcctccagtaggagccggagtgaacagcaatagctggacttttaagtatggaccaggcaaccctaagcagtccgggccagagcctaaaaagcagactcaggtcagctttttgttaagacgaaagggcgaagcaagtcagccccggcagtag

SEQ ID NO: 200407 - DNA, 2844 bp, Artificial Sequence
  derived and/or modified sequence
atggagttcagctggggcagcggccaggagagccggcggctgctgcttctcctccttctactggctgcatgggaagccggtaacggccagctgcattattcggtcagtgaggaggccaaacacggcacttttgttggccggatcgcgcaagatttgggccttgagcttgctgagctggttccacgtttgttcagagtcgctagcaagggccgaggcggcttgctggaggtcaacctccagaacgggatcctcttcgtgaattcacgcatcgatagagaggagttgtgtcgtaggagtgccgaatgctctattcatttagaagtaatcgtcgatcgccctctgcaagtctttcatgtcgatgtggaggtacgcgatatcaacgacaatccccccgtgttccctgccacacagaaaaatctctcaatagccgagtcgcgaccactggacagcaggtttccgctggagggtgcttcagacgctgacatcggtgagaatgccttgctgacgtacagactgtcccccaacgagtacttctccctcgaaaaaccgcccgacgacgaactggttaaaggcctaggcctcattttgcggaaatcattggaccgggaagaagctcctgagatcttcctggtgctgacagccacagatggaggaaagcccgaacttaccggcaccgtgcagctacttatcaccgtgctggatgcgaacgataatgctcccgctttcgacagaacgatttacaaagtaaggttactagaaaacgtgcccaatggaaccttggtgattaagctgaatgcctcagacctggatgaaggtctgaatggcgacatcgtgtatagcttctcaaacgacatttcacctaacgtgaagtccaagttccacattgatccaataacaggccagattatcgtgaagggctacatagattttgaagaatccaagtcctacgagattatcgtcgaaggaattgacaaggggcagctgccgcttagcggccattgtcgggtcattgtagaagtggaggataataacgacaatgttccagacctcgagtttaagagcctgtccctccctatccgggaagatgcccctctgggaactgtgattgccctcatctccgtctcggacaaagatatgggagtcaacgggctggttacatgtagcctgacctcacatgttccattcaaactcgtaagcaccttcaagaactattactccctagttctcgactccgccctggatcgagagagtgtgagcgcatatgagcttgtggtcacagctcgagacggcgggtccccttccttgtgggccactgcatcagtctcagtcgaagtggccgacgtcaacgacaacgctcccgccttcgcccagccagaatacacggtgttcgttaaggaaaacaacccacccggctgccatatttttacagtctctgcttgggatgccgatgctcaagagaatgccttggtctcttatagtttagtggaaaggcgtgtgggcgagcgcgcgctcagttcttacgtctcagtccatgcagaatcaggaaaggtatacgcactgcaacctcttgatcatgaggaactcgaactgctccagttccaggtgaccgccagggatgctggagtacctccattaggcagcaacgtgaccttgcaggtgttcgtgctcgacgagaatgataatgctccagcattgctggctccccgggccggtggcactggtggagctgtcagtgaactagtgccatggagcgtgggagttggacacgtcgtcgcaaaagtcagagcagttgacgccgatagcggatacaatgcatggctctcatacgaactgcagcctggaacagggggtgcccgcatcccgtttagagtgggactgtatacaggggagatctcaaccactagagcactggacgaaaccgacgccccacgacacagattgcttgtgctcgtcaaagatcacggggaacccgcactaaccgctaccgccacggtcttggtgagcctcgtggagtcagggcaggctcctaaagcgtcttccagagccctcgtgggcgctgttggtccagacgcagcccttgttgatgtgaatgtctatctgatcatcgccatatgtgcagtttcatctctgctcgtcctgaccctgctgctgtataccgcactgagatgttcggcattaccgaccgaaggcgcgtgtgcacccggcaagccaacactggtatgctcttcagccgtgggctcctggagctattcccagcagaggcggccccgggtctgctctggcgaagggcctccaaaaaccgatctcatggcattttcccccagtcttccggacagtcgggatcgagaagatcagctgcagacaaccgaggagagctttgcgaagccgcggcagcctaatccagactggcggtacagtgcctctctgcgcgctggaatgcactctagcgtgcatctggaagaggccgggatcctgagggccggtccgggaggtccagaccagcagtggcctaccgtgagctctgccacaccagagccggaagccggtgaggtgtcacctcctgtcggcgctggcgtaaactccaattcatggacctttaaatatggccccggtaacccaaaacaaagcggcccaggtgagctccccgataagtttatcataccaggatcccctgcgattatttccatcagacaggaaccaacaaattctcagattgacaaatccgatttcattacattcggcaagaaagaagagaccaagaagaaaaagaagaagaaaaagggtaacaagacacaagagaaaaaagagaagggaaatagtacaactgacaacagcgatcagtag

SEQ ID NO: 200408 - DNA, 4163 bp, Artificial Sequence
  derived and/or modified sequence
actctttggagtctgaaatatggaggatgcagctgcacttgactgaccgattaaaagatttcccttgactttgagaaacgatatttaatcagaacaaaatactgtgcactaaagatggagttttcctggggaagcggccaggaatcccggcgtctgctgctcttacttcttctcctcgcagcctgggaggcagggaacggtcagctccactactcggtctccgaggaggccaaacacggcaccttcgtgggccgcatcgcgcaggacctgggactggagctggcggagctggtgccgcgcctgttccgggtggcgtccaagggccgcggaggccttctggaggtaaatctgcagaatggcattttgtttgtgaattctcggatcgaccgggaggagctgtgccggcggagcgcggagtgcagcatccacctggaggtgatcgtagacaggccgctgcaggttttccatgtggacgtggaggtgagggacattaacgataacccgccggtgttcccagcaacacaaaagaacctgtccatcgcggaatccaggccgcttgactctcggtttccactagagggcgcctcggatgcagatatcggggagaacgccctgctcacttacagactgagcccaaatgaatacttttctctggaaaaaccacctgatgacgagctggtaaaaggtcttgggcttatattacggaaatctttagacagagaagaagctccggagatttttttagtgctcacagccactgatggaggcaaacccgagttgactggcaccgttcagttactcatcacagtactggatgccaatgacaatgccccagcttttgacagaaccatttataaggtgagattactagaaaatgttcctaatggaacattggtaattaaacttaacgcctcagatttagacgaaggattgaatggggacattgtttattcattctcaaatgatatttcgccaaatgtgaaatccaagtttcacatagatccaattactggacaaattattgtaaagggatatattgactttgaagaaagcaaatcctatgaaattattgtagagggcattgataagggacagctcccactttctggccattgtagagttattgtggaagtagaagacaacaacgataatgtcccagatttggaattcaagtctttatcacttccaattagagaggacgctccactgggtacagtcatcgccctgatcagcgtgtccgacaaagacatgggtgtcaatgggctggtcacctgctccttgacgtcccacgtccccttcaagctggtgtccaccttcaagaattactactcgttggtgctggacagtgccctggaccgcgagagcgtgtcagcctatgagctggtggtgaccgcgcgagacgggggctcgccttcgctgtgggccacggccagtgtttctgtggaggtggctgatgtgaacgacaacgctccggcgttcgcgcagcccgagtacacagtgttcgtgaaggagaacaacccgccgggctgccacatcttcactgtgtctgcgtgggacgcggacgcgcaggagaacgcgctggtgtcctactcgctggtagagcggcgggtaggggagcgcgcgctgtcgagctacgtttcggtgcatgcggagagcggcaaggtgtacgcgctgcagccgctggaccacgaggagctagagctgctgcagtttcaggtgaccgctcgcgatgccggcgtgccacctctgggcagcaacgtgacgctgcaggtgttcgtgctggacgaaaacgacaacgcgccagcactgctagcgcctcgggcgggtggcactggtggcgcagtgagcgagctggtgccatggtcggtgggtgtgggccacgtggtggcaaaggtgcgcgcggtggatgctgactcgggctacaacgcgtggctttcgtacgagctgcagccggggactggtggcgcgcgcatcccgttccgcgtggggctgtacactggcgagatcagcacaacgcgtgccctggacgaaacggacgctccgcgccaccgcctactggtactggtgaaggaccacggcgagcccgcgctgacggccacggccactgtgctggtgtcacttgtggagagtggacaggcgccaaaggcctcctcacgggcgttggtgggcgctgtgggtcccgatgctgcgctggtggatgtcaacgtatacctgatcattgccatctgcgcggtgtccagccttttggtgctcacgctgctgctgtacaccgcgctgcggtgctctgcgctgcccaccgagggcgcgtgcgctccgggcaagcccacgctggtgtgctccagtgcggtggggagctggtcatactcgcagcagaggaggccgagggtgtgctctggtgagggcccacccaagaccgacctcatggccttcagccccagtttacctgactctagggacagagaagatcagctgcagacaactgaggaatcctttgcaaagccacgacagcccaaccctgactggcgttactctgcctccctgagagcaggcatgcacagctctgtgcacctagaggaggctggcattctacgggctggtccaggagggcctgatcagcagtggccaacagtatccagtgcaacaccagaaccagaggcaggagaagtgtcccctccagtcggtgcgggtgtcaacagcaacagctggacctttaaatacggaccaggcaaccccaaacaatccggtcccgaacctaaaaagcagacccaagtttcctttctcctccgccgcaaaggagaggcttcccagccccgccagtgagaggttggactctctgccctgtgctccggggatcctgtcttgatgacacttgcagggcaggctgaaaagttttgagattgagcagcttgggagtttgtggccactgggtatgtgtggctaccgcgggtatgcgagtgccagatattggctgagacgagccagcttagactaattggtacaaggaaggcaagaaaacaaagacaaataaacagcggaagttatcagtatggaggggaagtgtaaacttaaagggaccagactttctaaatcttacaactcaagaggtggcagccaccctctaggagacaaaactacccccactgacaaggctttaggagaccctaaagtctgttggctgtgacgtcattatacctaaaatctgcatcatacctgcaagccaacagttcagtgttttaacagagaaccaccctgggaaacagaagcagatctgatgtgtttcctatacatgtcctgtgctcactttattaaaaattcttttgcacacaatgtttatgaaaaggccagatccttttccaatacttatgcaaaagcaaaagaaaaccccgacacctcacctttcgctgtttgttgtttcatagatttatttaaaaaaagagaaagtctatagctataaatctttaaagagaaatatgaatacaattcccctaaactctcctcaaaagagaattcagtctacagccatttaaatgatcattgctgctacagaagtgctttaagagaattgcctgaaacatctgtattatatcggccacctgccaatcacagctttactctttcaggtcactctggggctgcctcttgcatgtattactaaataaaatgatctctctttctctctctctctctcttttctaagaaacaattatgtgcactttgatacacaaccttctctaaccaactatatatcaagacccaaaaattgaagaaaaatattgttttctcatacagtgagcagatttttcaatctactaattctgtgacttgtcttggtgtgctagcctacaccttctctttggtttagttttccttttctataacactctgaattgctaatcttactaacacctatgatgttacctgaaatcaatctcccatatgtatgctgtatgctatgctaagactcctgaaatatacttactctgtgcttgtgtatgtgaatgttaatgcaactattacctagagtgaactttaagctttattgttgaatgtaattccattatatttccttttgtacacctgtgaaaaagtggagtagtgtttttttaaccattgttaatcagcttttgtgtatgaaagacacagtaaaatttctttcttaaatc

SEQ ID NO: 200409 - DNA, 5251 bp, Artificial Sequence
  derived and/or modified sequence
atggagttttcctggggaagcggccaggaatcccggcgtctgctgctcttacttcttctcctcgcagcctgggaggcagggaacggtcagctccactactcggtctccgaggaggccaaacacggcaccttcgtgggccgcatcgcgcaggacctgggactggagctggcggagctggtgccgcgcctgttccgggtggcgtccaagggccgcggaggccttctggaggtaaatctgcagaatggcattttgtttgtgaattctcggatcgaccgggaggagctgtgccggcggagcgcggagtgcagcatccacctggaggtgatcgtagacaggccgctgcaggttttccatgtggacgtggaggtgagggacattaacgataacccgccggtgttcccagcaacacaaaagaacctgtccatcgcggaatccaggccgcttgactctcggtttccactagagggcgcctcggatgcagatatcggggagaacgccctgctcacttacagactgagcccaaatgaatacttttctctggaaaaaccacctgatgacgagctggtaaaaggtcttgggcttatattacggaaatctttagacagagaagaagctccggagatttttttagtgctcacagccactgatggaggcaaacccgagttgactggcaccgttcagttactcatcacagtactggatgccaatgacaatgccccagcttttgacagaaccatttataaggtgagattactagaaaatgttcctaatggaacattggtaattaaacttaacgcctcagatttagacgaaggattgaatggggacattgtttattcattctcaaatgatatttcgccaaatgtgaaatccaagtttcacatagatccaattactggacaaattattgtaaagggatatattgactttgaagaaagcaaatcctatgaaattattgtagagggcattgataagggacagctcccactttctggccattgtagagttattgtggaagtagaagacaacaacgataatgtcccagatttggaattcaagtctttatcacttccaattagagaggacgctccactgggtacagtcatcgccctgatcagcgtgtccgacaaagacatgggtgtcaatgggctggtcacctgctccttgacgtcccacgtccccttcaagctggtgtccaccttcaagaattactactcgttggtgctggacagtgccctggaccgcgagagcgtgtcagcctatgagctggtggtgaccgcgcgagacgggggctcgccttcgctgtgggccacggccagtgtttctgtggaggtggctgatgtgaacgacaacgctccggcgttcgcgcagcccgagtacacagtgttcgtgaaggagaacaacccgccgggctgccacatcttcactgtgtctgcgtgggacgcggacgcgcaggagaacgcgctggtgtcctactcgctggtagagcggcgggtaggggagcgcgcgctgtcgagctacgtttcggtgcatgcggagagcggcaaggtgtacgcgctgcagccgctggaccacgaggagctagagctgctgcagtttcaggtgaccgctcgcgatgccggcgtgccacctctgggcagcaacgtgacgctgcaggtgttcgtgctggacgaaaacgacaacgcgccagcactgctagcgcctcgggcgggtggcactggtggcgcagtgagcgagctggtgccatggtcggtgggtgtgggccacgtggtggcaaaggtgcgcgcggtggatgctgactcgggctacaacgcgtggctttcgtacgagctgcagccggggactggtggcgcgcgcatcccgttccgcgtggggctgtacactggcgagatcagcacaacgcgtgccctggacgaaacggacgctccgcgccaccgcctactggtactggtgaaggaccacggcgagcccgcgctgacggccacggccactgtgctggtgtcacttgtggagagtggacaggcgccaaaggcctcctcacgggcgttggtgggcgctgtgggtcccgatgctgcgctggtggatgtcaacgtatacctgatcattgccatctgcgcggtgtccagccttttggtgctcacgctgctgctgtacaccgcgctgcggtgctctgcgctgcccaccgagggcgcgtgcgctccgggcaagcccacgctggtgtgctccagtgcggtggggagctggtcatactcgcagcagaggaggccgagggtgtgctctggtgagggcccacccaagaccgacctcatggccttcagccccagtttacctgactctagggacagagaagatcagctgcagacaactgaggaatcctttgcaaagccacgacagcccaaccctgactggcgttactctgcctccctgagagcaggcatgcacagctctgtgcacctagaggaggctggcattctacgggctggtccaggagggcctgatcagcagtggccaacagtatccagtgcaacaccagaaccagaggcaggagaagtgtcccctccagtcggtgcgggtgtcaacagcaacagctggacctttaaatacggaccaggcaaccccaaacaatccggtcccggtgagttgcccgacaaattcattatcccaggatctcctgcaatcatctccatccggcaggagcctactaacagccaaattgacaaaagtgacttcataaccttcggcaaaaaggaggagaccaagaaaaagaagaaaaagaagaagggtaacaagacccaggagaaaaaagagaaagggaacagcacgactgacaacagtgaccagtgaggtcctcaaatggaaacaagccacttagccagtttttgtaataatggcaaatctctcccatgtagcaattccctgctcctttttcctatctacatgagccctcttagagacctcagaaatctgcagaaagttccctgtgtctgtctagaacgcatttaacaggttttgtcgtaaaagctttactaagtctggtgttaactctttctctccactctggcttgttttcagaacctaaaaagcagacccaagtttcctttctcctccgccgcaaaggagaggcttcccagccccgccagtgagaggttggactctctgccctgtgctccggggatcctgtcttgatgacacttgcagggcaggctgaaaagttttgagattgagcagcttgggagtttgtggccactgggtatgtgtggctaccgcgggtatgcgagtgccagatattggctgagacgagccagcttagactaattggtacaaggaaggcaagaaaacaaagacaaataaacagcggaagttatcagtatggaggggaagtgtaaacttaaagggaccagactttctaaatcttacaactcaagaggtggcagccaccctctaggagacaaaactacccccactgacaaggctttaggagaccctaaagtctgttggctgtgacgtcattatacctaaaatctgcatcatacctgcaagccaacagttcagtgttttaacagagaaccaccctgggaaacagaagcagatctgatgtgtttcctatacatgtcctgtgctcactttattaaaaattcttttgcacacaatgtttatgaaaaggccagatccttttccaatacttatgcaaaagcaaaagaaaaccccgacacctcacctttcgctgtttgttgtttcatagatttatttaaaaaaagagaaagtctatagctataaatctttaaagagaaatatgaatacaattcccctaaactctcctcaaaagagaattcagtctacagccatttaaatgatcattgctgctacagaagtgctttaagagaattgcctgaaacatctgtattatatcggccacctgccaatcacagctttactctttcaggtcactctggggctgcctcttgcatgtattactaaataaaatgatctctctttctctctctctctctcttttctaagaaacaattatgtgcactttgatacacaaccttctctaaccaactatatatcaagacccaaaaattgaagaaaaatattgttttctcatacagtgagcagatttttcaatctactaattctgtgacttgtcttggtgtgctagcctacaccttctctttggtttagttttccttttctataacactctgaattgctaatcttactaacacctatgatgttacctgaaatcaatctcccatatgtatgctgtatgctatgctaagactcctgaaatatacttactctgtgcttgtgtatgtgaatgttaatgcaactattacctagagtgaactttaagctttattgttgaatgtaattccattatatttccttttgtacacctgtgaaaaagtggagtagtgtttttttaaccattgttaatcagcttttgtgtatgaaagacacagtaaaatttctttcttaaatcaagatactggtgattcaaggaattttatttatggtccagccaagagccatctcgtgccaagacttctgctggcaagggaatggataaagctgttttgttctagtaacaattttggaatgaatactgacaatattccatgagggtgtgcaagcacaaattttaccaatctgacctctttgaagttgcagaatgctttgaaattctaatggtatctgaaatatcagctcatagaaagtaacaaaatttgctgtcaccttaaataagacattttaattttgttataatgtacaatttagaagtttgattaattatattatctatttaggcattaatataaaagaggtaggagtctgttatttaaaaaaagcattaaatttaaaaaaaaactgtcttgtctacttttagcttcattctcccatattttgaagggtgtgtaacttcagctctgcaggattgcatggggtaaaacttgttaccaacacatgtgaaccattgctacattgtaggttgtgatcattttgccccactgaagcccatgtatctgaccttacgtgccttttgaactaggagaatcgggctaatttattaatgatgataattataatgtatctgtacagcactttttacatttgcgaagtgctttccaatccatgttagttactagttattacagctgtaaggataaaacacgtcatgtggattcattttgaattggtgctattggtatttcctctgttattgctaataaatgaaaatggtggtatg

SEQ ID NO: 200410 - DNA, 2706 bp, Artificial Sequence
  derived and/or modified sequence
atggagttctcctggggctcaggccaggaatcacgaaggttgttactgctgttgctgcttctggcggcatgggaggccggaaacggacagcttcattactctgtttctgaagaggccaagcatgggacttttgttggaaggatcgcacaggacttaggcctggaactagccgaactcgttcctcgtctgtttagggttgcgagtaaagggaggggcggacttctcgaagttaacctgcaaaatgggatcctcttcgtgaattcccgcatagatcgagaagagctgtgtagacgctcagccgagtgcagcattcatctcgaggtaatcgtagatagaccacttcaagtattccacgtggacgtggaggtgcgcgatatcaacgataatccccctgtctttcccgcaacacagaagaacttgtctattgcagagtcaaggcccctagactcccggttccctttagagggtgcgtccgacgccgatatcggcgagaacgctttgcttacctatcgtctctcccccaatgagtatttcagcttggagaaaccccctgacgacgagcttgtgaaaggtctgggcctgatcttaagaaaatctctcgatcgcgaggaggcacccgagatcttcctcgtgctgaccgcaactgacgggggaaaacccgaactcaccggcactgttcagctgcttataacggtcctcgacgcaaatgacaacgccccagcatttgaccgaaccatttacaaagtaaggctgttggagaatgtgcccaatggcaccttggtgatcaagctgaatgcatctgacctagatgagggtctgaatggagacattgtttatagttttagcaatgatatctctcccaatgtgaagagtaagttccatattgaccccatcacaggacagatcatagtaaaaggctatatagacttcgaggagtcaaagagctatgagatcatagtggagggtattgataagggccagcttccattgagcggccactgtagggttattgtagaggtggaggataacaacgacaatgtgccagacctagagtttaagtcattgagtctacctattcgggaagacgctcctttaggcaccgtgatcgctctcatctccgtgtctgacaaggatatgggcgtgaatggcctggtgacatgcagcctcacctcacatgtgcctttcaagttggttagcacttttaagaactattactcattggtcctcgacagtgctctcgaccgcgagagtgtgtccgcatacgagttggttgtgaccgctagagacggtggttccccaagcctctgggccacagcctctgtatcagttgaagtggctgatgtcaatgacaatgcgcctgccttcgcccagcctgagtacacggtctttgttaaggaaaacaatccccctggctgccatattttcaccgtatcggcttgggatgccgacgcccaagaaaacgctctcgtttcttatagtcttgtggagcgacgggtgggggagcgcgcactgagctcatatgtatccgttcacgctgagtccggtaaggtgtacgccttacagcctctggatcatgaagagctggaactgcttcagtttcaggtgacggccagggatgcaggagtcccgcctctggggagtaatgtgaccctgcaggtcttcgtcctcgacgagaacgacaatgctcctgccctgcttgcccctcgtgcgggaggcactggcggtgctgttagtgaactagttccatggtcggtgggagtgggacacgtcgtggccaaggtccgagcagtcgacgcggatagtggatataatgcttggcttagctacgaactgcaaccaggcactggcggagcaaggatcccctttagagtgggactgtacaccggagagattagtaccacaagagccttagatgagacagacgcacctcggcaccgactcttggtcctggtgaaggaccatggagaacccgctctcactgcaacagccaccgtccttgttagcctggtggaatccgggcaggctcccaaagcaagtagtagggctttagtgggcgctgtgggtccagatgcagccttagtggacgttaacgtatatctgattatcgccatttgtgcggtgtcttctctgttggtgctcacccttttactctataccgcactccgctgctctgcactcccgacagagggggcatgtgctcccggaaagccaaccctggtctgctccagcgccgttgggtcctggtcttatagtcaacagcgcaggcctagggtgtgtagcggggaagggccacccaaaacagatctaatggccttttccccgtctctgcccgactcccgcgatagggaagatcagcttcagacaaccgaggaaagttttgcgaaacccaggcaaccaaaccccgactggcgctacagcgcttcactccgcgcagggatgcactccagcgtacacttagaggaggctgggattctgagagcgggtcccggtggacccgatcagcaatggcctaccgtttcaagcgcgacaccagagccggaggccggagaggtgagtcccccagtgggcgcaggcgttaactccaactcctggacatttaaatatggccctgggaatccgaaacagagcggcccagagccaaagaagcaaacccaggtgagcttcctgcttaggcgaaagggtgaagcttctcagccccgtcaatag

SEQ ID NO: 200411 - DNA, 2844 bp, Artificial Sequence
  derived and/or modified sequence
atggaatttagctggggctccggtcaggagtccaggaggttactcctattgttgcttctcctggccgcttgggaagccggaaacgggcagcttcactattctgtctccgaggaagccaaacacggtaccttcgtggggcgaatcgcacaagacctgggcctggaactggccgagttagtgccacggcttttccgcgtggcatcgaaagggcgtggaggtctgctcgaagtaaatctgcaaaacggtattctatttgtgaactcacgcatcgatcgcgaagagctgtgtagacgatctgccgaatgcagtatacacctggaggtgatcgtggaccgtccactgcaggttttccacgtggatgtggaagtgcgcgatatcaatgacaatccacccgtttttccagccacccagaagaatctctccatcgctgaatcaaggcctctggactctcgctttcccctggagggggcatcagatgccgacattggggaaaacgcgcttctaacctacagactgtccccaaatgaatattttagcttggaaaagcctccagacgacgaattggtgaaaggtctggggctcattctgcgaaaaagcctcgaccgggaggaggcccctgaaattttcctggtcctgaccgcaacagacggagggaagccggaacttactggcacagtgcaactcttgatcaccgtcctggacgcaaatgacaacgcgccagctttcgatcgaacaatctataaagttaggttgctcgagaatgtgccaaacgggacgctcgtcatcaaactcaatgccagcgacttagatgagggcctgaatggggacatcgtgtactcattcagtaatgacatcagtcccaatgtgaaatccaagtttcatatcgatccaataacaggccagatcattgtgaaggggtatatcgactttgaagagagtaaaagctacgagataatcgtagaaggtattgataagggccagcttcccctttccgggcactgtcgcgtgattgtggaggtggaggataataacgataatgtgcccgatctggagttcaagtcgctgagcctccccatccgcgaggatgcacctcttggcactgtcatcgctctgatttctgtgtcagataaggacatgggggtgaatggccttgttacttgtagccttacttcacatgttcccttcaagttagtctcaacctttaagaattattattctctcgtgctggactctgcactggatagagagtcagtgtcagcatacgagctcgtggtcacagccagagatggtgggagcccttccctttgggcaaccgccagcgtcagcgtggaagtagccgatgtgaatgataatgcccctgcttttgcacagccagaatacaccgttttcgtaaaggaaaacaacccaccaggctgccatatcttcacagtgagtgcctgggacgccgacgcacaggaaaatgcgctggttagctactccctcgtggagcgcagggtgggggagcgcgcactgagttcctatgtcagtgtgcatgccgagagcgggaaggtgtacgctctccaacccctcgatcacgaggagctggagctgctgcagtttcaggtcacagcaagagacgcaggcgtgccacctcttgggagtaatgttacattacaggtcttcgtcctcgatgagaacgacaatgctccagcgctgcttgcccctcgtgctggtggaaccggaggggcagttagcgagctcgttccttggtctgtcggcgttgggcacgtggtcgcaaaagttcgggcagtggacgccgacagtggatacaatgcctggctcagctacgagctgcaacctggaacaggaggcgcaagaatccccttccgcgttgggctctacaccggggagataagcaccacaagagccttggatgaaaccgatgcgccacgtcatcgcttgctggtattagttaaagaccatggagaacctgccctcaccgccaccgccacagtgttggtttccttggtagagtccggacaggcccctaaggcttccagcagggccttggtgggggctgtcggtcccgatgccgcattagttgacgttaatgtgtacctaatcatcgccatttgcgccgtgtcaagcctgctggtgctgacgttgttgctctacacagcactgaggtgtagtgctttacccaccgagggagcgtgcgcgcctgggaaaccaactctggtgtgttcctctgctgtcgggagctggagttacagtcagcagcgtcggcctcgcgtctgttctggagaaggaccacctaaaacagatttgatggccttctcgccatctcttcccgatagcagggatcgggaggaccaactgcagactacagaggaatcgttcgccaagccaaggcagcctaaccccgattggaggtactccgcttcactcagggcagggatgcatagttctgttcatcttgaggaggctggaattctccgggctggccctggcggacctgaccaacagtggcctactgtatcttctgctacgcccgaacccgaagctggtgaggtctctcctcccgtgggtgccggagttaattcgaattcttggacatttaaatacggcccaggaaatccgaaacagtccggccctggcgaactacctgataagttcatcatccccggttctcctgccattatatccatcagacaggaaccgaccaacagccagatcgacaagtctgatttcatcacatttggcaaaaaggaagaaacaaagaagaagaaaaaaaagaaaaaaggcaataaaacccaagaaaaaaaggaaaaagggaactccaccacggacaactcggaccagtag

SEQ ID NO: 200412 - protein, 950 aa, Artificial Sequence
  derived and/or modified sequence
MVFTPEDRLGKQCLLLPLLLLAAWKVGSGQLHYSVPEEAKHGTFVGRIAQDLGLELAELVPRLFRMASKDREDLLEVNLQNGILFVNSRIDREELCGRSAECSIHLEVIVDRPLQVFHVDVEVRDINDNPPLFPVEEQRVLIYESRLPDSVFPLEGASDADVGSNSILTYKLSSSEYFGLDVKINSDDNKQIGLLLKKSLDREEAPAHNLFLTATDGGKPELTGTVQLLVTVLDVNDNAPTFEQSEYEVRIFENADNGTTVIRLNASDRDEGANGAISYSFNSLVAAMVIDHFSIDRNTGEIVIRGNLDFEQENLYKILIDATDKGHPPMAGHCTVLVRILDKNDNVPEIALTSLSLPVREDAQFGTVIALISVNDLDSGANGQVNCSLTPHVPFKLVSTFKNYYSLVLDSALDRESVSAYELVVTARDGGSPSLWATASLSVEVADMNDNAPAFAQPEYTVFVKENNPPGCHIFTVSARDADAQENALVSYSLVERRVGERALSSYISVHAESGKVYALQPLDHEELELLQFQVSARDAGVPPLGSNVTLQVFVLDENDNAPALLAPRVGGTGGAVSELVPRSLGAGQVVAKVRAVDADSGYNAWLSYELQPPASSARFPFRVGLYTGEISTTRVLDEADSPRHRLLVLVKDHGEPALTATATVLVSLVESGQAPKASSRASVGAAGPEAALVDVNVYLIIAICAVSSLLVLTLLLYTALRCSAPPTEGACTADKPTLVCSSAVGSWSYSQQRRQRVCSGEGPPKMDLMAFSPSLSPCPIMMGKAENQDLNEDHDAKPRQPNPDWRYSASLRAGMHSSVHLEEAGILRAGPGGPDQQWPTVSSATPEPEAGEVSPPVGAGVNSNSWTFKYGPGNPKQSGPGELPDKFIIPGSPAIISIRQEPTNSQIDKSDFITFGKKEETKKKKKKKKGNKTQEKKEKGNSTTDNSDQ

SEQ ID NO: 200413 - DNA, 2853 bp, Artificial Sequence
  derived and/or modified sequence
atggtcttcaccccggaggaccgcctgggtaaacagtgtcttttactcccacttcttctcttagcggcgtggaaggtggggagtggccagctgcattacagcgtacctgaagaggcaaagcatgggactttcgtgggccggatcgctcaagatttaggtctggaactcgcagagctggttccacggctctttcgcatggcgagtaaggacagagaagacctgcttgaagtcaatctgcagaacggaatcttgtttgtcaactctcggatagaccgagaggagctgtgtgggaggtcagctgagtgctctatccatctggaggttatcgtcgatcgccctctccaggtttttcatgtagatgtggaggtgagagacatcaacgacaatcccccactctttccagtggaggaacagagggtgctgatctacgagagccgactcccagattccgtctttccacttgagggcgctagcgacgcagatgttggctctaattccatcttaacatataagctgtcttcgtctgaatacttcggcctggacgtcaagataaacagtgatgacaacaagcaaatcggactgctcctcaagaagtcattggaccgcgaggaggccccggcccacaatctattcctcaccgccaccgatggtgggaagccggaattaactggcacagtgcaactgctggtcaccgtcctcgatgtgaacgacaacgctcctacatttgagcaaagcgagtatgaggtcagaatctttgagaacgccgataacggcaccacagtgattcgcctcaatgcctctgatcgcgacgagggggccaatggagccatctcctattcttttaattcactagtcgccgccatggtgattgatcatttctctattgatagaaacacaggtgaaattgtgatcagaggcaaccttgattttgagcaggaaaatttgtataaaatcctcattgacgccacagataaaggccaccctcctatggccggtcactgcaccgtccttgtgcgtatattagataagaatgataacgtacccgaaatcgcgctgacatccttgtctctccccgtccgcgaagacgcccaatttggtaccgttatcgccctgatcagtgtgaacgacttggactcaggagcaaatggacaggttaactgttcgctgactcctcacgtgccattcaaactggtcagcacttttaaaaactattatagtttggtgctggacagtgctctggaccgcgagtctgttagtgcatacgagctcgtggtgacagccagagacggcgggtctccaagcctttgggccacagcttcattgtccgttgaagtggcagacatgaacgataacgcacctgcatttgcacagccagagtacactgtttttgttaaagaaaataacccccccgggtgtcatatcttcaccgtgtcggctcgcgacgccgacgcccaagaaaacgccctggtatcttattctctggtggagcgcagagttggggaacgggctctgagctcctacatttccgtgcacgctgaaagcggaaaagtgtacgcacttcagccccttgaccacgaggaactagagcttctccagttccaggtcagcgccagggatgccggcgtccctccgttaggaagtaacgttactctccaggttttcgtcttggatgagaatgacaatgcccccgccctgcttgccccacgggtcggtggtactggcggggccgtgtctgaactggtaccgaggtcactgggagcaggacaggtcgtggccaaagtgagggcagtcgatgctgactctgggtataatgcatggttaagttatgaactccaacctccagcgagcagcgccaggttcccctttcgggtgggactttacaccggcgaaatcagtactaccagggtgctggatgaagccgactcacctcgtcatcgactccttgtgctggtgaaggatcacggcgaacccgccctgacggccaccgcaactgttttggtgagcctcgtcgaatctggacaagcaccaaaagcatcgtcacgggctagcgttggagcagccgggccagaggcagctctggtggatgttaacgtgtacttgattatagcgatctgtgccgtgtcatctctcctcgtcctgaccctgcttctttacacagctctgcggtgcagcgcgccaccaacggagggggcttgtacagccgacaaacctacgttagtgtgtagttccgccgtgggcagttggtcctactcccagcagcgccggcagcgggtttgcagcggggaagggccccccaagatggaccttatggctttcagtccctctttaagcccatgtccaatcatgatgggcaaggcggagaaccaggatctcaacgaagaccatgatgccaagcccagacaacctaatcccgactggagatactcagcttcactgcgggctggtatgcacagttccgtgcatttggaggaagcaggcattctgagagccggaccaggcgggccagaccaacaatggcctaccgtgagctcagctacaccagagccagaagctggcgaagtgtcccctccagtgggcgcgggggtgaacagcaatagctggaccttcaagtatggacccggtaatccaaaacagtctggccccggggagcttccagacaaattcattattcctggcagccctgcaatcatatctatccgacaggaaccaacgaattctcagatagacaaatctgacttcatcacctttgggaaaaaggaagaaacaaagaagaagaagaagaaaaagaaggggaacaaaacacaggaaaagaaagagaagggcaactccactaccgataattctgatcaatag

SEQ ID NO: 200414 - DNA, 2853 bp, Artificial Sequence
  derived and/or modified sequence
atggtgttcaccccagaggaccggctgggcaagcagtgcctgctgctgcccctgctgctgctggccgcctggaaggtgggcagcggccagctgcactacagcgtgcctgaggaggccaagcacggcacctttgtgggccgcatcgcccaggacctgggcctggagctggccgagctggtgcccaggctcttcaggatggccagcaaggaccgggaggacctgctggaggtgaacctgcagaatggcatcctgtttgtgaacagcagaattgaccgggaggagctgtgtggccgctctgcagaatgttccatccacctggaggtgattgtggaccggcccctgcaggtgttccacgtggatgtggaggtgcgggacatcaatgacaaccccccactcttccctgtggaggagcagagggtgctgatctatgagagccggctgcctgacagcgtcttccccctggagggcgccagtgatgctgatgtgggcagcaacagcatcctgacctacaagctgagcagcagcgagtacttcggcctggatgtgaagatcaacagtgatgacaacaagcagatcggcctgctgctgaagaagagcctggaccgggaggaggccccagcccacaacctcttcctgacagccacagatggcggcaagccagagctgactggaacagtgcagctgctggtgacagtgctggatgtgaatgacaatgcccccacctttgagcagagtgaatatgaggtgcgcatctttgaaaatgctgacaatggcaccaccgtcatccggctgaatgccagtgacagagatgagggcgccaacggggccatctcctacagcttcaacagcctggtggccgccatggtgattgaccacttcagcattgacagaaatactggagagatcgtcatccggggcaacctggactttgagcaggagaacctgtacaagatcctgattgatgccacagacaagggccacccccccatggccggccactgcaccgtgctggtgcgcatcctggacaagaatgacaacgtgcctgagatcgccctgaccagcctgagcctgcctgtgagagaagatgcccagtttggaacagtgattgccctgatctctgtgaatgacctggacagcggggccaacggccaggtgaactgcagcctgaccccccacgtgcccttcaagctggtgtccaccttcaagaactactacagcctggtgctggacagcgccctggaccgggagagcgtgtctgcctatgagctggtggtgacagccagagatggcggcagccccagcctgtgggccacagccagcctgtctgtggaggtggccgacatgaatgacaatgccccagcctttgcccagcctgagtacacagtgtttgtgaaggagaacaaccccccaggctgccacatcttcaccgtgtctgccagagatgctgatgcccaggagaatgccctggtgtcctacagcctggtggagaggagagtgggggagcgggccctgagcagctacatctctgtgcacgccgagagcggcaaggtgtatgccctgcagcccctggaccacgaggagctggagctgctgcagttccaggtgtctgccagagatgctggggtgccccccctgggcagcaatgtgaccctgcaggtgtttgtgctggatgaaaatgacaatgccccagccctgctggccccccgggtgggcggcactggaggagctgtgtctgagctggtgcccaggagcctgggcgccggccaggtggtggccaaggtgcgggctgtggatgctgacagcggctacaatgcctggctgtcctatgagctgcagcccccagccagcagcgcccgcttccccttccgggtgggcctgtacaccggggagatcagcaccaccagggtgctggatgaggccgacagccccaggcaccggctgctggtgctggtgaaggaccacggggagcccgccctgacagccacagccaccgtgctggtgtccctggtggagagcggccaggcccccaaggccagcagccgggcctctgtgggcgctgctggccctgaggccgccctggtggatgtgaatgtgtacctgatcatcgccatctgtgctgtgagcagcctgctggtgctgaccctgctgctgtacacagccctgcgctgcagcgccccacccacagagggcgcctgcacagctgacaagcccaccctggtgtgcagcagcgctgtgggctcctggagctacagccagcagaggcggcagagggtgtgcagcggggagggcccccccaagatggacctgatggccttcagccccagcctgagcccctgccccatcatgatgggcaaggccgagaaccaggacctgaatgaagatcatgatgccaagccccggcagcccaacccagactggagatacagcgccagcctgcgggccggcatgcacagctctgtgcacctggaggaggccggcatcctgcgggccggccctgggggccctgaccagcagtggcccaccgtgagcagcgccaccccagagcctgaggccggggaggtgagcccccctgtgggcgctggggtgaacagcaacagctggaccttcaagtatggccctggcaaccccaagcagagcggccctggagagctgcctgacaagttcatcatccctggcagccctgccatcatcagcatccggcaggagcccaccaacagccagattgacaagagtgacttcatcaccttcggcaagaaggaggagaccaagaagaagaagaagaagaagaagggcaacaagacccaggagaagaaggagaagggcaacagcaccacagacaacagcgaccagtag

SEQ ID NO: 200415 - DNA, 2853 bp, Artificial Sequence
  derived and/or modified sequence
atggtgttcacccccgaggaccggctgggcaagcagtgcctgctgctaccactgttgcttctggcagcctggaaagtgggctctggccagctgcactactccgtgccagaggaggcgaaacatggtacttttgtagggaggatcgcgcaggacctcggactggagctcgcagagttggtcccccggctgtttaggatggcttctaaagaccgcgaggatctgttagaggtcaatcttcagaacggcattttgtttgtcaactcacgcattgatagagaggagttgtgcggtcggagtgccgagtgctccatccatttggaggtcatagttgatcggcccctccaggtgtttcatgttgacgtggaggttcgtgacatcaatgataacccacccctgttcccggtcgaagagcagagagtgctcatctatgagtccaggctgccagacagcgtctttccattggaaggagcttccgacgcggacgtcggcagcaattcgatcctgacttacaaattatcttccagcgagtacttcggacttgatgtgaaaataaactccgacgataataaacagatcgggctcctgttgaaaaaaagcctcgacagggaggaggcacctgcccataacctgtttctcactgccacagacggaggtaaaccagaacttacagggactgtgcagctactggtgacagtgctcgacgtgaacgataacgccccaacatttgagcagtccgagtacgaagtcagaatcttcgagaacgccgacaacggtaccaccgtgatcaggcttaatgcgtccgaccgggacgaaggagccaacggcgccatctcttatagcttcaattccctagtagccgcaatggtgatagaccacttcagtattgaccggaacacaggtgagattgtcatcagaggtaacctcgattttgagcaggagaatttgtacaagatcctgatagatgccacagataagggccacccccccatggctggccattgtacggttctggtgcggattctcgacaaaaatgacaacgtgccggagatcgccctgacttccctgagcttaccagttagagaagacgcacagtttggcactgtcattgccctgattagcgtgaatgatttagattcaggcgcaaacggtcaggtcaactgttcactgacacctcacgtgcccttcaaactagtgtctacctttaagaattactacagtctggtgctcgattccgctctggatcgggagagcgtgagcgcgtatgagcttgttgtgacagcacgggatggaggatccccatccctgtgggcaaccgcatcccttagcgttgaggtggctgacatgaacgataatgctccggcatttgctcagccggaatacaccgttttcgtgaaggagaacaaccctccaggatgtcacatcttcacggtttctgccagggacgccgatgctcaggagaatgcgctcgttagctattcactcgtggagcgccgggtgggcgagcgtgccttgagctcttatataagcgtgcatgctgagagtggcaaggtttacgccctccagccactggaccatgaggaacttgagctcctgcagttccaggttagcgcacgagatgccggtgtccctccactggggagtaacgtgaccttacaggtttttgtccttgacgagaacgacaacgcaccagctctactggcaccacgcgttggaggcacgggtggagccgtgagcgagctggtcccacgttccctgggcgccggccaggtagttgctaaggtccgagccgtcgacgccgattctggttataatgcctggctgagctacgagctgcagcctccagcctcttctgcacgattcccgtttcgggttggtctgtataccggcgaaatctcaacaacccgggtgcttgatgaggctgattcaccgcgccacagacttctcgttctagtgaaagaccatggcgaacctgccctgaccgctaccgccaccgttctcgtgagcctggtggagagcggtcaggctcccaaagcctcgtcacgcgcaagtgtaggcgcagctggacccgaggctgcgctggtggatgtaaatgtttatcttatcatagctatttgtgccgtgtcatccctgctcgttttgacgctgctactctatactgcattaaggtgctcagccccacccacagaaggggcatgcacggcggacaagcccactctcgtatgttcatcagccgttgggagctggagctacagccagcagcgccgacagcgcgtctgcagtggagaggggccgcccaaaatggatttaatggctttttcaccttcattatccccatgtcccataatgatggggaaggccgaaaatcaggaccttaacgaggaccatgacgccaagcctcgtcagcctaacccagactggaggtacagcgcttccttacgcgctgggatgcactcttccgtccaccttgaggaggccggaattctgagagcaggccctggtggacccgaccaacagtggcccaccgtgagttcagccactcccgaaccagaggccggtgaggtatcccctcctgtgggggccggggtcaactcaaattcctggactttcaagtacggtcccggcaatcccaaacaatctggcccaggcgagctgccggacaaatttatcattcctggctcacccgctatcatcagcattcgccaggagccaacgaatagccagatagacaaatccgacttcattaccttcgggaagaaggaagaaacaaaaaagaagaaaaagaagaagaagggcaataagacacaagaaaagaaggaaaaggggaacagtacaactgacaactcagaccagtag

SEQ ID NO: 200416 - DNA, 2853 bp, Artificial Sequence
  derived and/or modified sequence
atggtgttcacgcccgaggatagactggggaaacagtgcctgctcctgccgttgctactactcgccgcttggaaggtgggctcaggccagctacactattctgtgcctgaggaggccaaacatgggactttcgtgggcaggattgctcaggaccttggactggaactggcggagctcgtccctaggctttttagaatggccagtaaggacagagaggacctccttgaggtgaacctccagaatggtattctctttgttaacagtagaatcgatcgagaagaactgtgtgggagatctgcagagtgttctatccatttggaggtcattgtagataggccactgcaggttttccacgtagatgtcgaggtgcgcgatatcaacgacaacccacctctgttccccgtggaagaacagcgggtgctgatctatgagtcccgattgcctgacagtgtctttcctctggagggcgcttccgatgccgacgtggggtcgaacagcattctgacttataaactaagtagtagcgagtatttcgggctcgatgtgaagattaactccgatgataacaagcagattggtttgctattgaagaagtccttggatcgcgaggaagccccagctcacaacctcttcctgactgctacggacggaggcaagccggagttgactgggactgtccaactgttggtcactgtgctggatgtaaatgacaacgcccctacctttgagcagtctgaatacgaagtgaggatatttgaaaacgccgacaacgggactaccgtaataaggctgaatgctagcgacagggacgaaggggcaaacggtgcaattagttatagttttaatagcttggttgccgctatggttattgatcacttctctattgaccggaacactggtgagatagtgataagagggaatctagattttgaacaggaaaatctgtataagattctgatcgatgctacagataaaggtcacccacccatggccggacactgcactgttctggtgcggatactggacaagaatgataacgtgcctgagatagctttgactagtctgtccttacccgtgagggaggatgcacagtttggcacagttatcgctctgatttcagtgaatgatctggacagcggagccaatggtcaagtgaactgcagtctgaccccgcatgtaccgttcaaactcgtttccaccttcaaaaattactactctctggtgcttgatagcgccctcgaccgcgaaagcgtgtcagcctacgagctggttgtgaccgccagagacggagggtcacccagtctgtgggccacagccagtcttagcgtggaggttgcggacatgaacgataacgctccagcattcgcccaaccggagtatacagtgtttgtaaaagagaataatccaccgggttgccatatctttacagtgtccgccagggacgccgatgcgcaggagaacgccctggtgagttatagccttgtggagagaagagtcggtgaacgggcactgtccagttacatttctgttcacgccgaatccgggaaggtctacgccctgcaaccactggatcacgaggagttggaactgcttcagttccaggtgagcgccagagacgctggggtgcctcctctggggtcaaatgtgaccctccaggtatttgtgctggatgagaatgataacgcaccagcgctgctcgcacccagggtggggggaaccgggggtgccgtgagcgaactcgtgccgaggtccctgggagcaggccaggttgtggctaaagtgcgcgcagttgacgcagatagcgggtacaacgcctggctgtcctacgaacttcaaccccctgctagtagcgctcggtttccattcagggtgggcttgtataccggggagatttctacaactcgcgtcctcgatgaggctgacagccctaggcaccgcttgctggtgcttgtgaaagaccacggcgagccagcattaactgcaaccgcgaccgtgctggtgtctttggtggaatctgggcaggcccctaaggcctcgtctagggcctctgtaggggctgcaggtccagaagctgctctggtcgatgtgaacgtctatctaataattgcaatctgtgccgtttcctctttactggtgctgacccttctgctgtataccgccttaaggtgttccgcgccaccgacggaaggtgcgtgcactgccgataaacccacactggtctgttcttctgctgtggggtcctggtcatattcacaacagaggcggcagcgggtgtgcagcggtgaagggccaccaaagatggacctcatggccttctcaccctcgctaagcccctgcccaatcatgatgggtaaggctgagaatcaggaccttaatgaagatcacgatgcaaagcccaggcaacccaatcctgattggaggtattccgcctccttacgcgctgggatgcactcctccgtccacttggaggaagcagggatcctaagagcagggcctggagggcctgaccaacagtggcccaccgtctccagcgccacacccgagccagaagcgggagaagtgagcccaccagtgggagctggcgttaatagcaattcatggacattcaagtatggtcccggaaatccaaagcaaagcgggcctggtgaactccctgacaagtttataatcccaggatcgccagccatcattagcattagacaggagcctactaacagtcagattgacaagagcgattttatcacatttggcaaaaaagaagagacaaagaagaagaaaaaaaaaaagaagggtaacaaaacacaggagaaaaaagaaaaaggaaacagtactactgacaatagcgatcagtag

SEQ ID NO: 200417 - DNA, 5374 bp, Artificial Sequence
  derived and/or modified sequence
gactgttgaatgatggcggacgcagaagaaatggattaataaattccggaacatacagtattttatctttatgcggaagatcttctaatggaaataaaaccagaggtatttgacatggtgtttaccccggaggatagattgggaaagcaatgtctgctcctcccgcttctgctcctcgcagcctggaaggtggggagcggccagctccactactccgtacccgaggaggccaaacacggcaccttcgtgggccggatcgcgcaggacctggggctggagctggcggagctggtgccgcgcctgttcaggatggcctccaaagaccgcgaggaccttctggaggtaaatctgcagaatggcattttgtttgtgaattctcggatcgaccgcgaggagctgtgcgggcggagcgcggagtgcagcatccacctggaggtgatcgtggacaggccgctgcaggttttccatgtggacgtggaggtgagggacattaacgacaacccgcccttgttcccggtagaggaacaaagagtgctgatttacgaatctaggctgccagattctgtgtttccactggagggcgcgtccgatgcagatgttggctcaaattccatcttaacctataaactcagttctagcgaatacttcgggctagatgtgaaaataaacagtgatgacaataaacaaattgggctcttattaaagaaatccttggacagagaggaagctcctgcacacaacttattcctgacagccacagatgggggcaaacctgagctcacaggcactgttcagctgctggtcacagtgctggatgtgaatgataatgctcccactttcgaacagtctgaatacgaagtaagaatattcgaaaatgcagacaacggaacaacagttatcagactgaatgcttctgatcgggatgaaggagcgaatggggcaatttcatattcttttaatagccttgttgcagccatggttattgaccactttagcatagatcgaaatacgggagaaatagtgattcggggtaatttggattttgaacaagaaaacttatacaaaatcctcattgacgccacggacaaaggccatcctcccatggcgggtcattgcaccgttttagtgagaattttggataaaaatgataacgtccctgagatagcactgacttccttatccttgcctgtacgtgaagacgctcaatttggtactgtcatcgccctaattagcgtgaacgacctcgattcaggtgccaacgggcaggtgaactgctcgctgacgcctcacgtccctttcaagctggtgtccaccttcaagaattactactcgttggtgctggacagtgccctggaccgcgagagcgtgtcggcctatgagttggtggtaaccgcgcgggacgggggctcgccttcgctgtgggccaccgccagcttgtctgtggaggtggccgacatgaatgacaatgctccggcgttcgcgcagcccgagtacacagtgttcgtgaaggagaacaacccgccgggctgccacatcttcacggtgtctgcgcgagacgcggacgcgcaggagaacgcgctggtgtcctactcgctggtggagcggcgggtgggcgagcgcgcgttgtcgagctacatttcggtgcacgcggagagcggcaaggtgtacgcgctgcagccgctggaccacgaggagctagagctgctgcagtttcaggtgagcgcgcgcgacgcgggcgtgccgcctctgggcagcaacgtgacgctgcaggtgttcgtgctggacgagaacgacaacgcgccggcgctgctggcgcctcgggtgggtggtactggtggtgcagtgagcgagctggtgccgcggtcactgggtgcaggccaagtggtggcgaaggtgcgcgcagttgacgccgactcaggctacaacgcgtggctttcgtatgagctgcagcccccggcaagcagcgctcgcttcccgtttcgcgtggggctgtacacgggcgagatcagcaccactcgtgtcctggacgaagcggactctccgcgccaccggctgctggtgctggtgaaagaccacggtgagccggcgctgacagcgacggccacggttctggtgtcgctggtggagagtggccaggctccaaaggcgtcatcacgggcgtcggtgggcgccgcgggcccagaggcggcgctggtggatgtcaacgtgtacctgatcatcgccatctgcgcggtatccagcctgctggtcctcacgctactgctgtacacagcgctgcggtgctcggcgccacccaccgagggcgcgtgcacggcggacaagcccacgctggtgtgctccagcgcagtggggagctggtcgtactcgcagcagaggcggcagagggtgtgctccggggagggcccacccaagatggatctcatggcctttagccccagcctttcaccttgtcctattatgatgggtaaggcggagaatcaggatttaaatgaagatcatgatgccaaaccacgacagcccaaccctgactggcgttactctgcctccctgagagcaggcatgcacagctctgtgcacctagaggaggctggcattctacgggctggtccaggagggcctgatcagcagtggccaacagtatccagtgcaacaccagaaccagaggcaggagaagtgtcccctccagtcggtgcgggtgtcaacagcaacagctggacctttaaatacggaccaggcaaccccaaacaatccggtcccggtgagttgcccgacaaattcattatcccaggatctcctgcaatcatctccatccggcaggagcctactaacagccaaattgacaaaagtgacttcataaccttcggcaaaaaggaggagaccaagaaaaagaagaaaaagaagaagggtaacaagacccaggagaaaaaagagaaagggaacagcacgactgacaacagtgaccagtgaggtcctcaaatggaaacaagccacttagccagtttttgtaataatggcaaatctctcccatgtagcaattccctgctcctttttcctatctacatgagccctcttagagacctcagaaatctgcagaaagttccctgtgtctgtctagaacgcatttaacaggttttgtcgtaaaagctttactaagtctggtgttaactctttctctccactctggcttgttttcagaacctaaaaagcagacccaagtttcctttctcctccgccgcaaaggagaggcttcccagccccgccagtgagaggttggactctctgccctgtgctccggggatcctgtcttgatgacacttgcagggcaggctgaaaagttttgagattgagcagcttgggagtttgtggccactgggtatgtgtggctaccgcgggtatgcgagtgccagatattggctgagacgagccagcttagactaattggtacaaggaaggcaagaaaacaaagacaaataaacagcggaagttatcagtatggaggggaagtgtaaacttaaagggaccagactttctaaatcttacaactcaagaggtggcagccaccctctaggagacaaaactacccccactgacaaggctttaggagaccctaaagtctgttggctgtgacgtcattatacctaaaatctgcatcatacctgcaagccaacagttcagtgttttaacagagaaccaccctgggaaacagaagcagatctgatgtgtttcctatacatgtcctgtgctcactttattaaaaattcttttgcacacaatgtttatgaaaaggccagatccttttccaatacttatgcaaaagcaaaagaaaaccccgacacctcacctttcgctgtttgttgtttcatagatttatttaaaaaaagagaaagtctatagctataaatctttaaagagaaatatgaatacaattcccctaaactctcctcaaaagagaattcagtctacagccatttaaatgatcattgctgctacagaagtgctttaagagaattgcctgaaacatctgtattatatcggccacctgccaatcacagctttactctttcaggtcactctggggctgcctcttgcatgtattactaaataaaatgatctctctttctctctctctctctcttttctaagaaacaattatgtgcactttgatacacaaccttctctaaccaactatatatcaagacccaaaaattgaagaaaaatattgttttctcatacagtgagcagatttttcaatctactaattctgtgacttgtcttggtgtgctagcctacaccttctctttggtttagttttccttttctataacactctgaattgctaatcttactaacacctatgatgttacctgaaatcaatctcccatatgtatgctgtatgctatgctaagactcctgaaatatacttactctgtgcttgtgtatgtgaatgttaatgcaactattacctagagtgaactttaagctttattgttgaatgtaattccattatatttccttttgtacacctgtgaaaaagtggagtagtgtttttttaaccattgttaatcagcttttgtgtatgaaagacacagtaaaatttctttcttaaatcaagatactggtgattcaaggaattttatttatggtccagccaagagccatctcgtgccaagacttctgctggcaagggaatggataaagctgttttgttctagtaacaattttggaatgaatactgacaatattccatgagggtgtgcaagcacaaattttaccaatctgacctctttgaagttgcagaatgctttgaaattctaatggtatctgaaatatcagctcatagaaagtaacaaaatttgctgtcaccttaaataagacattttaattttgttataatgtacaatttagaagtttgattaattatattatctatttaggcattaatataaaagaggtaggagtctgttatttaaaaaaagcattaaatttaaaaaaaaactgtcttgtctacttttagcttcattctcccatattttgaagggtgtgtaacttcagctctgcaggattgcatggggtaaaacttgttaccaacacatgtgaaccattgctacattgtaggttgtgatcattttgccccactgaagcccatgtatctgaccttacgtgccttttgaactaggagaatcgggctaatttattaatgatgataattataatgtatctgtacagcactttttacatttgcgaagtgctttccaatccatgttagttactagttattacagctgtaaggataaaacacgtcatgtggattcattttgaattggtgctattggtatttcctctgttattgctaataaatgaaaatggtggtatg

SEQ ID NO: 200418 - DNA, 2853 bp, Artificial Sequence
  derived and/or modified sequence
atggtgttcacccccgaggacagactgggcaagcagtgcctgctgctgcccctgctgctgctggccgcctggaaggtgggcagcggccagctgcactacagcgtgcccgaggaggccaagcacggcaccttcgtgggcagaatcgcccaggacctgggcctggagctggccgagctggtgcccagactgttcagaatggccagcaaggacagagaggacctgctggaggtgaacctgcagaacggcatcctgttcgtgaacagcagaatcgacagagaggagctgtgcggcagaagcgccgagtgcagcatccacctggaggtgatcgtggacagacccctgcaggtgttccacgtggacgtggaggtgagagacatcaacgacaacccccccctgttccccgtggaggagcagagagtgctgatctacgagagcagactgcccgacagcgtgttccccctggagggcgccagcgacgccgacgtgggcagcaacagcatcctgacctacaagctgagcagcagcgagtacttcggcctggacgtgaagatcaacagcgacgacaacaagcagatcggcctgctgctgaagaagagcctggacagagaggaggcccccgcccacaacctgttcctgaccgccaccgacggcggcaagcccgagctgaccggcaccgtgcagctgctggtgaccgtgctggacgtgaacgacaacgcccccaccttcgagcagagcgagtacgaggtgagaatcttcgagaacgccgacaacggcaccaccgtgatcagactgaacgccagcgacagagacgagggcgccaacggcgccatcagctacagcttcaacagcctggtggccgccatggtgatcgaccacttcagcatcgacagaaacaccggcgagatcgtgatcagaggcaacctggacttcgagcaggagaacctgtacaagatcctgatcgacgccaccgacaagggccacccccccatggccggccactgcaccgtgctggtgagaatcctggacaagaacgacaacgtgcccgagatcgccctgaccagcctgagcctgcccgtgagagaggacgcccagttcggcaccgtgatcgccctgatcagcgtgaacgacctggacagcggcgccaacggccaggtgaactgcagcctgaccccccacgtgcccttcaagctggtgagcaccttcaagaactactacagcctggtgctggacagcgccctggacagagagagcgtgagcgcctacgagctggtggtgaccgccagagacggcggcagccccagcctgtgggccaccgccagcctgagcgtggaggtggccgacatgaacgacaacgcccccgccttcgcccagcccgagtacaccgtgttcgtgaaggagaacaacccccccggctgccacatcttcaccgtgagcgccagagacgccgacgcccaggagaacgccctggtgagctacagcctggtggagagaagagtgggcgagagagccctgagcagctacatcagcgtgcacgccgagagcggcaaggtgtacgccctgcagcccctggaccacgaggagctggagctgctgcagttccaggtgagcgccagagacgccggcgtgccccccctgggcagcaacgtgaccctgcaggtgttcgtgctggacgagaacgacaacgcccccgccctgctggcccccagagtgggcggcaccggcggcgccgtgagcgagctggtgcccagaagcctgggcgccggccaggtggtggccaaggtgagagccgtggacgccgacagcggctacaacgcctggctgagctacgagctgcagccccccgccagcagcgccagattccccttcagagtgggcctgtacaccggcgagatcagcaccaccagagtgctggacgaggccgacagccccagacacagactgctggtgctggtgaaggaccacggcgagcccgccctgaccgccaccgccaccgtgctggtgagcctggtggagagcggccaggcccccaaggccagcagcagagccagcgtgggcgccgccggccccgaggccgccctggtggacgtgaacgtgtacctgatcatcgccatctgcgccgtgagcagcctgctggtgctgaccctgctgctgtacaccgccctgagatgcagcgccccccccaccgagggcgcctgcaccgccgacaagcccaccctggtgtgcagcagcgccgtgggcagctggagctacagccagcagagaagacagagagtgtgcagcggcgagggcccccccaagatggacctgatggccttcagccccagcctgagcccctgccccatcatgatgggcaaggccgagaaccaggacctgaacgaggaccacgacgccaagcccagacagcccaaccccgactggagatacagcgccagcctgagagccggcatgcacagcagcgtgcacctggaggaggccggcatcctgagagccggccccggcggccccgaccagcagtggcccaccgtgagcagcgccacccccgagcccgaggccggcgaggtgagcccccccgtgggcgccggcgtgaacagcaacagctggaccttcaagtacggccccggcaaccccaagcagagcggccccggcgagctgcccgacaagttcatcatccccggcagccccgccatcatcagcatcagacaggagcccaccaacagccagatcgacaagagcgacttcatcaccttcggcaagaaggaggagaccaagaagaagaagaagaagaagaagggcaacaagacccaggagaagaaggagaagggcaacagcaccaccgacaacagcgaccagtag

SEQ ID NO: 200419 - protein, 935 aa, Artificial Sequence
  derived and/or modified sequence
MANRLQRGDRSRLLLLLCIFLGTLRGFRARQIRYSVPEETEKGSFVGNISKDLGLEPRELAKRGVRIVSRGKTQLFAVNPRSGSLITAGRIDREELCETVSSCFLNMELLVEDTLKIYGVEVEIIDINDNAPSFQEDEVEIKVSEHAIPGARFALPNARDPDVGVNSLQSYQLSPNNYFSLQLRGRTDGAKNPELVLEGSLDREKEAAHLLLLTALDGGDPIRKGAVPIRVVVLDVNDHIPMFTQSVYRVSVPENISSGTRVLMVNATDPDEGINGEVMYSFRNMESKASEIFQLDSQTGEVQVRGSLDFEKYRFYEMEIQGQDGGGLFTTTTMLITVVDVNDNAPEITITSSINSILENSPPGTVIALLNVQDQDSGENGQVSCFIPNHLPFKLEKTYGNYYKLITSRVLDRELVQSYNITLTATDQGSPPLSAETHVWLNVADDNDNPPVFPHSSYSAYIPENNPRGASIFSVTALDPDSKQNALVTYSLTDDTVQGVPLSSYVSINSNTGVLYALQSFDYEQFRDLELRVIARDSGDPPLSSNVSLSLFVLDQNDNAPEILYPALPTDGSTGVELAPRSAEPGYLVTKVVAVDKDSGQNAWLSYRLLKASEPGLFAVGEHTGEVRTARALLDRDALKQSLVVAVQDHGQPPLSATVTLTVAVADSIPEVLADLGSLESLANSETSDLSLYLVVAVAAVSCIFLVFVIVLLALRLWRWHKSRLLQASEGGLAGMPTSHFVGVDGVQAFLQTYSHEVSLIADSQKSHLIFPQPNYGDTLISQESCEKSEPLLIAEDSAIILGKCDPTSNQQAPPNTDWRFSQAQRPGTSGSQNGDDTGTWPNNQFDTEMLQAMILASASEAADGSSTLGGGAGTMGLSARYGPQFTLQHVPDYRQNVYIPGSNATLTNAAGKRDGKAPAGGNGNKKKSGKKEKK

SEQ ID NO: 200420 - DNA, 2808 bp, Artificial Sequence
  derived and/or modified sequence
atggcaaatcgtctgcagcggggcgatcggagtaggcttctcctcctgttatgcatcttcctgggaaccctacgggggtttcgtgctcggcagatacggtactctgtgcccgaagagaccgagaagggcagcttcgttggtaatatcagcaaggacctcggactggaaccccgcgaactggccaaaaggggggttaggatagttagccggggcaagacgcaactgtttgctgtgaacccaagaagcggaagcctgatcactgctggcaggattgatcgcgaagaactctgtgagacagtttcatcatgttttcttaacatggagttgcttgtcgaagataccctgaaaatatatggtgtggaagtggaaataatagacatcaatgataacgcccccagcttccaggaagacgaagttgaaattaaggtgagcgaacatgccataccgggtgcccggttcgccctacccaacgcgagagatcctgacgtcggtgtgaacagtctgcaatcctaccagctgagccccaacaactatttcagtctgcagctgcgcggaagaacagatggcgccaagaatccagagttggtccttgaagggagtctggatcgagaaaaggaagcggctcacctcctgctgctgactgccctggacggaggagatccgatccggaagggcgccgttcccatccgggtagttgtacttgatgtcaacgaccatattcctatgttcacccagtcagtgtaccgcgtttccgtacctgagaacatcagctccggcacccgcgtgctcatggtgaacgcaactgacccggacgaagggatcaatggtgaggtgatgtactcctttaggaatatggagagcaaagctagcgaaatcttccagctcgactcacagaccggtgaggttcaggtgcgaggatcacttgacttcgagaaatacaggttttacgagatggagatccagggacaggacggtgggggcctgttcacaacaacgacaatgctaatcactgttgtggatgtcaacgacaacgcgcccgagatcactatcaccagttctatcaattctattttagagaatagccccccgggaaccgtgatagccctgctcaacgtgcaggaccaagactccggcgagaacgggcaagtctcatgttttattccaaatcacctgccgttcaagttggagaagacttacggcaactactacaaattgatcacttctcgggttcttgatcgggagttggtgcagtcgtacaatattacgctcacagccacagatcaggggagcccccctctgtcagctgagacccacgtgtggttgaatgtggcggatgacaacgacaatccgccggtgtttccccattcctcctattcagcatatatccctgagaataacccaaggggggctagcattttttcagtgacggctctagacccagactctaagcaaaatgcattggtaacatattctctcaccgatgacacagttcagggggttcctctttcatcctacgtgtcaataaactccaacactggtgtgttgtacgcactacaatccttcgactatgaacaatttagagacctggagttgcgcgtgatcgcccgggatagtggcgaccctcctctgagcagcaatgtgagtctgtcactcttcgtgcttgatcagaatgataacgcccctgagattctctatcctgccctccccaccgatggtagtaccggcgtcgagcttgccccccggtctgcggagccaggctatttagtgactaaggtggtcgcggtggacaaagacagcggacagaacgcatggttgtcctacaggctactcaaggcctccgagccgggcctatttgccgtgggagagcacacaggagaggtaagaactgcaagggccctattggaccgagatgctctgaaacagtccctggtggtggccgtgcaagaccacggtcaacccccgttgtcggcaacggtgactctcaccgtggcagttgcagattctattcccgaggtgctcgcagacttgggatccctcgagtctcttgctaactcggagacatccgacctgtcactgtacctagtggtcgccgtcgctgctgtctcttgtatctttctcgtctttgtaatcgtgcttcttgctctcagactgtggcgctggcacaagtcgcgtctgctacaggccagcgaagggggcctcgcggggatgcctaccagtcattttgtgggcgtggacggcgtgcaggcattcctgcagacttattcacacgaggtaagtctgattgcagattcgcagaagtctcatcttatttttccgcagcccaactacggagatacgctcattagccaggaaagttgcgagaagtcggaaccactcctgatagccgaggactcagccattatccttggaaaatgcgaccccacaagcaatcagcaggcacccccaaacacagactggcggttctcccaggcccagagaccggggacctctggaagccagaacggagatgatactggcacttggcccaacaaccaatttgatacggaaatgctgcaggccatgatccttgcctccgcctccgaggcggctgacgggagtagcaccctaggtggcggcgccgggacaatgggcctgagcgcaagatatgggcctcagttcaccctgcagcacgttcccgactacaggcagaatgtctatatccccgggagcaatgctacactaaccaacgcagccggaaagcgggacggcaaggcgccggccggggggaacggcaacaaaaagaagtctggcaagaaggaaaaaaagtag

SEQ ID NO: 200421 - DNA, 2808 bp, Artificial Sequence
  derived and/or modified sequence
atggccaaccggctgcagagaggagacaggagccggctgctgctgctgctgtgcatcttcctgggcaccctgcggggcttccgggcccggcagatccgctacagcgtgcctgaggagacagagaagggcagctttgtgggcaacatcagcaaggacctgggcctggagccccgggagctggccaagaggggcgtgagaattgtgtcccggggcaagacccagctgtttgctgtgaaccccaggagcggcagcctcatcacagctggaagaattgaccgggaggagctgtgtgaaacagtgagcagctgcttcctgaacatggagctgctggtggaggacaccctgaagatctacggcgtggaggtggagatcatcgacatcaatgacaatgcccccagcttccaggaggatgaggtggagatcaaggtgtctgagcacgccatccctggggccaggtttgccctgcccaatgcccgggaccctgatgtgggcgtgaacagcctgcagagctaccagctgagccccaacaactacttcagcctgcagctgcggggccgcacagatggagccaagaaccctgagctggtgctggagggcagcctggaccgggagaaggaggccgcccacctgctgctgctgacagccctggatggaggagaccccatcagaaaaggagctgtgcccatccgggtggtggtgctggatgtgaatgaccacatccccatgttcacccagagcgtgtacagagtgtctgtgcctgagaacatcagcagcggcaccagggtgctgatggtgaatgccacagatcctgatgagggcatcaatggagaggtgatgtacagcttcaggaacatggagagcaaggccagcgagatcttccagctggacagccagacaggagaggtgcaggtgcggggcagcctggactttgagaagtaccgcttctatgagatggagatccagggccaggacggcggcggcctcttcaccaccaccaccatgctgatcaccgtggtggatgtgaatgacaatgcccctgagatcaccatcaccagcagcatcaacagcatcctggagaacagccccccaggcaccgtgattgccctgctgaatgtgcaggaccaggacagcggagaaaatggccaggtgtcctgcttcatccccaaccacctgcccttcaagctggagaagacctacggcaactactacaagctgatcaccagccgggtgctggaccgggagctggtgcagagctacaacatcaccctgacagccacagaccagggcagcccccccctgtctgctgagacccacgtgtggctgaatgtggctgatgacaatgacaacccccctgtgttcccccacagcagctacagcgcctacatccctgagaacaaccccaggggggccagcatcttctctgtgacagccctggaccctgacagcaagcagaatgccctggtgacctacagcctgacagatgacacagtgcagggcgtgcccctgagcagctatgtgtccatcaacagcaacacaggagtgctgtatgccctgcagagctttgattatgagcagttccgggacctggagctgcgggtcatcgcccgggacagcggggacccccccctgagcagcaatgtgtccctgagcctgtttgtgctggaccagaatgacaatgcccctgagatcctgtacccagccctgcccacagatggcagcactggagtggagctggcccccaggtctgctgagcccggctacctggtgaccaaggtggtggccgtggacaaggacagcggccagaatgcctggctgagctaccgcctgctgaaggccagcgagcccggcctgtttgctgtgggggagcacactggagaggtgaggacagcccgggccctgctggacagagatgccctgaagcagagcctggtggtggccgtgcaggaccacggccagccccccctgagcgccaccgtgaccctgactgtggccgtggccgacagcatccctgaggtgctggccgacctgggcagcctggagagcctggccaacagcgagaccagtgacctgagcctgtacctggtggtggccgtggccgctgtgtcctgcatcttcctggtgtttgtgattgtgctgctggccctgcggctgtggcgctggcacaagagccggctgctgcaggccagcgagggcggcctggccggcatgcccaccagccactttgtgggcgtggatggagtgcaggccttcctgcagacctacagccatgaggtgtccctgattgctgacagccagaagagccacctgatcttcccccagcccaactacggggacaccctcatcagccaggagagctgtgagaagtctgagcccctgctgattgctgaggacagcgccatcatcctgggcaaatgtgaccccaccagcaaccagcaggccccacccaacacagactggaggttcagccaggcccagaggcctggcaccagcggcagccagaatggagatgacaccggcacctggcccaacaaccagtttgacacagagatgctgcaggccatgatcctggccagcgccagcgaggccgcagatggcagcagcaccctgggcggcggggccggcaccatgggcctgagcgcccgctatggcccccagttcaccctgcagcacgtgcctgactaccggcagaatgtgtacatccctggcagcaatgccaccctgaccaatgctgctgggaagagagatggcaaggccccagctggaggaaatggaaacaagaagaagagcggcaagaaggagaagaagtag

SEQ ID NO: 200422 - DNA, 2808 bp, Artificial Sequence
  derived and/or modified sequence
atggccaaccggctgcagcggggcgaccggagccggctgctgctgctgctgtgtatcttcctgggaactctccggggcttccgcgccaggcaaatcaggtattccgtgcctgaggaaactgagaaaggcagtttcgtcggcaacatctccaaggaccttgggctcgagcccagggagctggccaaacgaggcgtgcggatagtgtctcgtgggaagacccaactgttcgcagtcaaccctagatccgggtcacttatcactgctgggagaattgatagggaggaactatgcgagacagtctcgagttgcttcctgaacatggagttacttgtagaggatacattaaagatttacggcgttgaagtggagatcatcgacattaatgacaatgctccttcttttcaagaggacgaggtggaaattaaagtctcagagcacgctataccaggcgcgaggttcgccctccccaacgctcgcgatccagatgtcggcgtgaactctcttcagtcataccaacttagtcccaataactatttttccctccagttgaggggaagaactgatggcgctaagaatccagaacttgtgctggaaggttcactggacagggagaaggaggccgctcacttgctgctgctgactgctcttgatggcggcgatccaataagaaaaggcgccgtaccaatcagagttgttgtgttagacgtcaacgaccatatccctatgttcactcaaagtgtctacagagtgagtgtgccggaaaacataagctctggaacccgcgtgttaatggttaatgccacagacccagacgaagggattaacggggaagttatgtactcgtttcggaacatggagtctaaggcgtcagagatttttcagcttgactctcagactggggaagtccaagtgcgcgggtcccttgactttgagaaatacagattctacgagatggagattcaggggcaggatggcgggggtctcttcactacaacaactatgctgatcactgtcgtggacgtgaatgacaacgctccagaaatcactataacaagctccattaattccatcttggagaatagcccgcctggtacagtgatcgctttactgaacgtacaggatcaggacagcggagaaaacggccaggtcagctgctttattccaaatcacttgccattcaagttggagaaaacctatggcaattattacaagttgattaccagccgcgtcctggatcgtgagctggtacagagttacaatataacactgaccgcaaccgatcagggcagtcctcccttgtcagccgagacccacgtgtggcttaatgttgcagacgacaacgataatccacctgtgttccctcattcttcatattcagcgtatattcccgagaataaccctagaggtgcttccattttctctgtgacggccctggatcccgatagcaaacaaaatgcgttggtgacttattctctgactgatgatactgttcagggcgtgccgctttccagctacgtatctatcaatagtaatactggcgtgctctatgcactccaatcattcgactacgagcaattccgtgatctggagttacgagtaatcgcccgagactcaggcgatccccctttgtcatccaacgtcagtctgagtctgttcgtactggatcaaaacgacaatgcccctgagatactctacccggcattgccaaccgatgggagcactggggtggagctcgctcccagatctgctgagcccgggtacctcgtcaccaaggtggtagccgtcgataaggattccggccagaacgcctggctcagctatcgacttttaaaagccagcgagcctggactgttcgctgtgggagaacataccggagaggtcagaaccgcccgagcactgctggatagagacgcattgaaacagagtcttgttgtggccgtgcaggaccacgggcagcccccactttcggccactgtgacgctgaccgttgctgtggccgactcaattcctgaagttctggctgatctggggagcctggaaagtctggccaactccgaaacttctgacttatccttgtacttagtggtagccgttgccgctgtgtcctgtatctttctagtgttcgtgattgtccttttggccctgcggctgtggcgctggcacaaaagccgtctactgcaggcttccgaaggagggctggcaggcatgcctaccagtcatttcgtgggggtcgatggcgtgcaagcttttctccagacgtactcgcatgaagtgagcctcattgcggactctcagaaatctcatctaattttcccccagccaaactatggggataccctaatcagccaggagagctgcgagaaatccgagcccttacttattgccgaggatagtgccattattctgggaaaatgcgatcctaccagtaatcagcaagcccctcccaacaccgactggagattcagtcaggcacaaaggcccggcacctctggatctcaaaacggtgatgatacaggtacctggccaaataaccagttcgacaccgagatgcttcaggccatgattttggccagcgcaagtgaggctgcagatggatcttctacgctgggcgggggcgccggcaccatgggactttcagcccgttacggcccacaattcactctccagcacgttcctgattatcggcaaaatgtgtatatacctggatccaatgccaccctcactaacgccgcaggaaagagagacgggaaagcacctgctggtggaaacggtaataaaaaaaagagcggaaagaaagaaaagaaatag

SEQ ID NO: 200423 - DNA, 2808 bp, Artificial Sequence
  derived and/or modified sequence
atggctaaccgattgcagaggggcgaccgctcacgactgctgctgctgctgtgcatttttctcgggactctgagaggcttccgcgctaggcaaattcgctactccgtccccgaggagactgaaaagggctctttcgttggtaacattagcaaagacttagggcttgaacccagggaactggccaagcgaggagtccgtatcgtgtccagaggaaagactcaactttttgccgtgaatcctcgcagcggtagccttattactgcaggcaggatagaccgggaggaactctgcgagacagtatcaagttgctttttaaacatggagctgctggtggaagacactctgaaaatttacggcgttgaagttgagattatcgacataaacgacaacgctcctagtttccaggaggatgaagtggaaattaaggtttctgaacatgctattcctggtgctcgcttcgccctccctaatgcccgagatccggacgtgggggtcaactcactgcaatcttatcaactgtcccccaacaattacttctccctccagttaagggggcgaactgatggcgcaaagaaccctgagctcgtgctcgagggttccctagacagggaaaaagaagcagcccatctgctcctattaaccgctctggacggaggagacccaatcaggaaaggagcagttccaatacgggtcgttgtgctggatgtcaacgatcatattcccatgttcacccaatcggtgtatcgggtcagtgttcccgagaatattagctccggcacccgcgttctgatggttaacgctaccgacccagatgagggtatcaatggagaagtgatgtacagttttagaaacatggaatcaaaagcctccgagatctttcagctggatagccagactggggaggtgcaggtgagaggtagcctcgattttgaaaagtaccgattttatgaaatggaaattcagggccaggacggcggtggcctgttcacaaccactacaatgcttataaccgtggtcgacgttaatgacaatgctcctgaaattaccattacatcatccatcaactcgatcctagagaactcgccgccaggaacagtaatcgcactccttaacgtccaggatcaagatagtggcgagaacgggcaagtcagctgttttatacccaaccacctgcccttcaagctggagaagacttacgggaattactataagcttattacctcccgcgttctggatcgcgaactggtccagtcctataatatcaccctcacagcgaccgatcagggatccccccctctcagtgccgaaacccacgtttggttgaacgttgccgatgataatgataacccccctgttttccctcatagctcttactccgcgtatatacccgagaataacccacgcggtgcaagcatcttctcagtcactgccctggatccggacagcaagcagaacgctctcgtgacatacagcctgaccgatgataccgtccagggggttccactatcttcatacgtctccatcaattcaaatacaggggtcctgtacgctctgcagagtttcgattatgagcaattcagggacctggaattgagagttattgccagagactctggggacccaccgcttagctccaatgtttcactatccttatttgtgctcgatcagaacgataacgccccagaaatactgtaccctgccttgcccaccgacggatccaccggggttgaactggcaccgagatcggcggaaccgggatacttagtgactaaggttgtagctgtggacaaagacagtggtcagaacgcgtggctatcctaccgcctccttaaggcttctgaaccaggactgttcgctgtcggcgagcacactggggaggtccggactgccagagcccttctggaccgagatgcgcttaaacaatctcttgtcgttgcagtccaagaccatggtcaaccacccctttccgctaccgttactctgactgtagcagtggcagatagcattcccgaggtgcttgccgacctggggtcactggagtcgctcgcaaactctgaaactagcgacctcagcctctacctggtagtggctgtggccgcagtatcctgcattttcctagtgtttgtgatagttctcttggcgctgaggttgtggagatggcacaagtcacggctgttgcaggcgtctgagggaggactggccggaatgcctacctcgcattttgtgggcgtggacggggtccaggccttcctccaaacctactctcacgaggtgtccttaattgccgattctcaaaaaagccacctcatattcccccagcccaattatggggacacactgatcagccaggaatcatgcgagaaaagcgaacccctactgatcgccgaagactctgccattatcctcgggaagtgcgatcctacttccaatcaacaggcaccacccaatacagattggcgcttctctcaggcgcagcgtcccggaacatcagggtctcagaacggagacgataccggcacctggcccaataaccaatttgacactgagatgctgcaggccatgatccttgcaagtgccagcgaggcagcagatggcagcagcactctcgggggtggagcgggaactatgggtctgtcggcgaggtatggccctcagtttactctccaacatgtgcctgattacagacaaaatgtgtacattccaggaagtaatgctaccctcacgaacgcagcaggaaagagagacggcaaggcacccgctgggggaaacggcaataagaagaaaagcggaaagaaagaaaagaaatag

SEQ ID NO: 200424 - DNA, 3936 bp, Artificial Sequence
  derived and/or modified sequence
gagaaaccgcggaatatcggcttagagcctgccatggcgaatcggctacagcgcggggaccgcagtcggctgctgctgctgctgtgcattttcctggggacgctgcgggggttccgggccaggcagatccgatattcggtgccagaagagaccgaaaagggctccttcgtgggcaatatctccaaggacctggggctggagccccgggagctggcgaagcgcggagtccgcatcgtctccagagggaagacacagcttttcgctgtgaatccgcgaagcggcagcttgatcacggcaggcaggatagaccgggaggagctctgtgagacggtgtcctcctgttttttaaatatggaacttctcgtggaagacaccttgaagatttacggagtggaggtggaaataatagatattaatgataacgcccccagcttccaggaggacgaagtggagataaaagtcagtgagcacgcaattcctggggcgcgatttgctcttcctaatgctagggatccagatgtgggcgtgaactccctccagagctaccagctcagccctaataattacttttccttgcaactgcggggcagaacggatggggccaagaatccagagctagtactggagggaagcctggaccgagagaaagaggctgctcacctgctcctcctcacagctttagatggaggcgatcccatccgaaagggcgcagttcccattcgtgtggtggtcctcgatgtaaatgatcacatcccaatgtttacacagtccgtatatcgcgtgagtgttccagaaaacatcagctccggaactcgggtgctgatggttaatgcaacggatccagacgagggaatcaacggggaagtaatgtattcatttcggaacatggaaagcaaggcttctgaaatattccaattggattcacaaactggagaagttcaagtacgggggtctctggattttgaaaaatatagattctatgagatggaaattcaaggccaagatggtggaggtctctttaccaccacgacgatgttgatcactgttgtggatgtgaatgataacgctccagaaataactatcacctcttctattaattcaattctggaaaactctcctccaggtacagtgattgctcttctaaatgtgcaagatcaagattctggagaaaatggtcaagtctcctgttttattcctaaccacctgccttttaaattagaaaagacttatggaaattattacaaattgataacaagcagagtgctggacagggagttggtccagagctacaatataacgttgacagccacagaccagggaagcccgcctttgtctgcagaaactcatgtctggctgaatgtggcagatgacaacgataaccctcccgtttttcctcactcctcttactctgcctacattcccgaaaacaaccccaggggtgcctccatcttctcagtgaccgccctcgacccggacagcaaacagaatgccctggtcacttactctctgacggatgacactgtccagggggtgcctctgtcctcctatgtctctattaactccaacactggtgttctctatgccctacaatccttcgactatgagcagtttcgagacttagaactgagagtgatagcacgtgacagcggggacccgcccctcagcagcaacgtgtcgctgagcctgttcgtgctggaccagaacgacaatgcgcccgagatcctgtaccctgccctccccacagacggctccactggcgtggagctggcgccccgctctgcggaacctggctacctggtgaccaaggtggttgcggtggacaaagattcaggccagaacgcctggctgtcctatcgcctgcttaaggccagcgagccgggactcttcgcggtgggggagcacacgggcgaggtgcgtacagcgcgggcactgctggacagagacgcgctcaagcagagcctcgtggtggccgtccaggaccacggccagccccctctctcggccaccgtcacgctcaccgtggctgtggccgacagcatccccgaagtcctggcggacctcggcagcctcgagtctctggctaactctgaaacctcagacctctcgctgtacttggtggtggcggtggccgcagtctcctgcatcttcctggtctttgtcatcgtgctgctggcactcaggctgtggcgctggcataagtcacgcctgctgcaggcttctgaaggcgggttggcaggtatgcccacgtcacattttgtaggcgtggacggggtacaggctttcctgcaaacctattcccacgaggtctctctcattgcggactcgcagaagagtcacctgattttcccccagcccaactatggggacacgctcatcagccaggagagctgtgagaaaagcgagccactcttgatagctgaagactcagctatcattttaggcaaatgtgacccgacaagtaatcagcaagccccgcccaacacggactggcgtttctctcaggcccagagacccggcaccagcggctcccaaaatggcgatgacaccggcacctggcccaacaaccagtttgacacagagatgctgcaagccatgatcttggcgtccgccagtgaagctgctgatgggagctccaccctgggagggggtgccggcaccatgggattgagcgcccgctacggaccccagttcaccctgcagcacgtgcccgactaccgccagaatgtctacatcccaggcagcaatgccacactgaccaacgcagctggcaagcgggatggcaaggccccagcaggtggcaatggcaacaagaagaagtcgggcaagaaggagaagaagtaacatggaggccaggccaagagccacagggcggcctctccccaaccagcccagcttctccttacctgcacccaggcctcagagtttcagggctaacccccagaatactggtaggggccaaggccatgctccccttgggaaacagaaacaagtgcccagtcagcacctaccccttcccccccagggggttgaatatgcaaaagcagttccgctgggaacccccatccaatcaactgctgtacccatgggggtagtggggttactgtagacaccaagaaccatttgccacaccccgtttagttacagctgaactcctccatcttccaaatcaatcaggcccatccatcccatgcctccctcctccccaccccactccaacagttcctctttcccgagtaaggtggttggggtgttgaagtaccaagtaacctacaagcctcctagttctgaaaagttggaagggcatcatgacctcttggcctctcctttgattctcaatcttcccccaaagcatggtttggtgccagccccttcacctccttccagagcccaagatcaatgctcaagttttggaggacatgatcaccatccccatggtactgatgcttgctggatttagggagggcattttgctaccaagcctcttcccaacgccctggggaccagtcttctgttttgtttttcattgtttgacgtttccactgcatgccttgacttcccccacctcctcctcaaacaagagactccactgcatgttccaagacagtatggggtggtaagataaggaagggaagtgtgtggatgtggatggtgggggcatggacaaagcttgacacatcaagttatcaaggccttggaggaggctctgtatgtcctcaggggactgacaacatcctccagattccagccataaaccaataactaggctggacccttcccactacataatagggctcagcccaggcagccagctttgggctgagctaacaggaccaatggattaaactggcatttcagtccaaggaagctcgaagcaggtttaggaccaggtccccttgagaggtcagaggggcctctgtgggtgctgggtactccaga

SEQ ID NO: 200425 - DNA, 2808 bp, Artificial Sequence
  derived and/or modified sequence
atggccaacagactgcagagaggcgacagaagcagactgctgctgctgctgtgcatcttcctgggcaccctgagaggcttcagagccagacagatcagatacagcgtgcccgaggagaccgagaagggcagcttcgtgggcaacatcagcaaggacctgggcctggagcccagagagctggccaagagaggcgtgagaatcgtgagcagaggcaagacccagctgttcgccgtgaaccccagaagcggcagcctgatcaccgccggcagaatcgacagagaggagctgtgcgagaccgtgagcagctgcttcctgaacatggagctgctggtggaggacaccctgaagatctacggcgtggaggtggagatcatcgacatcaacgacaacgcccccagcttccaggaggacgaggtggagatcaaggtgagcgagcacgccatccccggcgccagattcgccctgcccaacgccagagaccccgacgtgggcgtgaacagcctgcagagctaccagctgagccccaacaactacttcagcctgcagctgagaggcagaaccgacggcgccaagaaccccgagctggtgctggagggcagcctggacagagagaaggaggccgcccacctgctgctgctgaccgccctggacggcggcgaccccatcagaaagggcgccgtgcccatcagagtggtggtgctggacgtgaacgaccacatccccatgttcacccagagcgtgtacagagtgagcgtgcccgagaacatcagcagcggcaccagagtgctgatggtgaacgccaccgaccccgacgagggcatcaacggcgaggtgatgtacagcttcagaaacatggagagcaaggccagcgagatcttccagctggacagccagaccggcgaggtgcaggtgagaggcagcctggacttcgagaagtacagattctacgagatggagatccagggccaggacggcggcggcctgttcaccaccaccaccatgctgatcaccgtggtggacgtgaacgacaacgcccccgagatcaccatcaccagcagcatcaacagcatcctggagaacagcccccccggcaccgtgatcgccctgctgaacgtgcaggaccaggacagcggcgagaacggccaggtgagctgcttcatccccaaccacctgcccttcaagctggagaagacctacggcaactactacaagctgatcaccagcagagtgctggacagagagctggtgcagagctacaacatcaccctgaccgccaccgaccagggcagcccccccctgagcgccgagacccacgtgtggctgaacgtggccgacgacaacgacaacccccccgtgttcccccacagcagctacagcgcctacatccccgagaacaaccccagaggcgccagcatcttcagcgtgaccgccctggaccccgacagcaagcagaacgccctggtgacctacagcctgaccgacgacaccgtgcagggcgtgcccctgagcagctacgtgagcatcaacagcaacaccggcgtgctgtacgccctgcagagcttcgactacgagcagttcagagacctggagctgagagtgatcgccagagacagcggcgacccccccctgagcagcaacgtgagcctgagcctgttcgtgctggaccagaacgacaacgcccccgagatcctgtaccccgccctgcccaccgacggcagcaccggcgtggagctggcccccagaagcgccgagcccggctacctggtgaccaaggtggtggccgtggacaaggacagcggccagaacgcctggctgagctacagactgctgaaggccagcgagcccggcctgttcgccgtgggcgagcacaccggcgaggtgagaaccgccagagccctgctggacagagacgccctgaagcagagcctggtggtggccgtgcaggaccacggccagccccccctgagcgccaccgtgaccctgaccgtggccgtggccgacagcatccccgaggtgctggccgacctgggcagcctggagagcctggccaacagcgagaccagcgacctgagcctgtacctggtggtggccgtggccgccgtgagctgcatcttcctggtgttcgtgatcgtgctgctggccctgagactgtggagatggcacaagagcagactgctgcaggccagcgagggcggcctggccggcatgcccaccagccacttcgtgggcgtggacggcgtgcaggccttcctgcagacctacagccacgaggtgagcctgatcgccgacagccagaagagccacctgatcttcccccagcccaactacggcgacaccctgatcagccaggagagctgcgagaagagcgagcccctgctgatcgccgaggacagcgccatcatcctgggcaagtgcgaccccaccagcaaccagcaggccccccccaacaccgactggagattcagccaggcccagagacccggcaccagcggcagccagaacggcgacgacaccggcacctggcccaacaaccagttcgacaccgagatgctgcaggccatgatcctggccagcgccagcgaggccgccgacggcagcagcaccctgggcggcggcgccggcaccatgggcctgagcgccagatacggcccccagttcaccctgcagcacgtgcccgactacagacagaacgtgtacatccccggcagcaacgccaccctgaccaacgccgccggcaagagagacggcaaggcccccgccggcggcaacggcaacaagaagaagagcggcaagaaggagaagaagtag

SEQ ID NO: 200426 - protein, 932 aa, Artificial Sequence
  derived and/or modified sequence
MTNCLSFRNGRGLALLCALLGTLCETGSGQIRYSVSEELDKGSFVGNIANDLGLEPRELAERGVRIVSRGRTQLFSLNPQSGSLVTAERIDREELCAQIPLCLVKINILVEDKLKIFEVEIEIKDINDNAPNFPTEELEIKIGELTVPGTRFPIKTAFDPDVGINSLQNYKLSPNDYFSLAVNSVSEGAKYPELVLERALDREKKEIHQLVLVASDGGDPVHSGNLHIQVIVLDANDNPPMFTQPEYRVSVWENVPVGTRLLTVNATDPDEGFNAQVSYILDKMPGKIAEIFHLNSVSGEVSILKSLDYEDAMFYEIKIEAQDGPGLLSRAKILVTVLDVNDNAPEITITSLTSSVPEEGTVGREIALIDVHDRDSGQNGQVEVFVLGNLPFKLEKSIDQYYRLVTATSLDREQISEYNISLRASDGGSPPLSTETHITLHVIDINDNPPTFPHLSYSAYIPENNPRGASIFSVTAQDPDSNNNARITYALTEDTLQGAPLSSFVSINSNTGVLYALRSFDYEQFRDLKLLVTASDSGNPPLSSNVSLNLFVLDQNDNAPEILYPALPTDGSTGVELAPRSAEPGYLVTKVVAVDRDSGQNAWLSYRLLKASEPGLFSVGLHTGEVRTARALLDRDALKQSLVVAVQDHGQPPLSATVTLTVAVADRIPDILADLGSLEPSAKPNDSDLTLYLVVAVAAVSCVFLAFVIVLLALRLRRWHKSRLLQASGGGLASTPGSHFVGADGVRAFLQTYSHEVSLTADSRKSHLIFPQPNYADTLISQESCEKSEPLLITQDLLEMKGDSNLLQQAPPNTDWRFSQAQRPGTSGSQNGDDTGTWPNNQFDTEMLQAMILASASEAADGSSTLGGGAGTMGLSARYGPQFTLQHVPDYRQNVYIPGSNATLTNAAGKRDGKAPAGGNGNKKKSGKKEKK

SEQ ID NO: 200427 - DNA, 2799 bp, Artificial Sequence
  derived and/or modified sequence
atgaccaactgtctgtcattccgcaatggaagaggactggcattgctttgcgctctgttagggactttgtgcgagactggttctgggcagattagatattccgtatctgaggaactggacaaaggttcatttgtcggtaatatagcaaatgacctcggtctggaacctagggaactagccgaacgtggcgtcagaatagtgagccgcggtagaactcagttgttctcactgaatcctcaatctggatccctcgtgacagctgaaaggattgaccgagaagaactgtgcgcacaaatacccctctgtcttgtcaagattaacatccttgttgaggataaactgaagatttttgaggttgagatagagatcaaggacattaatgataacgcgccgaactttcctacggaggagctggagatcaaaatcggagagctaacagttcccggaacacggtttcctataaaaactgcattcgaccccgatgtcggcatcaactccctacagaattataaactgagccctaatgattattttagtctcgccgtgaatagtgtgagcgagggtgcaaaatacccagagcttgtcctcgagcgggctcttgatagagaaaaaaaagagatccaccagctcgttctagtggcgagcgacgggggagatcccgtccacagtgggaacctccatattcaggtgatcgtattggatgccaacgataatccaccgatgttcacccagccagaatacagggtgagcgtgtgggagaatgtgcccgtgggtacacggttattaactgtcaatgcgacagatcccgacgaagggttcaatgcgcaggtgtcgtacatactagacaagatgcccgggaaaattgctgaaatctttcacttgaacagcgtatcaggggaggtgagtattctaaagtcgctggattacgaggacgctatgttctacgagattaaaatcgaagcccaagatgggcccgggctactcagtcgggccaaaatcctggtgacggtccttgacgttaacgacaacgcacccgagatcacaattaccagcctgacatcttccgtgccggaagagggcaccgtcggaagggaaatcgctctgattgacgtccatgacagggacagcggacaaaatgggcaagtggaggtttttgtcctaggcaatctgccttttaagctcgaaaaaagtatcgatcagtactaccggctggtcacagctacatcgttggatcgcgagcagataagtgagtacaacatctccctgcgagcttccgacggtggcagccctccactttcaaccgaaacacacattactctgcacgtgatagatattaatgataatccaccaacttttccgcacctgtcctatagcgcgtacattcccgagaacaacccccgcggggcctctatctttagcgtgaccgcacaagatccagatagcaataacaacgctagaatcacgtacgccttgactgaggataccctccagggagctcccttgtccagttttgtctcaattaacagcaatactggagttttatatgcactgcgatctttcgactacgaacagtttcgcgaccttaaattgctggtgactgcgtcagattctgggaatcctcccttgtcgtctaacgtatcactgaatctctttgttttagatcaaaacgacaatgcacccgagattctatatcctgcccttcctacggacgggagcaccggggtcgagctcgctcctagaagcgccgagcccggatacctggtgaccaaggtggtagcagtcgaccgcgactccgggcagaatgcatggttgtcgtatcgtctgttaaaggccagcgagcccggactgttcagcgtgggcctccacacaggcgaagttcgaaccgcccgggcactgctcgacagggacgcactgaagcagagccttgttgttgctgtgcaagatcacggacagcctcctctcagcgccacagtgactttgaccgtcgccgtagcagatcgcataccggatattctagctgacctgggatcccttgaacctagtgccaagcctaacgattcagatcttacgctataccttgttgttgcggtggccgctgtatcttgcgtgttcttggcttttgtcatcgttctcctggcactgaggttacggcggtggcataaaagtcggctcctgcaagcaagcgggggcggattggcttctacaccaggaagtcattttgttggtgccgatggggtgcgggcgtttctgcagacttatagtcatgaggttagcctgactgcggatagtaggaaatcgcacttgatattcccgcagcctaattatgccgatactctaatttcccaggagtcctgtgagaagagcgagcctctcttgataacccaggatctcctggagatgaaaggcgattcgaaccttttacagcaagcacctcctaatacagattggcggttttcccaagctcaacggccagggacttcaggctcccagaatggagacgatactggaacttggccaaacaatcagttcgatacagagatgctgcaggccatgatcttggccagcgccagtgaggccgccgatggcagctcaacattgggcgggggggctggtacgatggggctgtcagctaggtatggcccacaattcaccctgcagcacgttcctgattaccggcagaacgtctacatccccggcagcaacgcaacattgactaacgcagctggcaagcgggacgggaaggccccggctggcggtaacggaaacaaaaagaaatctggtaagaaggaaaagaagtag

SEQ ID NO: 200428 - DNA, 2799 bp, Artificial Sequence
  derived and/or modified sequence
atgaccaactgcctgtccttcagaaatggccggggcctggccctgctgtgtgccctgctgggcaccctgtgtgagaccggcagcggccagatccgctacagcgtgtctgaggagctggacaagggcagctttgtgggcaacatcgccaatgacctgggcctggagccccgggagctggccgagcggggcgtgcgcatcgtgtcccggggccgcacccagctgttcagcctgaacccccagagcggcagcctggtgacagctgagagaattgaccgggaggagctgtgtgcccagatccccctgtgcctggtgaagatcaacatcctggtggaggacaagctgaagatctttgaggtggagattgagatcaaggacatcaatgacaatgcccccaacttccccacagaggagctggagatcaagatcggggagctgactgtgcccggcacccgcttccccatcaagacagcctttgatcctgatgtgggcatcaacagcctgcagaactacaagctgagccccaatgactacttcagcctggccgtgaacagcgtgtctgagggcgccaagtacccagagctggtgctggagcgggccctggaccgggagaagaaggagatccaccagctggtgctggtggccagtgatggaggagaccctgtgcacagcggcaacctgcacatccaggtgattgtgctggatgccaatgacaacccccccatgttcacccagcctgagtacagagtgtctgtgtgggagaatgtgcctgtgggcacccggctgctgactgtgaatgccacagatcctgatgagggcttcaatgcccaggtgtcctacatcctggacaagatgcctgggaagattgctgagatcttccacctgaacagcgtgtctggagaggtgtccatcctgaagagcctggactatgaagatgccatgttttatgagatcaagattgaggcccaggacggccctggcctgctgagccgggccaagatcctggtgacagtgctggatgtgaatgacaatgcccctgagatcaccatcaccagcctgaccagctctgtgcctgaggagggcaccgtgggccgggagatcgccctgattgatgtgcatgaccgggacagcggccagaatggccaggtggaggtgtttgtgctgggcaacctgcccttcaagctggagaagagcattgaccagtactaccgcctggtgacagccaccagcctggaccgggagcagatcagcgagtacaacatcagcctgcgggccagtgatggcggcagcccccccctgagcacagagacccacatcaccctgcacgtgattgacatcaatgacaacccccccaccttcccccacctgagctacagcgcctacatccctgagaacaaccccaggggggccagcatcttctctgtgacagcccaggaccctgacagcaacaacaatgcccgcatcacctacgccctgacagaggacaccctgcagggcgcccccctgagcagctttgtgtccatcaacagcaacacaggagtgctgtatgccctgcggagctttgattatgagcagttccgggacctgaagctgctggtgacagccagtgacagcggcaacccccccctgagcagcaatgtgtccctgaacctgtttgtgctggaccagaatgacaatgcccctgagatcctgtacccagccctgcccacagatggcagcactggagtggagctggcccccaggtctgctgagcccggctacctggtgaccaaggtggtggccgtggaccgggacagcggccagaatgcctggctgagctaccgcctgctgaaggccagcgagcccggcctcttctctgtgggcctgcacactggagaggtgaggacagcccgggccctgctggacagagatgccctgaagcagagcctggtggtggccgtgcaggaccacggccagccccccctgagcgccaccgtgaccctgactgtggccgtggccgaccgcatcccagacatcctggccgacctgggcagcctggagcccagcgccaagcccaatgacagcgacctgaccctgtacctggtggtggccgtggccgctgtgtcctgtgtgttcctggcctttgtgattgtgctgctggccctgcggctgcggcgctggcacaagagccggctgctgcaggccagcggcggcggcctggccagcaccccaggcagccactttgtgggcgcagatggagtgcgggccttcctgcagacctacagccatgaggtgtccctgacagctgacagcaggaagagccacctgatcttcccccagcccaactatgctgacaccctcatcagccaggagagctgtgagaagtctgagcccctgctgatcacccaggacctgctggagatgaagggggacagcaacctgctgcagcaggccccacccaacacagactggaggttcagccaggcccagaggcctggcaccagcggcagccagaatggagatgacaccggcacctggcccaacaaccagtttgacacagagatgctgcaggccatgatcctggccagcgccagcgaggccgcagatggcagcagcaccctgggcggcggggccggcaccatgggcctgagcgcccgctatggcccccagttcaccctgcagcacgtgcctgactaccggcagaatgtgtacatccctggcagcaatgccaccctgaccaatgctgctgggaagagagatggcaaggccccagctggaggaaatggaaacaagaagaagagcggcaagaaggagaagaagtag

SEQ ID NO: 200429 - DNA, 2799 bp, Artificial Sequence
  derived and/or modified sequence
atgaccaactgcctgagcttccggaacggccggggcctggccctgctatgtgctctcctgggcacactgtgtgagacgggttctgggcagatcaggtacagcgtgagcgaagaactggataaaggctccttcgtgggcaatattgctaacgatctaggtttagagcccagagagcttgcggagagaggagtccgcattgtaagcaggggtcgaacccagctgttcagtttaaaccctcagtccggatctctggttacagccgaaaggattgatagggaagagctttgtgcccaaatccctctgtgtttagtcaagataaacatactagtcgaggataagctcaagattttcgaagtggagatcgagatcaaagacatcaacgacaatgctccaaactttcccaccgaggaactcgagatcaaaatcggggaactgacggttccagggactcggtttcctataaagaccgcgttcgaccccgacgttggtattaacagtcttcagaactataagttgtcacccaacgattacttttcccttgccgtgaactccgtgtcagaaggggctaaataccctgagctggtgctagaacgggcactagatcgggagaaaaaggaaatccatcagctcgtgttggtagcatccgacgggggggaccctgtacacagcggtaatttgcacatacaggtcattgtcctggatgcaaacgataacccccccatgttcacccagccagaataccgagtgtctgtatgggaaaacgttccggtgggcaccaggctgctgactgtgaacgctacagatccagacgagggttttaatgcccaggtctcttatatcctggataaaatgcccgggaagatcgccgaaattttccacctgaacagcgtttccggcgaggtgagcattctaaagtcactggattacgaggacgcaatgttctatgagattaaaatcgaggcccaggacggccccggccttctcagcagagctaagattttggttacagtcctggatgtgaacgataatgcccctgagatcactataacaagcttaacttcttccgtgccagaagaggggacggtgggccgcgaaatagccctgatcgatgttcatgatcgcgattctggacagaatgggcaggtagaggtgttcgtcctaggtaacctgccctttaagcttgaaaaatccatcgaccaatactaccgactggttactgctacatccctggatcgcgaacaaattagcgaatacaacataagccttcgtgcgtctgatggcggcagccctcccctgtccacagaaacgcacattactctgcacgtaatcgatattaatgataatcctccaacttttccccacttgtcttacagtgcatatattccagagaacaacccaaggggcgcgtctattttcagtgttactgcccaagaccctgactccaataacaacgctcgtattacctacgccttgacagaggacaccctccaaggtgctcccttatccagtttcgtgagtatcaactctaacaccggggtcctgtatgcccttcgctcatttgattacgagcaatttcgggaccttaaactattggtaaccgcttcagatagtggcaacccacctctgtcatccaacgtgagtctgaatctgttcgtgctggaccagaatgacaatgcccctgaaatcctgtatcccgccctgccaacagacggtagtactggggtggagctggctccacgtagcgctgagcccggttacctcgtgaccaaggttgtcgctgtcgaccgagactcagggcaaaacgcctggctctcttatcggctgctgaaggccagtgagcctggtctcttcagcgtcggcctgcataccggcgaagtgcgaactgctagagctctgcttgatagggatgcactaaagcagagcctggttgtcgcagtgcaagaccacggacagcccccgctgtcggccacggtcacactcacagtcgctgtcgccgatagaatcccagatatcctcgcagatttgggatcactggagccctcggccaagccaaacgacagcgatctgactctgtatctcgtggtggcagtggcagccgtgtcatgcgtgtttctagcctttgttattgtgttgctggcactccgacttaggcgctggcataagagtcggcttctccaggcatcgggaggggggctggcaagcacccctggatctcacttcgtgggcgccgatggagtccgtgcctttcttcagacatacagccacgaagtgtccctgactgctgactccagaaagtcccatctgatatttccccagcccaactacgccgacaccctgattagtcaggagtcctgcgaaaagagcgagccactgcttatcacccaggacttattagaaatgaagggggattcaaacctgctacagcaggctcctccaaataccgactggagattcagccaggctcagcgaccgggcacctctggcagccaaaacggcgacgataccggaacttggccaaacaatcagtttgacaccgagatgctgcaggcgatgatcctggcaagcgcatcagaggctgccgatggatcaagcaccctcggtggcggggcaggtacgatgggactgagcgcacgatatggccctcaattcaccctacagcatgtcccagattatcgccagaacgtttacatcccaggtagcaacgcaactcttactaatgccgctggcaaacgggacgggaaagcgccagccggagggaacggcaataagaaaaaatccggcaagaaggagaaaaaatag

SEQ ID NO: 200430 - DNA, 2799 bp, Artificial Sequence
  derived and/or modified sequence
atgaccaactgcttatcttttcgcaacgggagagggcttgcactgctgtgtgcattgttgggcacactctgtgagactggctccggccaaatacgatactcggtgagcgaagaactggataaagggagcttcgtggggaacatcgccaatgatttgggcctggaaccccgagaactggcagagagaggggttcgaatagtgagtaggggaaggacacagctcttcagcctcaatcctcaatctggctcactggtgacagccgagcggatagatagagaggaactgtgtgcccagatccccctgtgtctcgtgaagatcaacattttagtggaggacaaactcaagatctttgaggtggaaatcgagatcaaagatatcaacgataatgcacccaacttccccactgaagaattggagatcaagatcggagagctcacggtgcccggtaccagattccccatcaagacagcctttgatcctgacgttggaatcaattccctgcagaactataaactgtcccccaatgactatttcagtctcgccgtgaactccgtcagcgaaggggctaaatatcctgagctggtgttagaacgagccctggatagggagaagaaggagattcatcagttagtactcgtggcatcggatggcggtgatcccgtccattccggcaacctacatatccaggtgattgtgctcgacgctaatgacaaccctcccatgttcacccagcccgagtacagagtctcagtctgggagaatgtcccagtcggcaccaggctgctgacagttaatgctacagaccccgatgaagggtttaatgcccaagttagctacatcttagataagatgccaggcaagatagccgaaatcttccaccttaacagcgtctcgggcgaggttagcattcttaagagtctggattacgaggacgccatgttctacgaaattaaaatcgaggctcaggatgggccaggccttctcagtcgcgcaaagatcttggtgaccgtgctagacgtgaacgataacgccccagagataaccataactagcttaacatcttctgtgcccgaagaaggcactgtcgggagggaaatcgctttgatcgacgtccatgatcgtgactcaggccagaatggccaggtggaagtgtttgtactggggaaccttccgttcaagctggaaaagagcatcgatcagtattaccggctggtgaccgcgaccagcttagaccgggaacaaatctcggagtataacatcagtctgagggcttcagatgggggaagcccacctttaagcactgagacccatatcactctgcacgtcatcgacataaatgataaccctcctacgtttccccatcttagctattctgcctacatcccagagaacaacccacggggagccagcatttttagcgtgactgcccaggacccggatagtaataacaatgcacgcataacctatgctcttactgaagataccttgcagggggctccgctcagttcctttgtgtccattaattccaacaccggcgtgctatacgccttgcgtagctttgactacgagcaattcagagatctcaagctactcgttaccgcctcagatagtgggaatccccctttatcgtcaaacgtgtcactgaacctgttcgtgttggatcagaacgacaatgctcctgagatactctaccctgctctccccacggatggatctacaggtgtggagcttgccccacggagcgcggagccaggttacctggtgacgaaagtggtagcagtggacagggacagcggtcaaaacgcctggctgagctaccgactgttgaaagcgtccgagcctggtctattctcagtgggcttgcacactggcgaagttagaaccgccagggccttgttggaccgggacgccctgaagcagagcttggtcgtggcggtgcaggaccacggacagccacccctgagcgccaccgtcacactgacagtggccgttgctgaccgcatcccggatattctggcagacttagggagtctggagcccagcgccaagcctaatgacagtgacctcactctgtacttggtggtcgccgtcgctgcagtgtcctgcgtgtttctggcctttgttatagtcctcttggccctcagactgagacgatggcataagagcaggcttttacaagcaagtggtggtggactcgcaagtactccaggaagtcactttgtcggagcagacggcgtccgcgcatttctgcagacctattctcatgaagtgagcctgaccgcagattcgcggaagtcgcacttaatttttcctcagcccaactatgccgataccctcatatctcaagagtcttgcgaaaaatcagaacctcttcttatcacccaggacctgcttgaaatgaaaggcgacagcaacctgcttcagcaggcccctcctaataccgactggcgattcagccaggcccaaaggcccggtacaagtggctctcaaaatggggacgataccggaacctggcccaacaaccaattcgacacagaaatgctgcaagccatgattctggccagtgcaagcgaagcagccgacggttcaagcactctcgggggtggtgcaggaacaatggggctgtccgccagatacggcccacagtttacactgcagcatgtacccgactacaggcagaacgtctacattcctggcagcaatgctacccttaccaacgcggctggcaagcgtgatgggaaggctcctgcgggaggcaatgggaacaagaagaaatccggcaaaaaggaaaagaagtag

SEQ ID NO: 200431 - DNA, 4605 bp, Artificial Sequence
  derived and/or modified sequence
atgaccaattgcctgagtttccgaaatggcagaggactggccctgctgtgcgcgctcctggggacgctgtgcgaaacaggatccggtcagatccgctactcggtgtctgaggagctagataaaggttccttcgtgggcaacatcgctaacgacctggggctagagccccgggagctggcggagcgcggagtccgcatcgtctccagaggtaggacgcagcttttctctctgaatccgcaaagcggcagcttggtcaccgcggagaggatagaccgggaggagctctgcgctcagatcccgctgtgtctggtaaaaattaacattctggttgaggataaattgaaaatttttgaagtagaaatagaaattaaagatattaatgataatgctcctaatttcccaacagaggaattggaaataaaaattggtgaactaacggttcctggaacccgatttccaattaaaactgcttttgacccagatgtaggcattaactccctgcagaactacaagcttagccccaatgactacttctctctggctgtgaatagcgtctctgagggggccaagtatccagagctggtgctggagcgggccctggaccgtgagaaaaaagaaattcaccagcttgtcctggttgcctctgatggtggcgaccctgtccactctggcaacttgcacatccaagtgatagtcctggatgcaaatgacaacccaccaatgtttactcagcctgagtaccgtgtgagtgtttgggagaacgtgcctgtgggtacccggctgctcacggtgaatgccactgaccctgacgagggattcaatgctcaagtgtcttatattctagataaaatgcctgggaaaatcgctgagattttccatcttaactcagtgagtggagaagtatcaatattaaaaagtctagattatgaggatgccatgttctatgaaattaaaattgaagcacaggatggaccaggtcttctttcaagagccaagattctagtcacggttctggatgtgaatgacaatgctccagaaattacaatcacgtctctcacaagctcagtcccagaagagggcaccgttggaagagaaattgctcttatcgacgtgcatgaccgagattctgggcagaatgggcaggttgaagtttttgtcctgggaaatctgccatttaagttagaaaaatcaatagatcaatattaccgcttagtgacggccacatccctggaccgcgaacaaatatcagaatataacattagtctgagagcctcagatgggggaagcccgccactgtccacagaaactcacatcaccctgcatgtgattgacatcaatgacaacccacccaccttccctcatttatcctactccgcctacattccagaaaacaaccccagaggagcctccatcttctcagtgacagcccaggacccagatagcaacaacaacgcccgcatcacttatgcattgaccgaggacactctccagggggcgcccctgtcctccttcgtctctatcaactccaacactggcgtcctatacgcgctgagatccttcgactacgagcaatttagagacttaaagctactggtgacagccagcgacagcgggaaccctccactcagcagcaacgtgtcgctgaacctgttcgtgctggaccagaacgacaacgcgcccgagatcctgtaccccgccctccccacagacggttccactggcgtggagctggcgcctcgctccgcagagcccggctacctggtgaccaaggtggtggcggtggacagagactcgggccagaacgcctggctgtcctaccgcctgctcaaggccagcgagccgggactcttctcggtgggtctgcacacgggcgaggtgcgcacggcgcgagccctgctggacagagacgcgctcaagcagagcctcgtggtggccgtccaggaccacggccagccccctctctccgccactgtcacgctcaccgtggccgtggccgacaggatccccgacatcctggccgacctgggcagcctcgagccctccgccaaacccaacgattcggacctcactctgtacctggtggtggcggtggccgcggtctcctgcgtcttcctggccttcgtcatcgtgctgctggcgctcaggctgcggcgctggcacaagtcacgcctgctgcaggcttcgggaggcggcttggcgagtacgcccggctcgcactttgtgggcgcggacggggttcgggctttcctgcagacctattcccacgaggtctccctcactgcggactcgcggaagagccacctgattttcccccagcccaactatgcggacacgctcatcagccaggagagctgtgagaaaagcgagcctcttctgataactcaggatttacttgaaatgaaaggagattccaacctacttcagcaagccccgcccaacacggactggcgtttctctcaggcccagagacccggcaccagcggctcccaaaatggcgatgacaccggcacctggcccaacaaccagtttgacacagagatgctgcaagccatgatcttggcgtccgccagtgaagctgctgatgggagctccaccctgggagggggtgccggcaccatgggattgagcgcccgctacggaccccagttcaccctgcagcacgtgcccgactaccgccagaatgtctacatcccaggcagcaatgccacactgaccaacgcagctggcaagcgggatggcaaggccccagcaggtggcaatggcaacaagaagaagtcgggcaagaaggagaagaagtaacatggaggccaggccaagagccacagggcggcctctccccaaccagcccagcttctccttacctgcacccaggcctcagagtttcagggctaacccccagaatactggtaggggccaaggccatgctccccttgggaaacagaaacaagtgcccagtcagcacctaccccttcccccccagggggttgaatatgcaaaagcagttccgctgggaacccccatccaatcaactgctgtacccatgggggtagtggggttactgtagacaccaagaaccatttgccacaccccgtttagttacagctgaactcctccatcttccaaatcaatcaggcccatccatcccatgcctccctcctccccaccccactccaacagttcctctttcccgagtaaggtggttggggtgttgaagtaccaagtaacctacaagcctcctagttctgaaaagttggaagggcatcatgacctcttggcctctcctttgattctcaatcttcccccaaagcatggtttggtgccagccccttcacctccttccagagcccaagatcaatgctcaagttttggaggacatgatcaccatccccatggtactgatgcttgctggatttagggagggcattttgctaccaagcctcttcccaacgccctggggaccagtcttctgttttgtttttcattgtttgacgtttccactgcatgccttgacttcccccacctcctcctcaaacaagagactccactgcatgttccaagacagtatggggtggtaagataaggaagggaagtgtgtggatgtggatggtgggggcatggacaaagcttgacacatcaagttatcaaggccttggaggaggctctgtatgtcctcaggggactgacaacatcctccagattccagccataaaccaataactaggctggacccttcccactacataatagggctcagcccaggcagccagctttgggctgagctaacaggaccaatggattaaactggcatttcagtccaaggaagctcgaagcaggtttaggaccaggtccccttgagaggtcagaggggcctctgtgggtgctgggtactccagaggtgccactggtggaagggtcagcggagccccagcaggaagggtgggccagccaggccattcttagtccctgggttggggaggcagggagctagggcagggaccaaatgaacagaaagtctcagcccaggatggggcttcttcaacagggcccctgccctcctgaagcctcagtccttcaccttgccaggtgccgtttctcttccgtgaaggccactgcccaggtccccagtgcgccccctagtggccatagcctggttaaagttccccagtgcctccttgtgcatagaccttcttctcccacccccttctgcccctgggtccccggccatccagcggggctgccagagaaccccagacctgcccttacagtagtgtagcgccccctccctctttcggctggtgtagaatagccagtagtgtagtgcggtgtgcttttacgtgatggcgggtgggcagcgggcggcgggctccgcgcagccgtctgtccttgatctgcccgcggcggcccgtgttgtgttttgtgctgtgtccacgcgctaaggcgaccccctcccccgtactgacttctcctataagcgcttctcttcgcatagtcacgtagctcccaccccaccctcttcctgtgtctcacgcaagttttatactctaatatttatatggctttttttcttcgacaaaaaaataataaaacgtttcttctgaaaagctg

SEQ ID NO: 200432 - DNA, 2799 bp, Artificial Sequence
  derived and/or modified sequence
atgaccaactgcctgagcttcagaaacggcagaggcctggccctgctgtgcgccctgctgggcaccctgtgcgagaccggcagcggccagatcagatacagcgtgagcgaggagctggacaagggcagcttcgtgggcaacatcgccaacgacctgggcctggagcccagagagctggccgagagaggcgtgagaatcgtgagcagaggcagaacccagctgttcagcctgaacccccagagcggcagcctggtgaccgccgagagaatcgacagagaggagctgtgcgcccagatccccctgtgcctggtgaagatcaacatcctggtggaggacaagctgaagatcttcgaggtggagatcgagatcaaggacatcaacgacaacgcccccaacttccccaccgaggagctggagatcaagatcggcgagctgaccgtgcccggcaccagattccccatcaagaccgccttcgaccccgacgtgggcatcaacagcctgcagaactacaagctgagccccaacgactacttcagcctggccgtgaacagcgtgagcgagggcgccaagtaccccgagctggtgctggagagagccctggacagagagaagaaggagatccaccagctggtgctggtggccagcgacggcggcgaccccgtgcacagcggcaacctgcacatccaggtgatcgtgctggacgccaacgacaacccccccatgttcacccagcccgagtacagagtgagcgtgtgggagaacgtgcccgtgggcaccagactgctgaccgtgaacgccaccgaccccgacgagggcttcaacgcccaggtgagctacatcctggacaagatgcccggcaagatcgccgagatcttccacctgaacagcgtgagcggcgaggtgagcatcctgaagagcctggactacgaggacgccatgttctacgagatcaagatcgaggcccaggacggccccggcctgctgagcagagccaagatcctggtgaccgtgctggacgtgaacgacaacgcccccgagatcaccatcaccagcctgaccagcagcgtgcccgaggagggcaccgtgggcagagagatcgccctgatcgacgtgcacgacagagacagcggccagaacggccaggtggaggtgttcgtgctgggcaacctgcccttcaagctggagaagagcatcgaccagtactacagactggtgaccgccaccagcctggacagagagcagatcagcgagtacaacatcagcctgagagccagcgacggcggcagcccccccctgagcaccgagacccacatcaccctgcacgtgatcgacatcaacgacaacccccccaccttcccccacctgagctacagcgcctacatccccgagaacaaccccagaggcgccagcatcttcagcgtgaccgcccaggaccccgacagcaacaacaacgccagaatcacctacgccctgaccgaggacaccctgcagggcgcccccctgagcagcttcgtgagcatcaacagcaacaccggcgtgctgtacgccctgagaagcttcgactacgagcagttcagagacctgaagctgctggtgaccgccagcgacagcggcaacccccccctgagcagcaacgtgagcctgaacctgttcgtgctggaccagaacgacaacgcccccgagatcctgtaccccgccctgcccaccgacggcagcaccggcgtggagctggcccccagaagcgccgagcccggctacctggtgaccaaggtggtggccgtggacagagacagcggccagaacgcctggctgagctacagactgctgaaggccagcgagcccggcctgttcagcgtgggcctgcacaccggcgaggtgagaaccgccagagccctgctggacagagacgccctgaagcagagcctggtggtggccgtgcaggaccacggccagccccccctgagcgccaccgtgaccctgaccgtggccgtggccgacagaatccccgacatcctggccgacctgggcagcctggagcccagcgccaagcccaacgacagcgacctgaccctgtacctggtggtggccgtggccgccgtgagctgcgtgttcctggccttcgtgatcgtgctgctggccctgagactgagaagatggcacaagagcagactgctgcaggccagcggcggcggcctggccagcacccccggcagccacttcgtgggcgccgacggcgtgagagccttcctgcagacctacagccacgaggtgagcctgaccgccgacagcagaaagagccacctgatcttcccccagcccaactacgccgacaccctgatcagccaggagagctgcgagaagagcgagcccctgctgatcacccaggacctgctggagatgaagggcgacagcaacctgctgcagcaggccccccccaacaccgactggagattcagccaggcccagagacccggcaccagcggcagccagaacggcgacgacaccggcacctggcccaacaaccagttcgacaccgagatgctgcaggccatgatcctggccagcgccagcgaggccgccgacggcagcagcaccctgggcggcggcgccggcaccatgggcctgagcgccagatacggcccccagttcaccctgcagcacgtgcccgactacagacagaacgtgtacatccccggcagcaacgccaccctgaccaacgccgccggcaagagagacggcaaggcccccgccggcggcaacggcaacaagaagaagagcggcaagaaggagaagaagtag

SEQ ID NO: 200433 - protein, 930 aa, Artificial Sequence
  derived and/or modified sequence
MGGSCAQRRRAGPRQVLFPLLLPLFYPTLSEPIRYSIPEELAKGSVVGNLAKDLGLSVLDVSARKLRVSAEKLHFSVDAESGDLLVKNRIDREQICKERRRCELQLEAVVENPLNIFHVIVVIEDVNDHAPQFDKKEIHLEIFESASAGTRLSLDPATDPDININSIKDYKINSNPYFSLMVRVNSDGGKYPELSLEKLLDREEQRSHSLILTALDGGDPPRSATAHIEISVKDTNDNPPVFSRDEYRISLSENLPPGSPVLQVTATDQDEGVNAEINYYFRSTAQSTKHMFSLDEKTGMIKNNQSFDFEDVERYTMEVEAKDGGGLSTQCKVIIEILDENDNSPEIIITSLSDQILENSPPGMVVALFKTRDLDFGGNGEVRCNIETDIPFKIYSSSNNYYKLVTDGALDREQTPEYNVTIVATDRGKPPLSSSRSITLYVADINDNAPVFDQTSYVVHVAENNPPGASIAQVSASDPDLGLNGHISYSIVASDLEPLAVSSYVSVSAQSGVVFAQRAFDHEQLRAFALTLQARDHGSPTLSANVSLRVLVGDRNDNAPRVLYPALGPDGSAFFDMVPRSAEPGYLVTKVVAVDADSGHNAWLSYHVLQASEPGLFSLGLRTGEVRTARALGDRDAARQRLLVAVRDGGQPPLSATATLHLVFADNLQEILPDLSDRPVLSDPQAELQFYLVVALALISVLFLLAVILAIALRLRRSLSPATWDCFHPGLCVKSGPVVPPNYSEGTLPYSYNLCIAHTGTKEFNFLKCSVPLHSNEDMVCSVSPGALIPPHGGEDLTSHPETLTSQAPPNTDWRFSQAQRPGTSGSQNGDDTGTWPNNQFDTEMLQAMILASASEAADGSSTLGGGAGTMGLSARYGPQFTLQHVPDYRQNVYIPGSNATLTNAAGKRDGKAPAGGNGNKKKSGKKEKK

SEQ ID NO: 200434 - DNA, 2793 bp, Artificial Sequence
  derived and/or modified sequence
atgggaggcagttgtgcccaacgccgccgggcggggccacgccaagttctgttcccccttctcctgcctctgttctatccgaccctctctgaacccattcggtacagcatacccgaagagctggcaaaaggaagcgtagttggtaacttggctaaggatctagggctctccgtgctcgacgtgagcgctagaaaattgagagtgagtgctgagaagctccacttctctgtcgacgccgaaagtggtgacctcttggttaaaaatcgaattgatcgtgagcaaatctgcaaagaacgccgtcggtgtgagctgcaactggaagcagtagtcgaaaatccattgaatattttccatgtgattgtggttatcgaggacgttaatgaccacgctccacagtttgacaagaaggagatacacttggagatctttgaatccgcatccgccggaacaagactcagtctagatcccgctaccgacccagacatcaatattaattccatcaaagattataaaatcaactcaaatccctatttttcgctgatggtccgggtgaactccgatggaggaaaatatcctgaactgtctctggagaagctcctagatagagaggagcagaggtcccactctctgatactgaccgctttggacggcggcgatccaccacggtcagcaacagcccacatagagatcagcgtgaaggacactaacgataatcctccagtgttctctcgagatgagtaccggatctctctaagtgaaaacttgccaccaggaagcccggtcctccaggtgactgctacagaccaggatgagggtgtgaacgctgagattaactactacttccgttctaccgcccagtctactaagcacatgttttcactggatgaaaaaaccggaatgatcaaaaacaatcagtcctttgacttcgaagacgtagagcgatatacgatggaagtggaggccaaggacggtgggggtctcagcactcagtgcaaagtgataatagagattctcgacgaaaacgataactcacctgagataataattacctcactgtctgaccaaattttggagaatagcccaccaggcatggtagtcgctctgttcaagacccgggacctcgacttcggcggaaacggggaagtcaggtgtaatatcgagaccgacattccgttcaaaatctattcatcttccaacaattattacaagctggttactgatggcgccctggaccgggagcagactcctgagtacaatgtgaccatcgttgccaccgaccggggcaagccccccctgtcatccagccggtcaattactctgtatgttgctgacataaacgataatgcccctgtgttcgatcagaccagctatgtggttcacgtggccgaaaacaatccgcctggcgcatctatcgcacaggtgagtgcgtccgatcctgatttgggcctgaacggccacattagctactccatcgtggccagcgatctggagcccctggccgtgagtagctacgtatccgtgagcgctcagtcaggggtagtcttcgctcagcgggcattcgaccacgagcagttacgcgcctttgccctaacactgcaagcacgggaccacgggtcacccaccttgagcgcgaatgtgagtctccgcgtcctggtgggagatagaaatgataacgccccaagagtgctgtacccagctttaggacctgacggatcagccttttttgatatggtgccccggtccgccgaacctgggtatctggtaacgaaggtggtggccgtcgatgcagattccggtcataacgcgtggctgtcttaccacgtcctccaggcctcggagcccggtttatttagcctgggacttcgaacaggagaggtgcgtaccgctcgggcactgggcgatagggatgctgcccgccagagactgctagttgcagtgcgggacggtggccagcccccgctgtctgccacagccacactccatcttgtatttgccgacaacctacaggagatattacccgacctaagcgatcgtccagttctgtcagatccacaagcggaactgcagttttatttggtggtcgcactggcactgatcagcgtgctgttcctgttagccgtcattctcgccatcgcgctcagattgcggcgctcgctgagccccgccacttgggattgcttccaccccggattgtgcgtgaaaagcggcccagtggtcccaccaaactacagcgaaggcaccctgccttatagctacaacctgtgcattgcccacactggcacaaaagagttcaacttccttaaatgctctgtgcctctgcacagtaacgaggatatggtgtgctcagtcagtccaggggccctgataccgcctcacggtggtgaggatcttacctcacacccagaaaccctgacatcccaggcacctccaaataccgactggcgattcagccaagcccagagaccaggcacctctggaagccaaaatggcgatgatactggaacctggcccaataaccagtttgacacggagatgctacaggccatgatacttgcaagcgcatcggaagcggccgatggctccagtacattagggggcggggccggtacaatggggttgagcgcaaggtatggccctcagtttactctccagcacgtgccggattataggcagaatgtgtatattcctggcagtaacgccaccctgaccaacgccgccgggaagcgagacggaaaagctcccgccggcggcaatggaaataagaaaaagagtggcaagaaggaaaaaaagtag

SEQ ID NO: 200435 - DNA, 2793 bp, Artificial Sequence
  derived and/or modified sequence
atgggcggcagctgtgcccagaggagaagagctggcccccggcaggtgctcttccccctgctgctgcccctcttctaccccaccctgtctgagcccatccgctacagcatccctgaggagctggccaagggctctgtggtgggcaacctggccaaggacctgggcctgtctgtgctggatgtgtctgccaggaagctgcgggtgtctgctgagaagctgcacttctctgtggatgctgagagcggggacctgctggtgaagaacagaattgaccgggagcagatctgcaaggagcggcggcgctgtgagctgcagctggaggccgtggtggagaaccccctgaacatcttccacgtgattgtggtgattgaagatgtgaatgaccacgccccccagtttgacaagaaggagatccacctggagatctttgaaagtgccagcgctggcacccggctgagcctggaccctgccacagatcctgacatcaacatcaacagcatcaaggactacaagatcaacagcaacccctacttcagcctgatggtgcgggtgaacagtgatggcggcaagtacccagagctgagcctggagaagctgctggaccgggaggagcagaggagccacagcctcatcctgacagccctggatggaggagacccccccaggtctgccacagcccacatcgagatctctgtgaaggacaccaatgacaacccccctgtgttcagcagagatgagtaccgcatcagcctgtctgagaacctgcccccaggcagccctgtgctgcaggtgacagccacagaccaggatgagggcgtgaatgctgagatcaactactacttccgcagcacagcccagagcaccaagcacatgttcagcctggatgagaagacaggcatgatcaagaacaaccagagctttgattttgaagatgtggagcgctacaccatggaggtggaggccaaggatggcggcggcctgagcacccagtgcaaggtgatcatcgagatcctggatgaaaatgacaacagccctgagatcatcatcaccagcctgagtgaccagatcctggagaacagccccccaggcatggtggtggccctcttcaagacccgggacctggactttggaggaaatggagaggtgcgctgcaacatcgagacagacatccccttcaagatctacagcagcagcaacaactactacaagctggtgacagatggagccctggaccgggagcagaccccagagtacaacgtgaccatcgtggccacagaccggggcaagccacccctgagcagcagccgcagcatcaccctgtatgtggccgacatcaatgacaatgcccctgtgtttgaccagaccagctatgtggtgcacgtggccgagaacaaccccccaggggccagcatcgcccaggtgtctgccagtgaccctgacctgggcctgaatggccacatctcctacagcatcgtggccagtgacctggagcccctggccgtgtcctcctatgtgtctgtgtctgcccagagcggcgtggtgtttgcccagagggcctttgaccacgagcagctgcgggcctttgccctgaccctgcaggcccgggaccacggcagccccaccctgagcgccaacgtgtccctgcgggtgctggtgggggacagaaatgacaatgccccccgggtgctgtacccagccctgggcccagatggcagcgccttctttgacatggtgcccaggtctgctgagcccggctacctggtgaccaaggtggtggccgtggatgctgacagcggccacaatgcctggctgagctaccacgtgctgcaggccagcgagcccggcctcttcagcctgggcctgaggactggagaggtgaggacagcccgggccctgggggacagagatgctgcccggcagaggctgctggtggccgtgagagatggcggccagccccccctgagcgccacagccaccctgcacctggtgtttgctgacaacctgcaggagatcctgcctgacctgagtgacaggcctgtgctgagtgacccccaggccgagctgcagttctacctggtggtggccctggccctgatctctgtgctcttcctgctggccgtcatcctggccatcgccctgcggctgcggcgcagcctgagccctgccacctgggactgcttccaccctggcctgtgtgtgaagagcggccctgtggtgccccccaactacagcgagggcaccctgccctacagctacaacctgtgcatcgcccacacaggcaccaaggagttcaacttcctgaagtgcagcgtgcccctgcacagcaatgaagacatggtgtgcagcgtgtcccctggggccctgatccccccccacggcggggaggacctgaccagccaccctgagaccctgaccagccaggccccacccaacacagactggaggttcagccaggcccagaggcctggcaccagcggcagccagaatggagatgacaccggcacctggcccaacaaccagtttgacacagagatgctgcaggccatgatcctggccagcgccagcgaggccgcagatggcagcagcaccctgggcggcggggccggcaccatgggcctgagcgcccgctatggcccccagttcaccctgcagcacgtgcctgactaccggcagaatgtgtacatccctggcagcaatgccaccctgaccaatgctgctgggaagagagatggcaaggccccagctggaggaaatggaaacaagaagaagagcggcaagaaggagaagaagtag

SEQ ID NO: 200436 - DNA, 2793 bp, Artificial Sequence
  derived and/or modified sequence
atgggcggcagctgcgcccagcggcggcgggccggcccccggcaggtgttgtttcctctccttctgccactgttttatcccacactgtctgaacccatccggtacagtatccccgaggagcttgctaaggggtctgtggtaggcaacctggccaaagatcttggactgtcagtactggatgtttctgctagaaagctgagagtaagcgcagaaaagctgcattttagcgtagatgcagagtcaggagatttgctagtcaaaaatcgtatcgatcgcgagcagatctgcaaggaaagaagaaggtgcgagctacagttggaggccgttgtggagaaccctcttaacatttttcatgtaattgttgtgatcgaagatgtaaatgaccacgcccctcagtttgacaagaaggagatccatcttgagattttcgagagtgcctcagctggaactcgtctgtccctggaccctgccacagatcccgatattaacatcaattccatcaaagactacaagataaattcaaatccctatttcagcttaatggtgagggtgaatagtgatggaggaaaataccccgagctgtccttagagaagctgctggaccgcgaggaacagcgatcccacagtttaatccttacggctttggacggaggcgacccaccacggagcgccacagcccatatcgagatctccgtcaaggacacgaacgataaccctcccgtgttttcacgcgacgaatataggatttccctctccgagaacctgcctcccggtagtccagttctccaggtaaccgctacggaccaggacgaaggagtgaacgcggaaatcaactactacttccggagcactgctcagtccaccaagcacatgttctctctcgatgagaagactggcatgattaagaacaatcaaagctttgacttcgaagatgttgagcggtatacaatggaagtggaggcgaaggacggaggggggctgtcaactcagtgcaaagttatcattgaaatcctggatgagaacgataactcacccgagatcatcattacttccctctctgaccagatcctggagaactccccccctgggatggttgtcgccctgtttaagactcgcgatctagatttcggcgggaatggtgaagtgcggtgtaacatcgagacggatatcccgttcaaaatatattcaagctcaaacaattactataagctagtcactgacggagctctggatagggagcagaccccagagtacaatgtcacaatagtggccaccgatagaggtaaaccccccctctcatcctcacgttccatcactctctatgtagctgacatcaacgataacgctcccgttttcgaccagaccagttacgtggttcatgtggcagaaaacaacccacccggggcctctatcgcacaggtgtccgccagtgaccctgacctgggcttgaatggacacatctcttacagcatcgtagcaagtgacttagagccactggccgtctcaagctatgtatcagtatcggctcagtccggggtcgtatttgcccaaagggctttcgatcacgagcagctgcgcgctttcgcactcacattgcaagctcgcgatcacggttctcctaccctgtctgctaatgtgagccttagggttcttgtgggggatcggaacgacaatgcacctcgtgttctgtatcctgcgctcggccccgacgggtcagccttctttgatatggtccctcgctccgcagagcccgggtacttagtaacaaaggtcgttgccgtagacgccgatagcggccacaatgcctggctttcatatcatgtcttgcaggcctctgaaccgggcctgttttccctcgggctcagaaccggcgaagtgagaacagcccgggctctcggggatagagatgctgcccgacagcggctgcttgttgccgtccgtgacgggggccaaccaccgctgagcgcaactgccacgcttcacctggtgtttgccgataacctccaggaaattctgcccgatctctcagaccgccctgtattgtcagatccccaagcggagctgcagttttacttggtagttgccctggcgcttatctccgtgctattcttgttggctgtgatccttgccatcgcccttaggttacgaagatcactgtctcctgccacttgggattgtttccaccccggtctctgtgtgaagtcgggtcctgtcgtaccacctaactacagcgagggcacgttgccttactcttataacctgtgcattgcccataccgggacaaaggaattcaacttcctaaaatgcagcgtgcccctccacagcaatgaggacatggtttgttccgtgtcacccggagctctgatccctccacacggcggagaggatctcacatcccaccccgaaaccctgacttcacaagccccccctaatacagattggcgtttctctcaggcacagagaccaggaacttcgggtagccaaaatggggatgacaccggaacgtggcccaataaccaatttgatacggaaatgcttcaggccatgatacttgcttcggcctcggaagcagctgacggatcctcaaccctaggggggggggctgggaccatggggctttccgccaggtatggtccacagtttaccctacagcatgtgcctgactatagacagaacgtgtacatccctgggtcaaacgccactctgaccaacgcggcaggaaagagggacgggaaggcacctgctggaggcaacggaaacaaaaagaagtctgggaaaaaagaaaaaaaatag

SEQ ID NO: 200437 - DNA, 2793 bp, Artificial Sequence
  derived and/or modified sequence
atgggaggatcatgcgcccagagaagaagggccggacctcgccaggtgctgttcccgcttcttctaccactgttctaccctacgctgagcgaaccgatcagatactccatccccgaggaactggcaaaaggaagtgtggttgggaatctcgctaaggacctggggctgagcgttctggatgtcagcgccagaaaactgcgtgtgagtgctgagaagcttcacttctctgtggacgccgagtctggcgacctgctggtgaaaaacagaatcgacagggagcaaatttgcaaagaaagacggagatgcgaactgcagctagaagcagtggtcgagaatcctctcaatatcttccacgttatcgttgtgatcgaggatgtcaacgatcatgcaccccagttcgataagaaggagatacaccttgagatcttcgaaagtgcaagtgctggcacccggctgagcctggacccagccacagaccctgacatcaacattaacagcataaaagattataagatcaatagtaatccctatttttcactcatggttagggtgaactctgatggaggaaagtatcccgaactctccctcgagaagctgctcgatagagaagaacaacggagtcattccctcattttgacagctctcgacggtggcgatccacccaggtcagccacagcccatatcgaaatttccgtgaaagatacaaatgataatccgcctgtgtttagccgggacgagtatagaataagtctgtcggaaaacttgcccccaggctctcccgtccttcaagtcaccgccactgatcaggatgaaggtgtcaatgcggaaattaattattatttcaggagcactgcccagagtacaaaacacatgtttagtttggatgagaaaactggtatgatcaaaaacaaccaatccttcgatttcgaggatgtagagcgttacacaatggaagtcgaggccaaagatggcggtggtctgtctacacagtgcaaagtgataattgaaatcctggatgagaacgataattccccagaaataatcataacatccctgagcgaccagattctggaaaatagcccaccagggatggtcgttgctctcttcaagacaagagatttggattttggagggaacggggaggtgaggtgtaatattgaaactgatattcccttcaaaatctattcatcctcaaataactattataaactggtgacagatggcgcactcgatcgcgagcagacacccgaatacaatgtcactatagttgccactgacagaggtaagccccctctctcttctagtagatcgattacactgtacgtggcggatattaacgacaatgccccagtatttgatcagacaagctatgtcgtgcatgtcgccgaaaacaaccctcctggggcaagcattgcgcaggtgtccgcaagtgatcccgacttaggccttaatggccacatcagctatagcatcgtggctagcgatctcgaaccattggccgtgagtagttacgtcagtgtctccgcgcagtcaggcgtcgtattcgcccagcgggcatttgaccatgagcaattgagagcttttgctcttaccctacaggcaagagaccacggaagtccaaccttgagcgccaacgtttccctcagagttctagttggtgacagaaacgataacgcccctagggtgttatatcctgctctcggacccgatgggagcgcattttttgacatggtaccaagaagcgcagaaccaggctatctggtgactaaggtcgtggccgtggatgccgattccggccataacgcctggctgtcttaccacgtcctgcaagcatcagagccaggactcttctctctcggcctgcggaccggggaagtgcgcacagcccgagcgctgggagaccgcgatgcggcacgacaacgcctactggttgctgtccgggatggcggtcagcctccccttagtgccaccgctaccctccatctcgtgtttgccgacaatttgcaggagatattgcccgatttgagcgataggccggtactttcagacccccaggcagagctgcagttttacctggtggtagctctggcgctgattagtgtgctgtttctcctggctgtaattctggctatagccttgcgactacgccgaagtctttctcccgcaacatgggattgcttccaccctgggctgtgtgtgaagagtggacccgttgtaccgcctaactacagcgagggtactctgccttactcctataatctatgtattgcccacacagggacgaaggaatttaacttcctgaaatgctctgtaccccttcattcaaacgaggatatggtatgcagtgtgagtccgggtgcccttatccctccacacggcggagaggacctgacctcgcatccggagactctgacgagccaagctccccctaataccgactggcggttcagccaagcccagcgaccaggcacatccgggagccagaatggggatgacacagggacttggccgaacaaccaattcgataccgagatgctgcaggccatgatactcgcatctgccagtgaggctgcggacggttcttctactctggggggaggcgctgggaccatgggactgtccgctagatacggccctcagtttacccttcagcatgtgccagattacagacaaaatgtctatattcctgggagcaatgccacactgacaaatgctgccggaaagcgcgacggcaaagcaccagcgggaggtaacggtaacaagaagaagtccggcaagaaggaaaaaaaatag

SEQ ID NO: 200438 - DNA, 4599 bp, Artificial Sequence
  derived and/or modified sequence
atgggagggagctgcgcgcagaggcgccgggccggcccgcggcaggtgctatttcctttgctgctgcctttgttctaccccaccctgagtgagccgatccgctactcgattccggaggagctggccaagggctcggtggtggggaacctcgctaaggatctagggctcagtgtcctggatgtgtcggctcgcaagctgcgagtgagcgcggagaagctgcacttcagcgtagacgcggagagcggggacttacttgtgaagaaccgaatagaccgtgagcaaatatgcaaagagagaagaagatgtgagttgcaattggaagctgtggtggaaaatcctttaaatatttttcatgtcattgtggtgattgaggatgttaatgaccacgcccctcaatttgataaaaaggaaatacatttagaaattttcgaatctgcatccgctggtacacgactatcgcttgaccctgccacggatcctgatataaacataaactcaattaaagattataagataaactctaatccttatttttcattaatggttagagttaattccgatggtggcaaatacccagagttatctctggagaaactcctagaccgggaagaacagagatctcatagcttgatattgactgccttggacggaggggacccaccaagaagtgccaccgctcacatagaaatttctgtcaaggataccaatgataaccccccggttttcagcagagacgaatatagaattagtcttagtgaaaatctgccccctgggtcccctgtgttgcaagtgacagccactgaccaggatgagggggtcaatgctgagataaactactacttccgaagcactgcccagagcacaaaacatatgttctcattggatgagaaaacaggtatgattaagaataaccagtcatttgattttgaagatgtagaaaggtacaccatggaagtggaagcgaaggacggaggtggtctctctacccagtgtaaagtaatcatagaaatccttgatgaaaacgacaacagcccagaaataatcatcacttctctctctgatcagattttggagaattcacctccaggaatggttgttgccctcttcaaaacacgggatctggatttcggaggaaatggagaagtcaggtgtaatatagaaacagacattccattcaagatttattcttcttccaataactactacaaactggtgacagatggagccctggaccgagagcagacaccagaatacaatgtcaccatcgtagccactgacaggggcaagccgcctctttcttccagtagaagcatcaccttgtatgtcgctgacatcaacgacaacgccccagttttcgaccagacgtcctacgtggtccacgtggccgagaacaacccgccaggagcctccattgcgcaagtgagcgcctctgacccggatttggggctcaatggccacatctcctactctatagtggcgagtgacctagagcccctggcggtgtcgtcatacgtgtcagtgagcgcgcagagcggggtggtgttcgcgcagcgcgcctttgatcacgagcagctgcgcgccttcgcgctcacgctgcaggcccgcgaccacggctcgcccacgctcagcgccaacgtgagcctgcgcgtgttggtgggagaccgcaatgacaacgcaccgcgggtgctgtacccagctctgggtcctgacggctccgcgttcttcgatatggtacctcgctctgcagagcccggctacctagtgactaaggtggtagcggtggacgccgactcgggacacaacgcctggctgtcctaccacgtgctgcaggccagtgagcccggactcttcagcctggggctgcgcactggggaggtgcgcacggctcgagccttaggcgacagggacgcagcccgccagcgcctgctggtcgctgtgcgtgacggtggacagccgccactctctgccaccgccacgcttcatctggtcttcgcagacaacttgcaagagatactgccagacctcagcgaccgccctgtactctctgacccccaggctgaactgcagttttacctggtggtggccttggccttaatctcagtgctcttcctcctcgccgtgattctggccattgccttgcgcctgcgacgctctctcagccctgctacttgggactgcttccatcctggtctctgtgtcaagtctggacctgtagttccccccaactacagtgaggggactttgccttattcttataatctgtgcattgcacatacgggtacaaaagagtttaatttcctaaaatgcagtgtgcccctacattccaatgaagacatggtttgcagtgtttctcctggagccttaattccacctcatggtggggaggatttgacttcacatcctgagactctgacttcgcaagccccgcccaacacggactggcgtttctctcaggcccagagacccggcaccagcggctcccaaaatggcgatgacaccggcacctggcccaacaaccagtttgacacagagatgctgcaagccatgatcttggcgtccgccagtgaagctgctgatgggagctccaccctgggagggggtgccggcaccatgggattgagcgcccgctacggaccccagttcaccctgcagcacgtgcccgactaccgccagaatgtctacatcccaggcagcaatgccacactgaccaacgcagctggcaagcgggatggcaaggccccagcaggtggcaatggcaacaagaagaagtcgggcaagaaggagaagaagtaacatggaggccaggccaagagccacagggcggcctctccccaaccagcccagcttctccttacctgcacccaggcctcagagtttcagggctaacccccagaatactggtaggggccaaggccatgctccccttgggaaacagaaacaagtgcccagtcagcacctaccccttcccccccagggggttgaatatgcaaaagcagttccgctgggaacccccatccaatcaactgctgtacccatgggggtagtggggttactgtagacaccaagaaccatttgccacaccccgtttagttacagctgaactcctccatcttccaaatcaatcaggcccatccatcccatgcctccctcctccccaccccactccaacagttcctctttcccgagtaaggtggttggggtgttgaagtaccaagtaacctacaagcctcctagttctgaaaagttggaagggcatcatgacctcttggcctctcctttgattctcaatcttcccccaaagcatggtttggtgccagccccttcacctccttccagagcccaagatcaatgctcaagttttggaggacatgatcaccatccccatggtactgatgcttgctggatttagggagggcattttgctaccaagcctcttcccaacgccctggggaccagtcttctgttttgtttttcattgtttgacgtttccactgcatgccttgacttcccccacctcctcctcaaacaagagactccactgcatgttccaagacagtatggggtggtaagataaggaagggaagtgtgtggatgtggatggtgggggcatggacaaagcttgacacatcaagttatcaaggccttggaggaggctctgtatgtcctcaggggactgacaacatcctccagattccagccataaaccaataactaggctggacccttcccactacataatagggctcagcccaggcagccagctttgggctgagctaacaggaccaatggattaaactggcatttcagtccaaggaagctcgaagcaggtttaggaccaggtccccttgagaggtcagaggggcctctgtgggtgctgggtactccagaggtgccactggtggaagggtcagcggagccccagcaggaagggtgggccagccaggccattcttagtccctgggttggggaggcagggagctagggcagggaccaaatgaacagaaagtctcagcccaggatggggcttcttcaacagggcccctgccctcctgaagcctcagtccttcaccttgccaggtgccgtttctcttccgtgaaggccactgcccaggtccccagtgcgccccctagtggccatagcctggttaaagttccccagtgcctccttgtgcatagaccttcttctcccacccccttctgcccctgggtccccggccatccagcggggctgccagagaaccccagacctgcccttacagtagtgtagcgccccctccctctttcggctggtgtagaatagccagtagtgtagtgcggtgtgcttttacgtgatggcgggtgggcagcgggcggcgggctccgcgcagccgtctgtccttgatctgcccgcggcggcccgtgttgtgttttgtgctgtgtccacgcgctaaggcgaccccctcccccgtactgacttctcctataagcgcttctcttcgcatagtcacgtagctcccaccccaccctcttcctgtgtctcacgcaagttttatactctaatatttatatggctttttttcttcgacaaaaaaataataaaacgtttcttctgaaaagctg

SEQ ID NO: 200439 - DNA, 2793 bp, Artificial Sequence
  derived and/or modified sequence
atgggcggcagctgcgcccagagaagaagagccggccccagacaggtgctgttccccctgctgctgcccctgttctaccccaccctgagcgagcccatcagatacagcatccccgaggagctggccaagggcagcgtggtgggcaacctggccaaggacctgggcctgagcgtgctggacgtgagcgccagaaagctgagagtgagcgccgagaagctgcacttcagcgtggacgccgagagcggcgacctgctggtgaagaacagaatcgacagagagcagatctgcaaggagagaagaagatgcgagctgcagctggaggccgtggtggagaaccccctgaacatcttccacgtgatcgtggtgatcgaggacgtgaacgaccacgccccccagttcgacaagaaggagatccacctggagatcttcgagagcgccagcgccggcaccagactgagcctggaccccgccaccgaccccgacatcaacatcaacagcatcaaggactacaagatcaacagcaacccctacttcagcctgatggtgagagtgaacagcgacggcggcaagtaccccgagctgagcctggagaagctgctggacagagaggagcagagaagccacagcctgatcctgaccgccctggacggcggcgacccccccagaagcgccaccgcccacatcgagatcagcgtgaaggacaccaacgacaacccccccgtgttcagcagagacgagtacagaatcagcctgagcgagaacctgccccccggcagccccgtgctgcaggtgaccgccaccgaccaggacgagggcgtgaacgccgagatcaactactacttcagaagcaccgcccagagcaccaagcacatgttcagcctggacgagaagaccggcatgatcaagaacaaccagagcttcgacttcgaggacgtggagagatacaccatggaggtggaggccaaggacggcggcggcctgagcacccagtgcaaggtgatcatcgagatcctggacgagaacgacaacagccccgagatcatcatcaccagcctgagcgaccagatcctggagaacagcccccccggcatggtggtggccctgttcaagaccagagacctggacttcggcggcaacggcgaggtgagatgcaacatcgagaccgacatccccttcaagatctacagcagcagcaacaactactacaagctggtgaccgacggcgccctggacagagagcagacccccgagtacaacgtgaccatcgtggccaccgacagaggcaagccccccctgagcagcagcagaagcatcaccctgtacgtggccgacatcaacgacaacgcccccgtgttcgaccagaccagctacgtggtgcacgtggccgagaacaacccccccggcgccagcatcgcccaggtgagcgccagcgaccccgacctgggcctgaacggccacatcagctacagcatcgtggccagcgacctggagcccctggccgtgagcagctacgtgagcgtgagcgcccagagcggcgtggtgttcgcccagagagccttcgaccacgagcagctgagagccttcgccctgaccctgcaggccagagaccacggcagccccaccctgagcgccaacgtgagcctgagagtgctggtgggcgacagaaacgacaacgcccccagagtgctgtaccccgccctgggccccgacggcagcgccttcttcgacatggtgcccagaagcgccgagcccggctacctggtgaccaaggtggtggccgtggacgccgacagcggccacaacgcctggctgagctaccacgtgctgcaggccagcgagcccggcctgttcagcctgggcctgagaaccggcgaggtgagaaccgccagagccctgggcgacagagacgccgccagacagagactgctggtggccgtgagagacggcggccagccccccctgagcgccaccgccaccctgcacctggtgttcgccgacaacctgcaggagatcctgcccgacctgagcgacagacccgtgctgagcgacccccaggccgagctgcagttctacctggtggtggccctggccctgatcagcgtgctgttcctgctggccgtgatcctggccatcgccctgagactgagaagaagcctgagccccgccacctgggactgcttccaccccggcctgtgcgtgaagagcggccccgtggtgccccccaactacagcgagggcaccctgccctacagctacaacctgtgcatcgcccacaccggcaccaaggagttcaacttcctgaagtgcagcgtgcccctgcacagcaacgaggacatggtgtgcagcgtgagccccggcgccctgatccccccccacggcggcgaggacctgaccagccaccccgagaccctgaccagccaggccccccccaacaccgactggagattcagccaggcccagagacccggcaccagcggcagccagaacggcgacgacaccggcacctggcccaacaaccagttcgacaccgagatgctgcaggccatgatcctggccagcgccagcgaggccgccgacggcagcagcaccctgggcggcggcgccggcaccatgggcctgagcgccagatacggcccccagttcaccctgcagcacgtgcccgactacagacagaacgtgtacatccccggcagcaacgccaccctgaccaacgccgccggcaagagagacggcaaggcccccgccggcggcaacggcaacaagaagaagagcggcaagaaggagaagaagtag

SEQ ID NO: 200440 - protein, 798 aa, Artificial Sequence
  derived and/or modified sequence
MEAGEGKERVPKQRQVLIFFVLLGIAQASCQPRHYSVAEETESGSFVANLLKDLGLEIGELAVRGARVVSKGKKMHLQFDRQTGDLLLNEKLDREELCGPTEPCVLPFQVLLENPLQFFQAELRIRDVNDHSPVFLDKEILLKIPESITPGTTFLIERAQDLDVGTNSLQNYTISPNFHFHLNLQDSLDGIILPQLVLNRALDREEQPEIRLTLTALDGGSPPRSGTALVRIEVVDINDNVPEFAKLLYEVQIPEDSPVGSQVAIVSARDLDIGTNGEISYAFSQASEDIRKTFRLSAKSGELLLRQKLDFESIQTYTVNIQATDGGGLSGTCVVFVQVMDLNDNPPELTMSTLINQIPENLQDTLIAVFSVSDPDSGDNGRMVCSIQDDLPFFLKPSVENFYTLVISTALDRETRSEYNITITVTDFGTPRLKTEHNITVLVSDVNDNAPAFTQTSYTLFVRENNSPALHIGSVSATDRDSGTNAQVTYSLLPPQDPHLPLASLVSINADNGHLFALQSLDYEALQAFEFRVGAADRGSPALSSEALVRVLVLDANDNSPFVLYPLQNGSAPCTELVPRAAEPGYLVTKVVAVDGDSGQNAWLSYQLLKATEPGLFGVWAHNGEVRTARLLRERDAAKQRLVVLVKDNGEPPRSATATLHVLLVDGFSQPYLLLPEAAPAQAQADLLTVYLVVALASVSSLFLFSVLLFVAVRLCRRSRAASVGRCSVPEGPFPGQMVDVSGTGTLSQSYQYEVCLTGGSGTNEFKFLKPIIPNFVAQGAERVSEANPSFRKSFEFT

SEQ ID NO: 200441 - DNA, 2397 bp, Artificial Sequence
  derived and/or modified sequence
atggaagccggtgaggggaaggaaagggtgcccaagcaacgccaggtgttaatattttttgttcttctgggaatcgctcaggcttcatgtcagcctcgccactacagcgtagccgaagaaactgaaagcggctcttttgtcgccaacttattaaaggacctgggcctggaaatcggtgaactcgcagtgcgtggcgcgagggtggtaagcaaagggaaaaagatgcacctccagttcgaccgtcagacaggtgacttgcttcttaacgagaagctggatagagaggagttgtgcggcccaaccgaaccatgtgtgctgcccttccaagtgcttctcgaaaaccccctgcaatttttccaggctgagctacggatcagagatgttaacgatcattcgccggttttcttggacaaagagatcctgctcaaaattcccgaaagtattacacctggtactacgttcttaatcgaacgcgcccaggatctcgatgttggaaccaatagtttacagaactacacaatcagtcccaattttcatttccaccttaaccttcaggacagccttgatggcattattttgccacagctggtgctgaaccgggccctggacagggaagagcagcctgagattcgcctcaccctgaccgctctggacggtggatcgcccccacggagtggtacagctctagtaagaatagaagtagttgatattaacgacaacgtgcccgagttcgcaaaattgctgtacgaggttcagattccagaggacagtccggtaggctcccaagtagctatcgtcagcgcccgagacctggatatcggcacaaacggggaaatttcatacgcgtttagtcaggcatcagaagacatccgcaaaacgttcagactgtctgctaagtccggcgagttgttgcttagacagaaattggatttcgagtccatccagacatacaccgttaacattcaggcgaccgacggagggggcctatctggtacatgcgtggttttcgtacaggtgatggaccttaatgataatccccctgagctgaccatgtcaacacttatcaaccagatacctgaaaatctgcaggacaccctaatcgcggttttttctgtatccgaccccgatagcggcgacaacgggcggatggtgtgtagcatccaagacgatctccctttttttctaaaaccaagcgtcgaaaacttttatacacttgtgatctctaccgccctggacagggagacaaggtcagagtacaatattacaattacagttacagactttggtacacctcgactcaagactgagcacaacattacagttctagtctctgatgtcaatgataatgccccagcattcacccagacaagctacacattgtttgtgagggagaacaatagtcccgccctccacattgggtctgtttctgccaccgaccgtgatagtggtacaaatgctcaggtaacatatagcctgttgcccccccaagatccacacctgccactcgcaagtttagtaagcattaacgccgataatggtcatctgtttgctctccagtcactggactatgaagccttacaggcctttgagttcagagtgggcgccgccgacagagggtcccctgccctgagtagcgaggcactggtgagggtcctcgttctggacgccaacgacaactcaccgttcgtgctgtatcctctgcagaatggatcagccccatgtaccgagcttgtgccgcgggcagccgagccaggctacctcgtgaccaaagtggttgccgtcgacggcgactctggtcagaacgcgtggttgtcctaccagctgctgaaggccacagagccagggctcttcggagtgtgggcacacaacggagaagtgaggaccgctcggctcttacgcgagcgagacgctgccaaacagcgcctggtggtcctggtgaaggacaacggagaaccaccgaggagtgctacagctacgctccatgtgttactagtggatggattcagccagccttatcttctcctgcccgaggctgctcccgcccaggctcaagcagatttgctgacagtctaccttgttgtggccctcgcatcagtcagtagtctgttcctgttttctgtcctgttattcgtggcggtcagactttgcagacggagtcgggcggccagcgtgggacgttgcagcgtgccggaggggccgttccctggccagatggtggatgtgtccgggaccggcacattgagccagtcctatcaatacgaggtatgtctcacagggggatctggcaccaacgagtttaagttcctgaaacctatcataccaaacttcgtggcccagggggctgagagagtgtctgaggcaaacccctcatttagaaagagtttcgagtttacttag

SEQ ID NO: 200442 - DNA, 2397 bp, Artificial Sequence
  derived and/or modified sequence
atggaggccggggagggcaaggagcgggtgcccaagcagaggcaggtgctgatcttctttgtgctgctgggcatcgcccaggccagctgccagcccaggcactacagcgtggccgaggagacagaaagtggcagctttgtggccaacctgctgaaggacctgggcctggagatcggggagctggccgtgcggggggcccgggtggtgtccaagggcaagaagatgcacctgcagtttgaccggcagacaggagacctgctgctgaatgagaagctggaccgggaggagctgtgtggccccacagagccctgtgtgctgcccttccaggtgctgctggagaaccccctgcagttcttccaggccgagctgcgcatcagagatgtgaatgaccacagccctgtgttcctggacaaggagatcctgctgaagatccctgagagcatcaccccaggcaccaccttcctgattgaaagagcccaggacctggatgtgggcaccaacagcctgcagaactacaccatcagccccaacttccacttccacctgaacctgcaggacagcctggatggcatcatcctgccccagctggtgctgaacagagccctggaccgggaggagcagcctgagatccggctgaccctgacagccctggatggcggcagcccccccaggtctggaacagccctggtgcgcatcgaggtggtggacatcaatgacaacgtgcctgagtttgccaagctgctgtatgaggtgcagatccctgaggacagccctgtgggcagccaggtggccatcgtgtctgcccgggacctggacatcggcaccaacggggagatctcctatgccttcagccaggccagcgaggacatcaggaagaccttccggctgagcgccaagagcggggagctgctgctgcggcagaagctggactttgagagcatccagacctacacagtgaacatccaggccacagatggcggcggcctgagcggcacctgtgtggtgtttgtgcaggtgatggacctgaatgacaaccccccagagctgaccatgagcaccctcatcaaccagatccctgagaacctgcaggacaccctgattgctgtgttttctgtgtctgaccctgattctggggacaatggccgcatggtgtgcagcatccaggatgacctgcccttcttcctgaagcccagcgtggagaacttctacaccctggtgatcagcacagccctggaccgggagaccaggtctgagtacaacatcaccatcaccgtgacagactttggcaccccccggctgaagacagagcacaacatcaccgtgctggtgtctgatgtgaatgacaatgccccagccttcacccagaccagctacaccctgtttgtgcgggagaacaacagccctgccctgcacatcggctctgtgtctgccacagaccgggacagcggcaccaatgcccaggtgacctacagcctgctgcccccccaggacccccacctgcccctggccagcctggtgtccatcaatgctgacaatggccacctgtttgccctgcagagcctggactatgaggccctgcaggcctttgagttccgggtgggcgctgctgaccggggcagccctgccctgagcagcgaggccctggtgcgggtgctggtgctggatgccaatgacaacagcccctttgtgctgtaccccctgcagaatggaagtgccccctgcacagagctggtgcccagggctgctgagcccggctacctggtgaccaaggtggtggccgtggatggagacagcggccagaatgcctggctgagctaccagctgctgaaggccacagagcccggcctgtttggagtgtgggcccacaatggagaggtgaggacagcccggctgctgcgggagagagatgctgccaagcagaggctggtggtgctggtgaaggacaatggagagccccccaggtctgccacagccaccctgcacgtgctgctggtggatggcttcagccagccctacctgctgctgcctgaggccgccccagcccaggcccaggccgacctgctgactgtgtacctggtggtggccctggcctctgtgagcagcctcttcctgttctctgtgctgctgtttgtggccgtgcggctgtgcagaagaagcagagctgcctctgtgggccgctgcagcgtgcctgagggccccttccctggccagatggtggatgtgtctggcaccggcaccctgagccagagctaccagtatgaggtgtgcctgaccggcggcagcggcaccaatgagttcaagttcctgaagcccatcatccccaactttgtggcccagggcgctgagcgggtgtctgaggccaaccccagcttcaggaagagctttgagttcacctag

SEQ ID NO: 200443 - DNA, 2397 bp, Artificial Sequence
  derived and/or modified sequence
atggaggccggcgagggcaaggagcgggtgcccaagcagcggcaggtcctgattttctttgtgctgctcggaattgctcaggcatcgtgtcagccaaggcactactctgtggccgaggagacagaatcggggtctttcgtggccaatctcctcaaagacctggggcttgagatcggcgagctagctgttagaggtgcccgagtggtaagcaagggcaagaagatgcatctgcaatttgatcgtcagaccggcgacttgctactgaatgagaaactggacagggaggaactgtgtggcccaactgagccatgtgtgcttcccttccaggtgctgctggaaaatcccctacagtttttccaggccgaactgaggatacgcgacgtcaacgatcacagcccagtctttctcgataaggaaattctgctgaagatacctgaatctatcacacccggcacaacatttctgatcgaacgcgcgcaggatctggacgtgggcaccaactcactgcagaattacaccataagcccaaatttccactttcatcttaatttgcaggatagtcttgacggtatcatcctcccccagctggttttgaacagggcacttgatagagaagagcagccagaaatccggttgaccttaactgccctggacggcggatccccacctagatccggcacggccctcgtaagaatcgaagtagtagacattaacgataacgtccccgaatttgccaaactgctgtacgaggtgcaaatccctgaggacagccccgtcggcagtcaggtggcgatcgtgagcgctagagatctcgacataggtacaaacggggagatctcctatgcgttctcccaggcatctgaagatatccggaaaacttttcggctgagtgctaagagcggagaacttttgcttcggcagaaacttgacttcgagagtatccaaacttacacggttaacatacaggctacagatggcggcgggctgtcaggaacgtgtgtggttttcgtgcaggtgatggacctgaatgataatccccctgagctgacaatgagcacactgattaatcagatcccagaaaatctacaagacacattgattgcagtgttctcggtctcagatccagactctggcgataatggaagaatggtgtgtagcatccaagacgacctcccttttttcttgaagcccagtgtggaaaatttttacacacttgtgatttcaaccgcattggacagagaaacaaggtctgagtacaatatcaccatcactgtgaccgattttggaactcctaggttgaaaaccgagcacaacatcaccgttctggtgtccgatgtgaatgacaatgcacccgcattcacacagaccagctataccctctttgttcgggagaacaatagccccgccctgcatatcggttcagtatctgcaacagatagagattccgggactaatgctcaggtcacatactcattactgccaccgcaagatccccacctcccattggcctctctggtttctataaatgccgacaatggacatctcttcgcgctgcagagcctggactacgaggccttgcaggcattcgaattccgggtgggtgccgccgaccggggtagccctgccctttcctccgaggcactggttcgtgtcctggtgctcgatgcgaatgataactcccctttcgtgctttatcctcttcagaacggctccgccccctgtacagaactggtgccgcgagctgcagaacccggctacctggtaacgaaggtggtagcggtggacggtgactctggccagaatgcttggctttcatatcaacttctcaaggcaacagagcccgggctgtttggggtctgggcccataacggagaggttcgtacggcaagactgctcagggagagggatgccgccaaacagcgcttggtcgtgcttgttaaagacaacggcgaaccccctagaagcgcaacagccactttgcacgttctactcgtggacggattctcacagccttatttgctgctgcccgaggccgcaccagcccaagcacaggccgatcttctaacagtttatctggtggtagccctggctagtgtgagcagcctctttctgttcagcgtcttactcttcgttgccgtaaggctgtgtcgaaggtctagggctgcctccgttggacgatgtagcgtccccgaagggcccttcccaggccagatggttgacgtctctgggacgggtacgttaagccagtcttaccagtatgaagtctgcctgactggagggtccggaacaaatgagtttaagttcctaaagcctataatcccgaattttgttgcccaaggagcggagcgtgtgagcgaagctaaccccagtttccgtaaaagtttcgaatttacatag

SEQ ID NO: 200444 - DNA, 2397 bp, Artificial Sequence
  derived and/or modified sequence
atggaggccggagagggaaaggagcgggtgcccaagcaaagacaagttctcatcttctttgtccttttgggcatcgcccaggcaagctgccagcccaggcactatagcgtcgcagaggagactgaaagcgggtcctttgtggccaacctgctcaaggacctcggcctggagattggagaactggcggtcagaggggctcgggtcgtgtctaaaggcaagaagatgcatctccaattcgacagacagaccggtgatttactgcttaacgaaaagctcgaccgtgaagagctgtgcgggcctaccgagccctgtgttctgcctttccaggtcctcctggagaatcccttgcagttctttcaagcagaattacggattagggacgtgaacgaccacagccccgtcttcctggacaaggagattctgttgaaaattcccgagtccattacaccgggtacaacattcctgatcgagagggctcaagatctggatgtggggaccaacagtttgcagaactacacaatttcaccgaattttcacttccaccttaatctccaagattcactcgatggcataattttaccccaactggtgctgaatagggcactggaccgggaagaacagcccgagattcggttgacactcacagcgctcgacggtggctccccaccacgctccggaacagcccttgttcgcattgaagtggtggacatcaatgataacgtccctgaattcgctaaattgctctacgaagtacagataccagaagattcccctgtgggctcccaggtggcgatcgtgtcagccagagatctggacattgggaccaacggagaaatcagctatgcttttagccaggcctccgaggatatccgaaaaacattccggctttcggccaaaagtggtgaactgctgctcagacagaaactggactttgaaagcattcagacctatactgtcaacatccaggcaacggatggcggagggctttctggtacttgtgtagtatttgtacaggtgatggacttaaatgataatccacccgaactcaccatgtctaccctcattaaccagattccagaaaatctgcaggacactcttattgcagtcttttcagtaagtgatccagattctggggacaacggcagaatggtgtgttcaattcaggatgacctgccattctttcttaaaccatccgtggaaaacttttataccctcgtcatttccactgctctggaccgcgagaccagaagcgagtataacatcaccatcactgtaactgacttcggtaccccgagattgaagacggagcacaacatcaccgtgctggtctccgacgtcaatgacaacgcacccgcatttacacaaacatcatataccctgtttgtgcgggaaaataatagccccgctttacacatcggctccgtgtccgcgacagacagggattcaggcacgaacgcccaggtgacttattccttgctcccacctcaggaccctcatctccctctggcctctctggtgtccattaatgctgacaatgggcaccttttcgctctgcagagtcttgactatgaggccctccaggctttcgagttccgtgtaggtgctgccgatagaggcagccccgcacttagctccgaggcgctggtcagggtcctggttttggacgcaaatgacaattcaccgtttgtgctctaccccctgcaaaacggaagtgccccatgcacagaactagtgccgagggctgcagaaccaggctatttggtaacaaaagtcgttgctgtggatggtgattctggacagaatgcatggctgtcataccagctattaaaagcaactgagcccggattgttcggggtgtgggcccataacggggaagtccggactgctagactccttcgcgaaagggacgctgccaagcagaggctggtggttctagttaaggataatggcgaaccacccaggtccgctactgcaaccctccatgtcctgttggtcgatggctttagtcagccttatctgctgctgccagaagccgctcccgcacaggcacaggctgacctgctgaccgtctatctggtggtggccctggcatcagtgtcctcgctgtttctctttagtgtcctgttatttgttgccgtcagactctgccgtcgcagtagagccgcttccgtgggaagatgcagcgttcctgagggaccatttccagggcaaatggtggatgtaagcgggacaggtacactgagtcagagctaccagtacgaggtgtgcttgactggcggatccggtaccaatgaattcaagttcctgaaaccaatcattcccaacttcgttgcgcagggcgcagaacgtgttagtgaggccaacccctcattccgaaaaagcttcgagtttacctag

SEQ ID NO: 200445 - DNA, 2736 bp, Artificial Sequence
  derived and/or modified sequence
ggaagaggaggctttctaaggcggtcgctccgggaaatccgggccctaggattgtccactcatcccagtatcagcgagatacggggagatagagttagcgacaacgtgagccagagctggagcacgtttggtgagagaccagaaagcaatggaggccggagaggggaaggagcgcgttccgaaacaaaggcaagtcctgatattctttgttttgctgggcatagctcaggctagttgccagcctaggcactattcagtggccgaggaaacggagagtggctcctttgtggccaatttgttaaaagacctggggctggagataggagaacttgctgtgaggggggccagggtcgtttccaaaggaaaaaaaatgcatttgcagttcgataggcagaccggggatttgttgttaaatgagaaattggaccgggaggagctgtgcggccccacagagccctgtgtcctacctttccaggtgttactagaaaatcccttgcagttttttcaggcggagctacggattagggacgtaaatgatcattccccagttttcctagacaaagaaatacttttgaaaattccagaaagtatcactcctggaactactttcttaatagaacgtgcccaggacttggatgtaggaaccaacagtctccaaaattacacaatcagtcccaatttccactttcatcttaatttacaagacagtctcgatggcataatattaccacagctggtgctgaacagagccctggatcgcgaggagcagcctgagatcaggttaaccctcacagcgctagatggcgggagtccacccaggtccggcacggccctggtacggattgaagttgtggacatcaatgacaacgtcccagagtttgcaaagctgctctatgaggtgcagatcccggaggacagccccgttggatcccaggttgccatcgtctctgccagggatttagacattggaactaatggagaaatatcttatgcattttcccaagcatctgaagacattcgcaaaacgtttcgattaagtgcaaaatcgggagaactgcttttaagacagaaactggatttcgaatccatccagacatacacagtaaatattcaggcgacagatggtgggggcctatctggaacttgtgtggtatttgtccaagtgatggatttgaatgacaatcctccggaactaactatgtcgacacttatcaatcagatcccagaaaacttgcaggacaccctcattgctgtattcagcgtttcagatcctgactccggagacaacggaaggatggtgtgctccatccaagatgatcttccttttttcttgaaaccttctgttgagaacttttacactctggtgataagcacggccctggaccgggagaccagatccgaatacaacatcaccatcaccgtcaccgacttcgggacacccaggctgaaaaccgagcacaacataaccgtgctggtctccgacgtcaatgacaacgcccccgccttcacccaaacctcctacaccctgttcgtccgcgagaacaacagccccgccctgcacatcggcagcgtcagcgccacagacagagactcgggcaccaacgcccaggtcacctactcgctgctgccgccccaggacccgcacctgcccctcgcctccctggtctccatcaacgcggacaacggccacctgttcgctctccagtcgctggactacgaggccctgcaggcgttcgagttccgcgtgggcgccgcagaccgcggctccccggcgttgagcagcgaggcgctggtgcgcgtgctggtgctggacgccaacgacaactcgcccttcgtgctgtacccgctgcagaacggctccgcgccctgcaccgagctggtgccccgggcggccgagccgggctacctggtgaccaaggtggtggcggtggacggcgactcgggccagaacgcctggctgtcgtaccagctgctcaaggccacggagcccgggctgttcggcgtgtgggcgcacaatggcgaggtgcgcaccgccaggctgctgagggagcgcgacgctgccaagcagaggctggtggtgctggtcaaggacaatggcgagcctccgcgctcggccaccgccacgctgcacgtgctcctggtggacggcttctcccagccctacctgctgctcccggaggcggcaccggcccaggcccaggccgacttgctcaccgtctacctggtggtggcgttggcctcggtgtcttcgctcttcctcttctcggtgctcctgttcgtggcggtgcggctgtgcaggaggagcagggcggcctcggtgggtcgctgctcggtgcccgagggcccctttccagggcagatggtggacgtgagcggcaccgggaccctgtcccagagctaccagtacgaggtgtgtctgactggaggctccgggacaaatgagttcaagttcctgaagccaattatccccaacttcgttgctcagggtgcagagagggttagcgaggcaaatcccagtttcaggaagagctttgaattcacttaagtgttaataaggatctactgaggctagtctcgtttaatttgtggaaagtccttttttactgctttgcccattggaggtgtctccttttattagaaagtaaccatcttattccaattctatgcatgttactggtatttataaatgtatgagtttttttgcggtataataaatgtaaattttctttgtattct

SEQ ID NO: 200446 - DNA, 2397 bp, Artificial Sequence
  derived and/or modified sequence
atggaggccggcgagggcaaggagagagtgcccaagcagagacaggtgctgatcttcttcgtgctgctgggcatcgcccaggccagctgccagcccagacactacagcgtggccgaggagaccgagagcggcagcttcgtggccaacctgctgaaggacctgggcctggagatcggcgagctggccgtgagaggcgccagagtggtgagcaagggcaagaagatgcacctgcagttcgacagacagaccggcgacctgctgctgaacgagaagctggacagagaggagctgtgcggccccaccgagccctgcgtgctgcccttccaggtgctgctggagaaccccctgcagttcttccaggccgagctgagaatcagagacgtgaacgaccacagccccgtgttcctggacaaggagatcctgctgaagatccccgagagcatcacccccggcaccaccttcctgatcgagagagcccaggacctggacgtgggcaccaacagcctgcagaactacaccatcagccccaacttccacttccacctgaacctgcaggacagcctggacggcatcatcctgccccagctggtgctgaacagagccctggacagagaggagcagcccgagatcagactgaccctgaccgccctggacggcggcagcccccccagaagcggcaccgccctggtgagaatcgaggtggtggacatcaacgacaacgtgcccgagttcgccaagctgctgtacgaggtgcagatccccgaggacagccccgtgggcagccaggtggccatcgtgagcgccagagacctggacatcggcaccaacggcgagatcagctacgccttcagccaggccagcgaggacatcagaaagaccttcagactgagcgccaagagcggcgagctgctgctgagacagaagctggacttcgagagcatccagacctacaccgtgaacatccaggccaccgacggcggcggcctgagcggcacctgcgtggtgttcgtgcaggtgatggacctgaacgacaacccccccgagctgaccatgagcaccctgatcaaccagatccccgagaacctgcaggacaccctgatcgccgtgttcagcgtgagcgaccccgacagcggcgacaacggcagaatggtgtgcagcatccaggacgacctgcccttcttcctgaagcccagcgtggagaacttctacaccctggtgatcagcaccgccctggacagagagaccagaagcgagtacaacatcaccatcaccgtgaccgacttcggcacccccagactgaagaccgagcacaacatcaccgtgctggtgagcgacgtgaacgacaacgcccccgccttcacccagaccagctacaccctgttcgtgagagagaacaacagccccgccctgcacatcggcagcgtgagcgccaccgacagagacagcggcaccaacgcccaggtgacctacagcctgctgcccccccaggacccccacctgcccctggccagcctggtgagcatcaacgccgacaacggccacctgttcgccctgcagagcctggactacgaggccctgcaggccttcgagttcagagtgggcgccgccgacagaggcagccccgccctgagcagcgaggccctggtgagagtgctggtgctggacgccaacgacaacagccccttcgtgctgtaccccctgcagaacggcagcgccccctgcaccgagctggtgcccagagccgccgagcccggctacctggtgaccaaggtggtggccgtggacggcgacagcggccagaacgcctggctgagctaccagctgctgaaggccaccgagcccggcctgttcggcgtgtgggcccacaacggcgaggtgagaaccgccagactgctgagagagagagacgccgccaagcagagactggtggtgctggtgaaggacaacggcgagccccccagaagcgccaccgccaccctgcacgtgctgctggtggacggcttcagccagccctacctgctgctgcccgaggccgcccccgcccaggcccaggccgacctgctgaccgtgtacctggtggtggccctggccagcgtgagcagcctgttcctgttcagcgtgctgctgttcgtggccgtgagactgtgcagaagaagcagagccgccagcgtgggcagatgcagcgtgcccgagggccccttccccggccagatggtggacgtgagcggcaccggcaccctgagccagagctaccagtacgaggtgtgcctgaccggcggcagcggcaccaacgagttcaagttcctgaagcccatcatccccaacttcgtggcccagggcgccgagagagtgagcgaggccaaccccagcttcagaaagagcttcgagttcacctag

SEQ ID NO: 200447 - protein, 796 aa, Artificial Sequence
  derived and/or modified sequence
MEAGGERFLRQRQVLLLFVFLGGSLAGSESRRYSVAEEKEKGFLIANLAKDLGLRVEELAARGAQVVSKGNKQHFQLSHQTGDLLLNEKLDREELCGPTEPCILHFQILLQNPLQFVTNELRIIDVNDHSPVFFENEMHLKILESTLPGTVIPLGNAEDLDVGRNSLQNYTITPNSHFHVLTRSRRDGRKYPELVLDKALDREEQPELSLTLTALDGGSPPRSGTAQINIQVLDINDNAPEFAQPLYEVAVLENTPVNSVIVTVSASDLDTGSFGTISYAFFHASEEIRKTFQLNPITGDMQLVKYLNFEAINSYEVDIEAKDGGGLSGKSTVIVQVVDVNDNPPELTLSSVNSPIPENSGETVLAVFSVSDLDSGDNGRVMCSIENNLPFFLKPSVENFYTLVSEGALDRETRSEYNITITITDLGTPRLKTKYNITVLVSDVNDNAPAFTQISYTLFVRENNSPALHIGSVSATDRDSGTNAQVTYSLLPPQDPHLPLSSLVSINADNGHLFALRSLDYEALQAFEFRVGATDRGSPALSSEALVRVLVLDANDNSPFVLYPLQNGSAPCTELVPRAAEPGYLVTKVVAVDGDSGQNAWLSYQLLKATEPGLFGVWAHNGEVRTARLLSERDAAKHRLVVLVKDNGEPPRSATATLHVLLVDGFSQPYLPLPEAAPAQAQADLLTVYLVVALASVSSLFLFSVLLFVAVRLCRRSRAASVGRCSVPEGPFPGQMVDVSGTGTLSQSYQYEVCLTGGSGTNEFKFLKPIIPNFVAQGAERVSEANPSFRKSFEFS

SEQ ID NO: 200448 - DNA, 2391 bp, Artificial Sequence
  derived and/or modified sequence
atggaagctggtggggaacgcttcttgaggcagcgacaagtcctcctcctattcgtgttcctcggagggtccctcgctggatctgagagcagaaggtattcagtcgccgaggagaaagagaaaggtttcctgatcgccaatctggcgaaagacttgggactgagggtcgaagagttagctgcccgcggtgcccaagtcgtgagtaaaggtaacaaacaacatttccagctgtctcaccagaccggtgatctgctgctgaacgaaaaactggaccgggaggaactgtgtggccctaccgagccatgcatcctgcatttccagatactgttgcagaacccacttcaatttgttaccaatgagctccggattattgacgttaacgatcatagccccgtgtttttcgaaaatgagatgcatctcaaaatattggaatcaaccctgcccggaacagtcattcccctcggtaatgccgaggaccttgacgtcggcaggaattctcttcaaaactataccattactccaaactctcacttccacgtccttacaaggagccggcgggatgggagaaagtacccagaattagtactggacaaagccctggacagagaggaacagccagagttgagcctaactttgaccgccctcgacggaggtagccctcctaggtctgggactgcccagatcaacattcaggtgctggatatcaatgacaatgcccccgaattcgcgcaaccactgtatgaagtagccgtcctggagaacaccccagtgaacagcgtgatagtgacagtgtccgcctccgatctggatactggcagtttcggaacaatctcttatgcctttttccatgcttccgaagagattcgcaaaacatttcagttaaatcctattaccggtgacatgcaacttgtgaagtacctgaatttcgaggccatcaacagctacgaagtggacatcgaggccaaggatgggggaggccttagtggtaagtccaccgtcattgtccaggtggtggacgtcaatgataatccccctgagctgaccctgtccagtgtcaattcccccatcccagaaaactccggcgaaacagtgctcgccgtcttctcagtctccgacctagatagcggggataacggaagggttatgtgcagtatcgaaaacaatcttccattctttctgaagccctcagtggagaacttttacactttggtgtccgagggtgccttagatagagagaccagaagcgagtataatatcacaatcaccattaccgatctcggtaccccgcgtctgaaaactaagtataatataacagtgctggttagcgacgtgaatgataatgcacccgcttttacgcaaatctcttacacactatttgtacgggaaaataatagccctgccctccacatcggctctgtgagcgcaactgaccgggatagtggcaccaacgctcaagttacttatagcttgcttcccccacaggaccctcacctgccattgtcgagcttagtcagcattaacgcggataatgggcacctgtttgcactgagatctctggattacgaagcgctccaagcctttgagttccgagtgggggctacagaccgaggtagccccgcactttcatccgaagctctcgtacgcgtgctcgttcttgatgctaacgacaattctccattcgttctgtaccccctgcagaacgggagcgcgccctgcacagaattggtaccgcgggctgcggagccaggatatctcgtaacaaaagttgtggcagtggacggggattctggtcagaacgcgtggttatcataccaactgttaaaggctactgagccaggtcttttcggggtgtgggcgcacaacggagaagtcagaacggcccgcttactgagcgaacgtgacgcagccaagcatcgattggtagtgctggtcaaggacaacggagagcctccgcgctcagcgaccgcgacattacatgtgctcctcgtggacgggtttagtcagccctatctgccactcccggaggccgcccctgcccaggcccaggctgacctgcttacagtatatttagttgtggccctggcaagtgtgagctccttgtttctcttctccgtcctgctgttcgtggcagtgcggctgtgccgccggtctagggctgctagtgtgggccggtgcagcgtgcccgagggcccttttcccggccagatggtcgatgtgagtggaacaggaactctgagccagagttatcagtacgaagtctgcctaaccggaggaagcggaactaacgagtttaagttcctgaaaccaattatccccaatttcgtcgctcagggggcagaaagggtgagcgaggctaacccgtccttcaggaagtccttcgagtttagctag

SEQ ID NO: 200449 - DNA, 2391 bp, Artificial Sequence
  derived and/or modified sequence
atggaggccggcggggagcgcttcctgcggcagaggcaggtgctgctgctgtttgtgttcctgggcggcagcctggccggcagcgagagccgccgctacagcgtggccgaggagaaggagaagggcttcctgattgccaacctggccaaggacctgggcctgcgggtggaggagctggccgcccggggggcccaggtggtgtccaaaggaaacaagcagcacttccagctgagccaccagacaggagacctgctgctgaatgagaagctggaccgggaggagctgtgtggccccacagagccctgcatcctgcacttccagatcctgctgcagaaccccctgcagtttgtgaccaatgagctgcgcatcattgatgtgaatgaccacagccctgtgttctttgaaaatgagatgcacctgaagatcctggagagcaccctgcccggcaccgtcatccccctgggcaatgctgaggacctggatgtgggcaggaacagcctgcagaactacaccatcacccccaacagccacttccacgtgctgaccaggagcagaagagatggcaggaagtacccagagctggtgctggacaaggccctggaccgggaggagcagcctgagctgagcctgaccctgacagccctggatggcggcagcccccccaggtctggaacagcccagatcaacatccaggtgctggacatcaatgacaatgcccctgagtttgcccagcccctgtatgaggtggccgtgctggagaacacccctgtgaacagcgtgattgtgacagtgtctgccagtgacctggacaccggcagctttggcaccatctcctatgccttcttccacgccagcgaggagatcaggaagaccttccagctgaaccccatcaccggggacatgcagctggtgaagtacctgaactttgaggccatcaacagctatgaggtggacatcgaggccaaggatggcggcggcctgagcggcaagagcaccgtcatcgtgcaggtggtggatgtgaatgacaaccccccagagctgaccctgagctctgtgaacagccccatccctgagaacagcggggagaccgtgctggccgtgttttctgtgtctgacctggacagcggggacaatggccgggtgatgtgcagcattgagaacaacctgcccttcttcctgaagcccagcgtggagaacttctacaccctggtgtctgagggcgccctggaccgggagaccaggtctgagtacaacatcaccatcaccatcacagacctgggcaccccccggctgaagaccaagtacaacatcaccgtgctggtgtctgatgtgaatgacaatgccccagccttcacccagatctcctacaccctgtttgtgcgggagaacaacagccctgccctgcacatcggctctgtgtctgccacagaccgggacagcggcaccaatgcccaggtgacctacagcctgctgcccccccaggacccccacctgcccctgagcagcctggtgtccatcaatgctgacaatggccacctgtttgccctgcggagcctggactatgaggccctgcaggcctttgagttccgggtgggcgccacagaccggggcagccctgccctgagcagcgaggccctggtgcgggtgctggtgctggatgccaatgacaacagcccctttgtgctgtaccccctgcagaatggaagtgccccctgcacagagctggtgcccagggctgctgagcccggctacctggtgaccaaggtggtggccgtggatggagacagcggccagaatgcctggctgagctaccagctgctgaaggccacagagcccggcctgtttggagtgtgggcccacaatggagaggtgaggacagcccggctgctgtctgaaagagatgctgccaagcaccggctggtggtgctggtgaaggacaatggagagccccccaggtctgccacagccaccctgcacgtgctgctggtggatggcttcagccagccctacctgcccctgcctgaggccgccccagcccaggcccaggccgacctgctgactgtgtacctggtggtggccctggcctctgtgagcagcctcttcctgttctctgtgctgctgtttgtggccgtgcggctgtgcagaagaagcagagctgcctctgtgggccgctgcagcgtgcctgagggccccttccctggccagatggtggatgtgtctggcaccggcaccctgagccagagctaccagtatgaggtgtgcctgaccggcggcagcggcaccaatgagttcaagttcctgaagcccatcatccccaactttgtggcccagggcgctgagcgggtgtctgaggccaaccccagcttcaggaagagctttgagttctcctag

SEQ ID NO: 200450 - DNA, 2391 bp, Artificial Sequence
  derived and/or modified sequence
atggaggccggcggcgagcggttcctgcggcagcggcaggtgctgctgctctttgtgtttctcggaggcagcctggccggttccgaatctaggcggtatagcgttgcagaggaaaaggaaaagggatttctgattgctaacctcgccaaggacctcggccttcgcgtcgaggaactcgcggcaaggggagcccaggtcgtaagcaaaggcaataaacaacacttccagctgtcacaccagactggtgatctgcttctcaacgagaagctggacagggaagagctgtgcggccccaccgagccatgcatacttcactttcagatcctgttacagaaccccctacagttcgtgacaaacgagctacggattattgatgttaacgatcactcacctgttttctttgagaatgaaatgcacctcaagatattggagtcgaccctccctggcaccgttattcctctgggtaacgctgaggatctggacgtgggtcgtaattctttacaaaactatacaatcacccccaattctcatttccacgtgctgactcggtctcgaagagacggaaggaagtatcccgaactggtgctggacaaggctcttgacagagaggagcaaccagagctttccctgaccttgacagcactggatggtggctcgccgcctagaagtggaaccgcacagattaatatccaagtactggatattaacgacaatgcccccgagttcgcccagcctctgtatgaagtggccgtgcttgagaacacccctgtgaattcagttattgttactgtgagcgccagtgacctggatacaggatcattcggcactatctcatacgccttcttccatgcctccgaggaaattcgtaagacattccagttgaatccaatcaccggggacatgcagcttgtgaagtacctgaacttcgaagctattaactcttatgaggtggatatagaggccaaagacggcggcggcctttccggtaaaagcaccgtgattgtgcaagtggttgatgtcaacgataacccaccagaacttacactttcatcagtgaattccccgatccctgagaattcgggtgagacagtcctcgcggtgttttcagtttcagatctggactctggagacaatggacgcgtaatgtgctctatcgagaacaacctgccattttttcttaagccctctgtggaaaacttctacacattagtctctgagggcgctctagatagagagaccagaagtgaatataatattactattacgattaccgatctgggcacccctaggcttaagacgaagtacaatatcaccgtactagtttctgacgtgaatgacaatgcgcccgctttcacgcagataagctacactctgttcgtgcgggagaacaactccccagcccttcacattggaagcgtgtcagcgactgatcgggatagtgggactaatgctcaggtcacttacagcttactaccgccccaggatccacaccttccactgagtagtcttgtgagcataaatgccgacaacggacacttgttcgccctgcgctcactggactacgaagcattgcaggcattcgaatttcgagtgggcgcaacagatcgcggatcaccggcactgtcatctgaggctctggtaagagtccttgtccttgacgccaacgacaactcaccattcgtactgtaccccctgcaaaatggaagtgcgccatgcaccgagctcgtgccgagagccgcagagccaggatacttggtcaccaaagtcgtagcggttgacggggacagtggccaaaatgcctggctcagttaccagctcttaaaggctacagagcccggcctatttggagtgtgggcccataacggtgaagtgcgcacggctcggctgctcagtgaaagagacgctgcaaaacatcggcttgtcgtgttagtcaaagacaacggcgagcctcctaggtcagcgaccgccacactgcatgtattgctggtggatggtttttcccagccctatttaccactgcctgaagccgcaccagcccaggcgcaggcggaccttctgaccgtgtatctcgtggtggccctagcctctgtttcatctctgttcttgttctctgtgttgctgttcgtcgctgtgagactatgccggaggagccgtgctgcaagcgttgggcggtgttctgtgccagaaggtcctttccccggccagatggttgacgtgagcgggacagggactcttagtcaatcctatcagtatgaagtttgcctcacgggcggctcgggtactaacgaattcaagttcctgaaacctataatccctaatttcgtggcccagggggccgaaagggtcagcgaggcgaatccatcgttccggaagagctttgaattcagctag

SEQ ID NO: 200451 - DNA, 2391 bp, Artificial Sequence
  derived and/or modified sequence
atggaggctgggggagagagattcttaaggcaacgacaggttttgcttctgttcgttttcttggggggaagtctcgctggttctgaatccagacgatactccgttgctgaggagaaagagaaaggcttcctcatagccaatttggccaaggacttgggtctgcgggttgaagagcttgccgcacgcggagctcaggtcgttagcaagggcaacaagcagcacttccaacttagtcatcagaccggggacttattgctcaatgagaaattggacagggaggaattgtgcggccctaccgagccatgtattctgcattttcagatcctactgcagaaccccctgcagttcgttaccaacgagctgaggattatcgatgtgaacgatcacagcccagtgttcttcgaaaatgagatgcatcttaaaatcttagagtccactttgcctggcaccgtcatcccactgggcaatgctgaggacctggacgttgggaggaatagcctgcagaactatactatcacaccaaactcgcattttcacgtgcttactcggtccagaagagatggtcgaaaatatccggaacttgtattagataaggctctggaccgcgaagaacagccagaactgagcctgactttgaccgctttagatgggggaagtccaccacgatcagggactgctcaaataaatatacaggtcctcgacattaatgataatgcacccgaattcgcccaacctctgtacgaggtcgcggtcctggagaacactcccgtgaattcagtgatcgtgaccgtttccgccagcgacctcgacaccgggagtttcggaacaatttcatatgcgttcttccacgccagtgaggagattagaaagacctttcaacttaatcctatcactggcgacatgcaactggtgaagtatctcaatttcgaggctatcaattcttatgaagttgatattgaggcaaaagacggcggagggttgtccggcaagagcacagtcattgtccaagtggttgacgtgaacgacaatcccccagagcttactctgagtagtgtgaactctccaatccctgagaactctggcgagacagtgctggccgtgttttcagttagtgaccttgactccggtgataatgggcgtgtcatgtgcagtatagaaaacaacctgccctttttcctaaagcccagcgtggagaacttttacaccctcgtgagtgagggagccctggatagggaaacccgatctgagtataatatcaccataacaatcaccgatctgggcacacccaggctgaagaccaagtataatatcactgtactggtgagcgatgtaaacgacaatgctccagccttcacgcagatttcctacaccctattcgtcagagaaaacaactcacccgcattgcatatcggatccgtatcagctacagaccgcgacagcggcaccaacgcccaggtgacctactcactgttgccgccacaggacccacatctgcccttaagtagtttggtttcaatcaatgctgacaatggacacctgttcgctctgcgttcactggattatgaggctctccaagcctttgaattccgagtaggagctaccgatagaggcagcccggcactgtctagcgaggcgctcgtgcgggtcttggttctggatgccaacgacaacagtcccttcgtattatacccactgcagaacgggagcgctccttgcacagagctggtccctagggccgcagagcccggttatcttgtgacgaaagtagtagctgtcgatggagacagtggccagaatgcatggttgtcctaccagttgttaaaggcgacggaacccggtctctttggtgtgtgggcgcacaatggagaggttcgcaccgctcgactgctttctgagcgcgatgcagcaaagcacaggctcgtcgtactcgtgaaagataacggggagccacctcggtctgctaccgccacgttgcacgtactgctggtcgatggcttctcccaaccctatctgcctctccccgaagccgctccggcacaggcccaggctgatctgcttacagtgtatctggtggtggctctagcctctgtgtcctcgctgttcttattctccgtcttgctgttcgttgctgtgcggttgtgcaggagatcgcgcgcagctagcgttgggagatgttccgtgcccgagggcccattcccaggacagatggtcgatgttagcggtaccggtaccctttcgcaaagttaccagtacgaagtctgtttaactggtggcagtggcactaacgaattcaagtttctgaaaccaattatcccaaattttgtcgcacagggcgctgaaagagtgagtgaagctaatcccagctttaggaaaagtttcgaattttcttag

SEQ ID NO: 200452 - DNA, 3173 bp, Artificial Sequence
  derived and/or modified sequence
atggaggcgggaggagagcgatttcttagacaaaggcaagtcttgcttctctttgtttttctgggagggtctctggctgggtccgagtcaagacgctattctgtggctgaggaaaaagagaagggctttttaatagccaacctagcaaaggatctgggactaagggtagaggaactggccgcgaggggggcccaagttgtgtccaaagggaacaaacagcattttcagctcagtcatcagacaggtgatttgctcctgaatgagaaattggaccgggaggagctatgcggccccacagaaccatgcatactacattttcagatattactgcaaaaccctttgcaattcgttacaaacgagctccgtatcatagatgtaaatgaccattctccggtattctttgaaaatgaaatgcatctgaaaatcctagaaagcactctgccaggaacagtaattcctttgggaaatgctgaggacttggatgtgggaagaaacagcctccaaaactacactatcactccgaattcccacttccacgtactcactcgcagtcgtagggacggaaggaagtacccggaactagtactggataaagcgctcgatcgggaggagcagccggaactcagcttaacgctcaccgcgctggacggcggctctccccctcggtctgggacagcccagataaacatccaggtcttagatataaacgacaatgcaccagaatttgcacagccgctctatgaggttgcagttctagagaatacccccgttaactctgtcattgtcactgtctcggcttctgacttagatacaggaagttttgggacaatatcatatgcattttttcatgcttctgaagaaattcgcaaaacttttcagctaaatccaattactggtgatatgcaactggtcaaatatttgaattttgaagcgattaatagttatgaagtcgacatcgaggccaaggatggcggaggcctatccggaaagtctacagtcatagtccaggtggttgatgtcaacgacaacccaccggaactgaccttgtcttcagtaaacagccctattcctgagaactcgggagagactgtactggctgttttcagtgtttctgatctagactctggagacaacggaagagtgatgtgttccattgagaacaatctccccttcttcctgaaaccatctgtagagaatttttacaccctagtgtcagaaggcgcgctggacagagagaccagatccgagtacaacattaccatcactatcactgacctggggacacccaggctgaaaaccaagtacaacataaccgtgctggtctccgacgtcaatgacaacgcccccgccttcacccaaatctcctacaccctgttcgtccgcgagaacaacagccccgccctgcacatcggcagtgtcagcgccacagacagagactcaggcaccaacgcccaggtaacctactcgctgctgccgccccaggacccgcacctgcccctctcttccctggtctccatcaacgcggacaacggccacctgtttgccctcaggtcgctggactacgaggccctgcaggcgttcgagttccgcgtgggcgccacagaccgtggctccccggctttgagcagcgaggcgctggtgcgcgtgctggtgctggacgccaacgacaactcgcccttcgtgctgtacccgctgcagaacggctccgcgccctgcaccgagctggtgccccgggcggctgagccgggctacctggtgaccaaggtggtggcggtggacggcgactcgggccagaacgcctggctgtcgtaccagctgctcaaggccacggagcccgggctgttcggcgtgtgggcgcacaatggcgaagtgcgcaccgccaggctgctgagcgagcgcgacgcggccaagcacaggctggtggtgctggtcaaggacaatggcgagcctccgcgctcggccaccgccacgctgcatgtgctcctggtggacggcttctcccagccctacctgcctctcccggaggcggcaccggcccaggcccaggccgacttgctcaccgtctacctggtggtggcattggcctcggtgtcttcgctcttcctcttttcggtgctcctgttcgtggcggtgcggctgtgcaggaggagcagggcggcctcggtgggtcgctgctcggtgcccgagggcccctttccagggcagatggtggacgtgagcggcaccgggaccctgtcccagagctaccagtacgaggtgtgtctgactggaggctccgggacaaatgagttcaagttcctgaagccaattatccccaacttcgttgctcagggtgcagagagggttagcgaggcaaatcccagtttcaggaagagctttgaattcagttaagtgttaataaggatctactgagcctcgtcttagttaatctgtggaaagtccttttttactgctttgtccattggagaggtcttttttggtctggttcaaggcaagtagcaagaatagagcaaaatatcaaatccagggatggcttaggtttcattaacagtactggaaagtagttgtgtggctctgaatgttttgtatttcaatcgagaatccttagtcgatagaacattttgtttatatattgattctactttttctgtagttaatccttgcatattctcctttcatcctggcttgccaacgcagtcttaattccgccttttttttttctaatggggagcaaaaagaaattcactgtcttttaatagtgatttcaaatagcttattaaaataactccattcaaattttacattataaagcaatgtagagagagttccaaaccaccaattttataatttcccttgttgaatatattcatataatgtgttctataatatgcccaaagcagctttgtctatagttaacaaagttttaaggatagacaagaatgtgttttctttaataaatagtaatatatcatctttttagggatatagtactcaaatgaaagtaatttagttcattttctgtgttgacatttgcaattaatatttcaatattttatgtgcttatattggccaaaatatggacacaaatatagactaatatgggtaattaccctttggtttatctaaagtgtgttcatgatgactgaggaaaaaaattaaacctatgccattta

SEQ ID NO: 200453 - DNA, 2391 bp, Artificial Sequence
  derived and/or modified sequence
atggaggccggcggcgagagattcctgagacagagacaggtgctgctgctgttcgtgttcctgggcggcagcctggccggcagcgagagcagaagatacagcgtggccgaggagaaggagaagggcttcctgatcgccaacctggccaaggacctgggcctgagagtggaggagctggccgccagaggcgcccaggtggtgagcaagggcaacaagcagcacttccagctgagccaccagaccggcgacctgctgctgaacgagaagctggacagagaggagctgtgcggccccaccgagccctgcatcctgcacttccagatcctgctgcagaaccccctgcagttcgtgaccaacgagctgagaatcatcgacgtgaacgaccacagccccgtgttcttcgagaacgagatgcacctgaagatcctggagagcaccctgcccggcaccgtgatccccctgggcaacgccgaggacctggacgtgggcagaaacagcctgcagaactacaccatcacccccaacagccacttccacgtgctgaccagaagcagaagagacggcagaaagtaccccgagctggtgctggacaaggccctggacagagaggagcagcccgagctgagcctgaccctgaccgccctggacggcggcagcccccccagaagcggcaccgcccagatcaacatccaggtgctggacatcaacgacaacgcccccgagttcgcccagcccctgtacgaggtggccgtgctggagaacacccccgtgaacagcgtgatcgtgaccgtgagcgccagcgacctggacaccggcagcttcggcaccatcagctacgccttcttccacgccagcgaggagatcagaaagaccttccagctgaaccccatcaccggcgacatgcagctggtgaagtacctgaacttcgaggccatcaacagctacgaggtggacatcgaggccaaggacggcggcggcctgagcggcaagagcaccgtgatcgtgcaggtggtggacgtgaacgacaacccccccgagctgaccctgagcagcgtgaacagccccatccccgagaacagcggcgagaccgtgctggccgtgttcagcgtgagcgacctggacagcggcgacaacggcagagtgatgtgcagcatcgagaacaacctgcccttcttcctgaagcccagcgtggagaacttctacaccctggtgagcgagggcgccctggacagagagaccagaagcgagtacaacatcaccatcaccatcaccgacctgggcacccccagactgaagaccaagtacaacatcaccgtgctggtgagcgacgtgaacgacaacgcccccgccttcacccagatcagctacaccctgttcgtgagagagaacaacagccccgccctgcacatcggcagcgtgagcgccaccgacagagacagcggcaccaacgcccaggtgacctacagcctgctgcccccccaggacccccacctgcccctgagcagcctggtgagcatcaacgccgacaacggccacctgttcgccctgagaagcctggactacgaggccctgcaggccttcgagttcagagtgggcgccaccgacagaggcagccccgccctgagcagcgaggccctggtgagagtgctggtgctggacgccaacgacaacagccccttcgtgctgtaccccctgcagaacggcagcgccccctgcaccgagctggtgcccagagccgccgagcccggctacctggtgaccaaggtggtggccgtggacggcgacagcggccagaacgcctggctgagctaccagctgctgaaggccaccgagcccggcctgttcggcgtgtgggcccacaacggcgaggtgagaaccgccagactgctgagcgagagagacgccgccaagcacagactggtggtgctggtgaaggacaacggcgagccccccagaagcgccaccgccaccctgcacgtgctgctggtggacggcttcagccagccctacctgcccctgcccgaggccgcccccgcccaggcccaggccgacctgctgaccgtgtacctggtggtggccctggccagcgtgagcagcctgttcctgttcagcgtgctgctgttcgtggccgtgagactgtgcagaagaagcagagccgccagcgtgggcagatgcagcgtgcccgagggccccttccccggccagatggtggacgtgagcggcaccggcaccctgagccagagctaccagtacgaggtgtgcctgaccggcggcagcggcaccaacgagttcaagttcctgaagcccatcatccccaacttcgtggcccagggcgccgagagagtgagcgaggccaaccccagcttcagaaagagcttcgagttcagctag

SEQ ID NO: 200454 - protein, 286 aa, Artificial Sequence
  derived and/or modified sequence
MNPASDGGTSESIFDLDYASWGIRSTLMVAGFVFYLGVFVVCHQLSSSLNATYRSLVAREKVFWDLAATRAVFGVQSTAAGLWALLGDPVLHADKARGQQNWCWFHITTATGFFCFENVAVHLSNLIFRTFDLFLVIHHLFAFLGFLGCLVNLQAGHYLAMTTLLLEMSTPFTCVSWMLLKAGWSESLFWKLNQWLMIHMFHCRMVLTYHMWWVCFWHWDGLVSSLYLPHLTLFLVGLALLTLIINPYWTHKKTQQLLNPVDWNFAQPEAKSRPEGNGQLLRKKRP

SEQ ID NO: 200455 - DNA, 861 bp, Artificial Sequence
  derived and/or modified sequence
atgaatcctgcttccgatggcgggacgtcagaaagcatattcgacttagactatgccagttgggggataaggtccactcttatggtggcagggttcgtcttctatcttggagttttcgtggtctgtcaccagctgagttcctctttaaatgcaacatatcgcagtctggtcgccagggagaaggtattctgggacctcgctgccacccgcgctgtcttcggggtccagtctaccgccgcgggcctgtgggctcttctgggcgatccagttctgcacgcagacaaggcacgcggccaacagaactggtgttggtttcacatcactaccgcgaccggattcttttgtttcgaaaatgtggccgtgcatctgagcaacctgatctttcggactttcgacttgtttctggttatccatcacttgttcgcctttctgggctttctgggctgtctggtgaacctacaggcagggcattaccttgctatgacaactctgctcctcgagatgagtacacctttcacatgtgtgtcctggatgctactgaaggctggctggtcagaaagtttgttttggaagcttaaccagtggctcatgatccatatgtttcactgccgaatggtgctgacctaccacatgtggtgggtgtgcttctggcattgggatggcctggtttcatcgttgtacctcccccacttaactctgttcctggtgggcctggcactcctgacgttaatcattaatccttattggacacacaaaaaaacccagcagctgctgaacccagtcgattggaacttcgcacaacctgaggcgaagtcccgcccagagggaaacgggcagctgctccggaaaaaacggccttag

SEQ ID NO: 200456 - DNA, 861 bp, Artificial Sequence
  derived and/or modified sequence
atgaacccagccagtgatggcggcaccagcgagagcatctttgacctggactatgcctcctggggcatccgcagcaccctgatggtggccggctttgtgttctacctgggcgtgtttgtggtgtgccaccagctgagcagcagcctgaatgccacctaccgcagcctggtggcccgggagaaggtgttctgggacctggccgccaccagggctgtgtttggagtgcagagcacagctgctggcctgtgggccctgctgggggaccctgtgctgcatgctgacaaggcccggggccagcagaactggtgctggttccacatcaccacagccaccggcttcttctgctttgaaaatgtggccgtgcacctgagcaacctgatcttccgcacctttgacctcttcctggtgatccaccacctgtttgccttcctgggcttcctgggctgcctggtgaacctgcaggccggccactacctggccatgaccaccctgctgctggagatgagcacccccttcacctgtgtgtcctggatgctgctgaaggccggctggagcgagagcctcttctggaagctgaaccagtggctgatgatccacatgttccactgcaggatggtgctgacctaccacatgtggtgggtgtgcttctggcactgggatggcctggtgagcagcctgtacctgccccacctgaccctcttcctggtgggcctggccctgctgaccctcatcatcaacccctactggacccacaagaagacccagcagctgctgaaccctgtggactggaactttgcccagcctgaggccaagagcaggcctgagggcaatggccagctgctgaggaagaagaggccctag

SEQ ID NO: 200457 - DNA, 861 bp, Artificial Sequence
  derived and/or modified sequence
atgaaccccgccagcgacggcggcaccagcgagagcatcttcgacctggactatgcatcctggggaattcggtctacactaatggtggcaggatttgtgttctatctgggagtgtttgttgtgtgtcaccaactctcatccagtctcaatgccacatacaggagcctggtcgcccgtgagaaagtcttctgggacctggcagctacaagggcagtcttcggcgtccaatctactgcggccgggctgtgggccctgcttggagatcccgtgttgcacgcggacaaggctcggggacagcagaattggtgctggttccatatcacaaccgcaaccggcttcttttgcttcgaaaacgtggcggtgcacctctcaaaccttattttccggacctttgacctcttcctcgtgatccatcaccttttcgctttcttggggttcttaggatgcctggtgaatctacaggccggtcactatctggccatgaccacgctattactcgagatgagcacgcccttcacttgtgtatcctggatgctgctgaaagccggatggtccgagtccctgttctggaagttgaaccagtggttaatgatacacatgttccactgtcggatggtgctcacctaccacatgtggtgggtgtgcttctggcactgggatgggcttgtaagcagcctctacctgccccacctgactctctttctggtcggcttagccctgttaaccctcattataaacccatattggacgcataaaaagacacagcagctactaaatcctgtggattggaattttgcccagccggaggcaaaaagcagacccgagggcaacggacagctgctgcgtaaaaagaggccatag

SEQ ID NO: 200458 - DNA, 861 bp, Artificial Sequence
  derived and/or modified sequence
atgaacccggcttcagatgggggtacttccgagtcaatctttgatctggactacgctagttggggcatacgaagcactctcatggttgccggttttgtgttctatctgggagtcttcgtagtctgccaccagctgtccagctccttgaacgccacctaccggtcactagttgccagggagaaggtcttttgggacctcgccgctactcgggcagttttcggagttcagtcaaccgccgctggactgtgggcactgctgggcgatccggttctgcacgcagacaaagcccgaggccaacagaattggtgctggttccacataactacagctaccggttttttttgcttcgaaaacgtcgctgtgcacctttctaacctaatcttcaggactttcgatctgtttcttgtgatccaccacctctttgcctttcttgggttcctggggtgccttgtaaatctgcaagccggtcactatctggccatgaccacgctcttgctggagatgagcacccccttcacttgtgtgagctggatgcttcttaaagccggatggagcgagagtctcttttggaaattaaaccagtggttgatgattcatatgttccattgtagaatggtgctgacctaccacatgtggtgggtctgcttctggcattgggatggtcttgtatcttccctgtacctccctcatctgactctatttcttgtcggcctggctttgctgactctgattattaatccttattggactcacaaaaaaacacagcaattgctaaatccagtggactggaattttgcccagccagaggctaagtccaggcctgaaggaaatggccagctcctgcggaaaaaacgaccctag

SEQ ID NO: 200459 - DNA, 7113 bp, Artificial Sequence
  derived and/or modified sequence
gtgcgcgggcggtgtttgaggccggccagtcgtgactgggcggcaatgaggtcagtgactgccgggagtcctgcaggggcggggcggcgccaagcgcagggagcccggctgagtggcagcccagattgaagatggatacgtgacaatcccagggaccgctgcactgacttcatttccttagacaagacacagtgtagggcccggcccgtgttggccccaggactcctttggaatatagctgtggacaatgaatcctgcgagcgatgggggcacatcagagagcatttttgacctggactatgcatcctgggggatccgctccacgctgatggtcgctggctttgtcttctacttgggcgtctttgtggtctgccaccagctgtcctcttccctgaatgccacttaccgttctttggtggccagagagaaggtcttctgggacctggcggccacgcgtgcagtctttggtgttcagagcacagccgcaggcctgtgggctctgctgggggaccctgtgctgcatgccgacaaggcgcgtggccagcagaactggtgctggtttcacatcacgacagcaacgggattcttttgctttgaaaatgttgcagtccacctgtccaacttgatcttccggacatttgacttgtttctggttatccaccatctctttgcctttcttgggtttcttggctgcttggtcaatctccaagctggccactatctagctatgaccacgttgctcctggagatgagcacgccctttacctgcgtttcctggatgctcttaaaggcgggctggtccgagtctctgttttggaagctcaaccagtggctgatgattcacatgtttcactgccgcatggttctaacctaccacatgtggtgggtgtgtttctggcactgggacggcctggtcagcagcctgtatctgcctcatttgacactgttccttgtcggactggctctgcttacgctaatcattaatccatattggacccataagaagactcagcagcttctcaatccggtggactggaacttcgcacagccagaagccaagagcaggccagaaggcaacgggcagctgctgcggaagaagaggccatagctgctccagccggggctccggggcggcagcagagctggcacaccgattctgggaagccccgcgaatgatggcttttgaattaatgaggcagtgaatgttttgtgtttacttctaagggaaatactaactttctttcgcattagtattaattttgaagtagctacaaagtatttttaagaaattataattttatgactgtctggcaggctctgtcagtttagccgcgccggaccgtgtcaagcatctaggagaggagtccatggtgtccaggcatcggggcgtcacacctgttgaggagtggggtggctttgaatgctggaaatggcttcatagtgaagtgcctcccacagggcgggtgggtcagcgttgactctttccagctgcacactcatatgccgtgtgtcttattcagaagtcacattcttttcagttggagagaattgggctaagatagaaaataacatgatttgttccttattaaagcttcccagcgtatgaaattctaagctgggtggggtggctcacacccgacgtaatcccagcacgttgggaggccgaggcaggtggatcacttgaggccaggagttcgagaccagcctggtcaagatggtgaaaccccatctctactaaaattacaaaaattagccgggtgtcgtggcacacacctgtaatcccagctatttgggaggccaaggcaggagaattgcctgaacccgggaggcggaggttgcagtgagctgagatcgcaccactgcactccagcactccagcctgggtgacagagcaagactctctctcaaaaaaaaaaaaaaaaaaaaattctagaccgaagtgtacggcagtgccatctggtggcaagtggtacaaagacaacgctgaggggtagtgactcctgtagcagcagagacgccttggagtttaacccccaccaaccagagcgtgggctggtaaagatgaaatcttgcaagttttttttttttttaaatcatggtacctgttttaaaatgagaagttattattcatactgtgttgctcatttgacaaaataaggtaaggatttcataatcaggttgtctgggtttcagagctgtttttaattgactgagttacctacaggcacccaatctagaccctaattctgtggttggtgttcctctgtagatttcaagacaagtagtgatgtcattttctccctgagctgtagggtggacctggacccctcagagatgctcgactgcagggtcctggggtccctagagtggtcctgcagcagcccctggcaatgagctgcctgatgatgagtcccaaggtacattgttctactgttttatacccaggtagaagttacacagcaatttagcaatgttgttaacagacatacagaattgtgtgtgtgtgtgtgtgtgtgtgtgtgagtgttttgatataaacgtgcaattaaaattcaaagtttattttttatcacaagcacctttgaaatgtacgtggaaaacgtcggctgctcgtgagaatcatgtgtgacttacgttccttatgttttatggaactctcggaacagtgttttgtttttgtttagtttttgttttcgtttttttgagacggagcctggctttggctcccaggctggagtccagtggtgtgatctcggctcactgcaacctccacctcccgggttccagggattctcctgcctcaccctttcaagtagctgggattacaggtacctctaccatgcctggctgattttttgtatttttagtagagacagggtttcaccatgttggccaggctggtctctgactcctgactaaaagtgatctgcccacctcggcctcccaaagttctgggattacgggcgtgagccacttcacccggcccggagcggtgtattttgattgctggtgctttaactatattgaccaaggtgtatagtaacctatttatcacattttacgaagcaattttaatcttaaacacatccagcaaatggtgtccctgctgaaacttttaactggaaacctcacacctggcaggcagcactctctgcagccgtgcccttgtggagtcagcaggagctggtgtttttcagccagacagaggcataataaagtgactgatgtttacagaacccaaatgatgtcttcctctctctcaaaataaactaacctattcatattgctgtgaatgctttatcttggagatagaaaatataatgataaattcatcatgtgttcagaattcgatttggagttggaagtggacagcctaatttttatctcacctccactaggactttgaccttcccaggggtccacactttacctcctgtatcttcatacgcgtgtgtggatgcatagagatggaggtgctgtagagaagcacaggctcacccgctccgtccagtgtcacccacacattggtccggggacccctcagtgcagagcctgaagttgggggtttaggggtggaaaaggcttcgtgaaatgttaatgatgcgtacaccttccagatggcacagcactttcccatggtcctcactggcctcagtctccctgaccggcagtgtgaggggatgtagctatagtggagcatggtacaagcgacattcatgagctctgacttcttggtgccaggttggtgtgagcctgggcccggcccactcagcggcccacattggccagcattcagctgcacgtgtgtgctgcgtgcttcacatcctctattgagagttacagcaagtgttaaacgaggtgagttcacataacaggaattctggaactgcttgaaaactaggacgattgggcaatatcggccttaactccacctgatggcaggtgacccggatagaaaatggccctgcgtttagccaggatgtggctctccagcttggcttcagtgtgatcacttgtcagtgcgctttctctttcgatagtgaaatccttctctatacctatgttttgttttgtttcttaagttgggaaacagaatgggccagggaggttgagtgactgaagaccaagggttggtgcagcctcctcgccgcgctgcgggggctgggccgcacaggcttctgcccttctcggtgtccaggctccttgggtgatgctggagttgtcatggccgcagttcagtgtgagattttttaccaggtattgcgcttaagggacatgattttccattttcttcgcccggacaacttgaatgaaatgggcactgttgattccacttctgtcgaggagcttcggggctcagagaggtgatgacgtgcccaaggtgacgcaactcgtgaacagccgtgcctgccttgggcgcagcctccggcgccagagctgggctcttcaacacggcatttagcgcagaaagtcgtggttcaggcagtatgggccgctgtgacaaaacacctaagactgggtagtttataaagaacagacattcaggccaggcacggtgactcacgcctgtaatcccagcactttgggaggccgaggcgggtggatcatttgaggtcaggagtttgaaaccagcctggccaacatggtgaaaccccatctctactaaaaaaacaaaactagctgggggtggtggtgcatgcctgtggtcccagctacttgggaggctaaggtagaagaattgcttgaacctgggaggcagagattgcagtgagccgagatcacgccattgcactccagcctgggtgacacagtgagactccatctcaaaaaaaaaaaaagaacggacatcatttctcacagttctggaggctggaagtccaagataaaggtgtgggctgattagtttctgctgggaacactgcatcctcacgtggtggaggggatggaaggtcaacaggcctcagctagttctccgctgcctttttatgaggcattaagccatttgcaagagtagggggccccacctcttaataccaccgcaatgacaattacaatgtcatgtgaattctggaggggacacggtcacactgcagcatcagcacccggtgaatgtggttctcttcccatgtccgaattttgtgagctccacacgggcagggttgcatctgttttattctctgattgattctaagccccatgtccctggcacaggatggctgcttggcagtagggagtggatgaaccagtagtacccagggctgccaggcagggccctgcaggggacagacccaagggctgatatggggacacctgctgaggggggaatttaccacggtaagggcagggctgggaggctgggcagccagtttcaccctcgcacaggctgcctggcaagaccagcggctggaggtgatgtcctcagtagagaacggtggccactggaaacgtgtggccagaaggggaaacgctcgggcctctggtgggggccagcctggggtggggtcggccagggtcagctgcctttccttcatgctggggaggagatgttgtgtgcatgtgagaaagcatttgatagcatgccaaaagtttcctccattatgtgcgtgtcaagtgtttgaccaggtcagaactcttgttctatgcgaatgtgctcacgcagacagaagcggaggggctccgtcgctctgccctcacgccgctgaaccgcgagggtctcccgctcctcaggcttgcggctcggccgcgaagtgtgtcaggtgtgcatcctgggtgctcctttgtgctctgtcctacggtgacacaggcggcgtggggttagacaggtaccggtcagactacggtgacacaggcggcgtgcggttagacaggtaccggtcagattacggtggcacaggcggcgtggggttagacaggtaccggtcagattacggtggcacaggcggcgtggggttagacaggtaccggtcagattacggtggcacaggcggcgtggggttagacaggtaccggtcagattacggtggcacaggcggcgtggggttagacaggtaccggtcagattacggtggcacaggcagcgtggggttagacaggtaccggtcagattacggtggcacaggcggcgtggggttagacaggtaccggtcagattacggtggcacaggcggcgtggggttagacaggtaccggtcagattacggtgacacaggcggcgtggggttagacaggtaccggtcagattacggtggcacaggctgcgtggggttagacaggtaccggtcagattacggtggcacaggcggcgtggggttagacaggtactggtcagatgcacgggctccctaaacccctgctgtggcttcggcagtaaagacaggacgcacccatgtcacaagaggagcacaggcaggggtgttggtgttggggcagccctcagggtctccagaccccagccccactcacacagcagcctaggaaggaagggcagagtcccaggtgtcagctggtgggtctcccaggagctgcccctccctggaagtcacaggacaggaatgacagatcagggaactgcaggaagctgccacctctggggtcagaatatgcccagcctgcgggggctctctatcggggtcttcgagagccagacagcctgccttgtgctgcatacctggctttgctctgtgcagaacccagcacacgtgattttgtgtgacatgccagcagcctggctcccaggacaggaggcctgccctgggggaggggctgcaggaggagggggggcaggcacccatgagtctgtccagccttgtcacagatgcatcgcccaccctgcggtcctgatttcagctcacctcagagtaaatcagaataaactgcacccagactttcacgaatgcatgttgacgctttcagttcacccctttctttgctaactttcttcctattttcttctaatgcgagagcttattaattccatatttatcattttgaataacttttctcctttttagtaacaaaatgtacttcactcttagtaaaatgtatttactattttagtaacaaaaatatacttgcctaatcatgtttaaaatatagtgatgtgaaaaattcaga

SEQ ID NO: 200460 - DNA, 861 bp, Artificial Sequence
  derived and/or modified sequence
atgaaccccgccagcgacggcggcaccagcgagagcatcttcgacctggactacgccagctggggcatcagaagcaccctgatggtggccggcttcgtgttctacctgggcgtgttcgtggtgtgccaccagctgagcagcagcctgaacgccacctacagaagcctggtggccagagagaaggtgttctgggacctggccgccaccagagccgtgttcggcgtgcagagcaccgccgccggcctgtgggccctgctgggcgaccccgtgctgcacgccgacaaggccagaggccagcagaactggtgctggttccacatcaccaccgccaccggcttcttctgcttcgagaacgtggccgtgcacctgagcaacctgatcttcagaaccttcgacctgttcctggtgatccaccacctgttcgccttcctgggcttcctgggctgcctggtgaacctgcaggccggccactacctggccatgaccaccctgctgctggagatgagcacccccttcacctgcgtgagctggatgctgctgaaggccggctggagcgagagcctgttctggaagctgaaccagtggctgatgatccacatgttccactgcagaatggtgctgacctaccacatgtggtgggtgtgcttctggcactgggacggcctggtgagcagcctgtacctgccccacctgaccctgttcctggtgggcctggccctgctgaccctgatcatcaacccctactggacccacaagaagacccagcagctgctgaaccccgtggactggaacttcgcccagcccgaggccaagagcagacccgagggcaacggccagctgctgagaaagaagagaccctag

SEQ ID NO: 200461 - protein, 348 aa, Artificial Sequence
  derived and/or modified sequence
MPDELTEPGRATPARASSFLIENLLAAEAKGAGRATQGDGSREDEEEDDDDPEDEDAEQARRRRLQRRRQLLAGTGPGGEARARALLGPGALGLGPRPPPGPGPPFALGCGGAARWYPRAHGGYGGGLSPDTSDRDSPETGEEMGRAEGAWPRGPGPGAVQREAAELAARGPAAGTEEASELAEVPAAAGETRGGVGVGGGRKKKTRTVFSRSQVFQLESTFDLKRYLSSAERAGLAASLQLTETQVKIWFQNRRNKWKRQLAAELEAASLSPPGAQRLVRVPVLYHESPPAAAAAGPPATLPFPLAPAAPAPPPPLLGFSGALAYPLAAFPAAASVPFLRAQMPGLV

SEQ ID NO: 200462 - DNA, 1896 bp, Artificial Sequence
  derived and/or modified sequence
ccgatcagctgtcggcgcgcactcgctcccggcccggcccagcccagcccggcgcggaggccgccgcctgccctgcggggcccgacgccagcggtccgggtagcagctccagggccggcccgcgcgtgcgcccgggagccgcgcgccaccatccccagcggggaccgaggagcccggccgagcccgagaagcccgcggccgcgatgcctgacgagctgacggagcccgggcgcgccacgccggcccgcgcctcctccttcctcatcgagaacctgctggcggccgaggccaagggcgcagggcgcgcgacccagggcgacggcagccgggaggacgaggaggaggacgacgacgaccccgaagacgaggacgccgagcaggcgcggcggcgacggctacagcggcggcgacagttgctcgcgggcaccgggcccggcggggaggcgcgggcccgtgcgctgctcgggccgggcgcgctgggcctcggtcctcggccgccccccggtcccgggccgcccttcgctctgggctgcggaggcgcagcgcgctggtacccacgggcgcacggtggctatggaggcggcctcagtcctgacaccagcgaccgggactcaccggagacgggcgaggagatgggccgtgcggagggcgcctggccgcgaggccccgggccgggagcggtgcagcgggaggcagcggagctggcggcgcgtggcccggcggccggcacggaggaggcgtcggagctggccgaggtccctgcggcggctggggagacacgcggcggcgttggcgtgggcggcggccgaaagaagaagacgcgcacagtcttctcccgcagccaggtcttccagctggaatccaccttcgacctgaagcgctacctgagcagcgccgagcgcgccggcctggccgcctccctgcagctcaccgagacgcaggttaagatctggttccagaaccgccgcaacaagtggaagcggcagctggcagccgagctggaggcggccagcctgtccccgccgggagcgcagcgcctggtccgcgtgccggtgctctaccacgaaagccccccggccgcagccgccgctgggcccccggccaccctgcccttcccgctggcgcccgccgcgcccgcgccgcccccaccgctgctcggcttctccggggccctcgcctacccgctggccgccttcccggccgccgcctccgtgccctttctgcgggcgcagatgcctggcctggtgtgagccccgcctgccgggccctctccccacgaccctgtggacctgtgtggacgcgcgattcagcggcaggcgcagggctcagggggcgttagggaagggatggtcgctcctgcggcctcctagatacctcgggagcgcaggccgcggccgggcgggcctcagcttctgtggggagcgcctctagaatgtaatgggacgccccacccatttgccaggctggatccccactcgaacagggggccatgcagagactctgggctgcgcagcccccggcgccacggccaccccccggcctcagcgaggagcggtcggccatggccacccggggcagctgccctcaggccaagcccagcgcaacaaaggaaaactacgaaccggctgtccaaggctgagcggtgactgtccccacagactgcccccaacactaaacgtccctttcctgggacccagacagcaggccggcccggagggctgtgctacccctctcgcgggtgctggtggagaaaggaccctggacctgtgggtcccatcgtccgttccaggagcaggcaggctggggctctctgcagacgtcgcagcctccgggttgttgtttttttaaatgaatctacttatttgcgtatggaataaaaagggacattttctggac

SEQ ID NO: 200463 - DNA, 1047 bp, Artificial Sequence
  derived and/or modified sequence
atgcccgatgaactgaccgagcccgggcgcgccacccccgctagagccagtagctttttaatcgagaatcttcttgccgctgaagcaaagggagctgggcgggccacgcagggtgacggttcaagggaagatgaagaggaggacgacgacgaccccgaggacgaggatgcagagcaggcccggaggcgccgcctgcagcgaagacgccagctcctggcaggcacaggtcctggaggagaggcccgagcacgggcgctgctggggcccggcgccctcggcttaggaccccgtcccccacctggaccggggccacccttcgcgttggggtgtggcggcgctgctaggtggtaccccagagcacacggcgggtacggaggcggcctgtcccccgatacgagcgatagagacagcccggagaccggagaagaaatgggcagagcagagggcgcttggcctcgcggccctggtccgggcgccgtccagagagaggcagctgaacttgcggctcgcgggccggccgccggtacagaggaggctagcgaattggctgaagtacccgctgccgccggtgagactagaggcggggttggcgtcggtggaggtagaaagaagaagacccgcaccgtgttcagtcgctcccaagtcttccagcttgagagcacttttgaccttaagcgatacctgtcaagcgctgagcgcgccggactcgcggcctcccttcagcttactgagacgcaagtcaagatttggttccagaacaggcgaaataagtggaaacgccagctagcagccgagttggaggctgcctccctgtcaccgcctggagcccaacgcctggtgcgggtgcccgttctgtatcacgagtcgccacctgccgctgcagccgcaggccctcccgcaactctcccattccctctggccccagccgcgccggccccccctccgcctctcctcggcttcagtggcgccttggcataccccttggccgcatttccggctgctgcttccgttccctttctgcgtgctcaaatgccaggcctcgtatag

SEQ ID NO: 200464 - DNA, 1893 bp, Artificial Sequence
  derived and/or modified sequence
ccgatcagctgtcggcgcgcactcgctcccggcccggcccagcccagcccggcgcggaggccgccgcctgccctgcggggcccgacgccagcggtccgggtagcagctccagggccggcccgcgcgtgcgcccgggagccgcgcgccaccatccccagcggggaccgaggagcccggccgagcccgagaagcccgcggccgcgatgcctgacgagctgacggagcccgggcgcgccacgccggcccgcgcctcctccttcctcatcgagaacctgctggcggccgaggccaagggcgcagggcgcgcgacccagggcgacggcagccgggaggacgaggaggaggacgacgacgaccccgaagacgaggacgccgagcaggcgcggcggcgacggctacagcggcggcgacagttgctcgcgggcaccgggcccggcggggaggcgcgggcccgtgcgctgctcgggccgggcgcgctgggcctcggtcctcggccgccccccggtcccgggccgcccttcgctctgggctgcggaggcgcagcgcgctggtacccacgggcgcacggtggctatggaggcggcctcagtcctgacaccagcgaccgggactcaccggagacgggcgaggagatgggccgtgcggagggcgcctggccgcgaggccccgggccgggagcggtgcagcgggaggcagcggagctggcggcgcgtggcccggcggccggcacggaggaggcgtcggagctggccgaggtccctgcggcggctggggagacacgcggcggcgttggcgtgggcggcggccgaaagaagaagacgcgcacagtcttctcccgcagccaggtcttccagctggaatccaccttcgacctgaagcgctacctgagcagcgccgagcgcgccggcctggccgcctccctgcagctcaccgagacgcaggttaagatctggttccagaaccgccgcaacaagtggaagcggcagctggcagccgagctggaggcggccagcctgtccccgccgggagcgcagcgcctggtccgcgtgccggtgctctaccacgaaagccccccggccgcagccgccgctgggcccccggccaccctgcccttcccgctggcgcccgccgcgcccgcgccgcccccaccgctgctcggcttctccggggccctcgcctacccgctggccgccttcccggccgccgcctccgtgccctttctgcgggcgcagatgcctggcctggtgtgagccccgcctgccgggccctctccccacgaccctgtggacctgtgtggacgcgcgattcagcggcaggcgcagggctcagggggcgttagggaagggatggtcgctcctgcggcctcctagatacctcgggagcgcaggccgcggccgggcgggcctcagcttctgtggggagcgcctctagaatgtaatgggacgccccacccatttgccaggctggatccccactcgaacagggggccatgcagagactctgggctgcgcagcccccggcgccacggccaccccccggcctcagcgaggagcggtcggccatggccacccggggcagctgccctcaggccaagcccagcgcaacaaaggaaaactacgaaccggctgtccaaggctgagcggtgactgtccccacagactgcccccaacactaaacgtccctttcctgggacccagacagcaggccggcccggagggctgtgctacccctctcgcgggtgctggtggagaaaggaccctggacctgtgggtcccatcgtccgttccaggagcaggcaggctggggctctctgcagacgtcgcagcctccgggttgttgtttttttaaatgaatctacttatttgcgtatggaataaaaagggacattttctg

SEQ ID NO: 200465 - DNA, 1047 bp, Artificial Sequence
  derived and/or modified sequence
atgccagatgagctgacagagcccggccgggccaccccagcccgggccagcagcttcctgattgagaacctgctggccgctgaggccaagggggccggccgggccacccagggagatggcagcagagaagatgaggaggaggatgatgatgatcctgaagatgaagatgctgagcaggccaggagaagaaggctgcagaggcggcggcagctgctggccggcactggacctggaggagaggcccgggcccgggccctgctgggccctggggccctgggcctgggcccccggcccccacctggccctggccccccatttgccctgggctgcggcggggccgcccgctggtacccccgggcccatggaggctacggcggcggcctgagcccagacaccagtgaccgggacagccctgagaccggggaggagatgggccgggcagagggcgcctggccccggggccctggccctggagctgtgcagcgggaggccgctgagctggccgcccggggccctgctgctggaacagaggaggccagcgagctggccgaggtgcctgctgctgctggggagacccggggcggcgtgggcgtgggcggcggcaggaagaagaagaccaggacagtgttcagccgcagccaggtgttccagctggagagcacctttgacctgaagcgctacctgagcagcgctgagcgggccggcctggccgccagcctgcagctgacagagacccaggtgaagatctggttccagaacagaagaaacaagtggaagaggcagctggccgctgagctggaggccgccagcctgagccccccaggggcccagaggctggtgcgggtgcctgtgctgtaccacgagagccccccagctgctgctgctgctggccccccagccaccctgcccttccccctggccccagctgccccagcccctcctccacccctgctgggcttcagcggggccctggcctaccccctggccgccttccctgctgctgcctctgtgcccttcctgcgggcccagatgcctggcctggtgtag

SEQ ID NO: 200466 - DNA, 1047 bp, Artificial Sequence
  derived and/or modified sequence
atgcccgacgagctgaccgagcccggccgggccacccccgcccgggctagctcttttcttattgagaacttactcgctgccgaggctaaaggtgcgggacgcgccacacagggggatggtagcagggaggatgaggaagaggacgacgatgatccagaggacgaagacgctgagcaggctaggcggcgacggttacagaggcggcggcagctgttggcgggcactggcccgggcggcgaggctagagctcgggcactcctcggacctggggccctgggcttgggaccccgaccaccgcccggacccggacctcctttcgctctcggttgtgggggcgctgccaggtggtatccccgcgcccacggaggctatggtggcggactgtcacccgatacctctgacagagattcaccagagactggagaagagatgggacgagctgagggggcctggcctcgtggacctgggccgggagccgtccagagggaagcggcagagctggctgccaggggacctgcagccggcactgaagaagcttcggagctggctgaggtccccgctgcggcaggtgaaacgagaggcggggtgggcgtgggcggaggtaggaagaagaaaactcggactgtattcagcaggtcccaggtattccagctggagtcaacctttgacctgaaacgatacctatcatccgcagaaagagcgggcctggctgcaagcctgcagctgacggaaacacaagtgaaaatctggttccagaacagacggaataaatggaagcggcaactggctgctgagctagaagccgccagcctgagccctccaggagctcagcgactcgtgagagttccagtactgtaccacgagagcccccctgccgcagccgccgccggccctccggctacactgccctttccccttgctccggccgcaccagctcctcccccccccctcttagggttcagtggggcgctggcctaccctcttgcagcctttcccgctgccgcttccgtacccttccttcgcgcccagatgcctggcctggtctag

SEQ ID NO: 200467 - DNA, 1047 bp, Artificial Sequence
  derived and/or modified sequence
atgcctgacgaactgacggagccaggtcgggctacgccggcaagggcatcatcatttctgattgaaaatctcctcgctgcggaggccaaaggagccggtcgcgctacacagggcgacggctctcgggaagatgaagaagaagacgatgatgaccctgaagatgaagatgctgagcaggcacggcgacgtagacttcagagacgcaggcaactgctggccggtactgggcctggcggtgaagcgcgtgcacgtgccctcctgggcccaggcgcactcgggttaggacctcgcccaccgcctgggcctggtcctcccttcgcgctgggttgcgggggtgccgcacgatggtatcctagagcgcacggagggtacggtggcggattgtcacctgacacttcagaccgcgattctccagaaacgggagaggaaatgggacgcgcagaaggcgcatggccaagaggtcccggacccggtgccgttcagagagaggcggcagagttagctgccaggggacctgccgcaggcacagaagaggccagtgagctggctgaagtaccagctgctgctggagagaccagggggggagtgggcgtcggaggaggccgaaaaaagaagactagaacagtcttctctaggtcacaagtatttcagttagaaagcacctttgatctcaaaagatacctgtcatcggccgaaagagccggacttgctgctagcctgcagctaaccgagacacaagtgaagatctggtttcaaaatcgccgtaacaagtggaagaggcagctcgcagccgaacttgaagctgccagcctgagtccaccaggagctcagcggctcgtgagggtgccggtgctgtatcacgagtctccaccagccgcagcagctgcgggacctcccgcaaccctgccgtttcccctggcacctgcagcccctgcgcctccacctcctctgctcgggttttccggggcactcgcctaccctctcgctgcatttcccgctgctgcctccgtgcctttccttcgggctcagatgcctggcctggtgtag

SEQ ID NO: 200468 - DNA, 1047 bp, Artificial Sequence
  derived and/or modified sequence
atgcccgacgagctgaccgagcccggcagagccacccccgccagagccagcagcttcctgatcgagaacctgctggccgccgaggccaagggcgccggcagagccacccagggcgacggcagcagagaggacgaggaggaggacgacgacgaccccgaggacgaggacgccgagcaggccagaagaagaagactgcagagaagaagacagctgctggccggcaccggccccggcggcgaggccagagccagagccctgctgggccccggcgccctgggcctgggccccagacccccccccggccccggcccccccttcgccctgggctgcggcggcgccgccagatggtaccccagagcccacggcggctacggcggcggcctgagccccgacaccagcgacagagacagccccgagaccggcgaggagatgggcagagccgagggcgcctggcccagaggccccggccccggcgccgtgcagagagaggccgccgagctggccgccagaggccccgccgccggcaccgaggaggccagcgagctggccgaggtgcccgccgccgccggcgagaccagaggcggcgtgggcgtgggcggcggcagaaagaagaagaccagaaccgtgttcagcagaagccaggtgttccagctggagagcaccttcgacctgaagagatacctgagcagcgccgagagagccggcctggccgccagcctgcagctgaccgagacccaggtgaagatctggttccagaacagaagaaacaagtggaagagacagctggccgccgagctggaggccgccagcctgagcccccccggcgcccagagactggtgagagtgcccgtgctgtaccacgagagcccccccgccgccgccgccgccggcccccccgccaccctgcccttccccctggcccccgccgcccccgccccccccccccccctgctgggcttcagcggcgccctggcctaccccctggccgccttccccgccgccgccagcgtgcccttcctgagagcccagatgcccggcctggtgtag

SEQ ID NO: 200469 - protein, 449 aa, Artificial Sequence
  derived and/or modified sequence
MRECISVHVGQAGVQIGNACWELFCLEHGIQADGTFDAQASKINDDDSFTTFFSETGNGKHVPRAVMIDLEPTVVDEVRAGTYRQLFHPEQLITGKEDAANNYARGHYTVGKESIDLVLDRIRKLTDACSGLQGFLIFHSFGGGTGSGFTSLLMERLSLDYGKKSKLEFAIYPAPQVSTAVVEPYNSILTTHTTLEHSDCAFMVDNEAIYDICRRNLDIERPTYTNLNRLISQIVSSITASLRFDGALNVDLTEFQTNLVPYPRIHFPLVTYAPIISAEKAYHEQLSVAEITSSCFEPNSQMVKCDPRHGKYMACCMLYRGDVVPKDVNVAIAAIKTKRTIQFVDWCPTGFKVGINYQPPTVVPGGDLAKVQRAVCMLSNTTAIAEAWARLDHKFDLMYAKRAFVHWYVGEGMEEGEFSEAREDLAALEKDYEEVGTDSFEEENEGEEF

SEQ ID NO: 200470 - DNA, 1350 bp, Artificial Sequence
  derived and/or modified sequence
atgagagagtgcatcagcgtgcacgtgggccaggccggcgtgcagatcggcaacgcctgctgggagctgttctgcctggagcacggcatccaggccgacggcaccttcgacgcccaggccagcaagatcaacgacgacgacagcttcaccaccttcttcagcgagaccggcaacggcaagcacgtgcccagagccgtgatgatcgacctggagcccaccgtggtggacgaggtgagagccggcacctacagacagctgttccaccccgagcagctgatcaccggcaaggaggacgccgccaacaactacgccagaggccactacaccgtgggcaaggagagcatcgacctggtgctggacagaatcagaaagctgaccgacgcctgcagcggcctgcagggcttcctgatcttccacagcttcggcggcggcaccggcagcggcttcaccagcctgctgatggagagactgagcctggactacggcaagaagagcaagctggagttcgccatctaccccgccccccaggtgagcaccgccgtggtggagccctacaacagcatcctgaccacccacaccaccctggagcacagcgactgcgccttcatggtggacaacgaggccatctacgacatctgcagaagaaacctggacatcgagagacccacctacaccaacctgaacagactgatcagccagatcgtgagcagcatcaccgccagcctgagattcgacggcgccctgaacgtggacctgaccgagttccagaccaacctggtgccctaccccagaatccacttccccctggtgacctacgcccccatcatcagcgccgagaaggcctaccacgagcagctgagcgtggccgagatcaccagcagctgcttcgagcccaacagccagatggtgaagtgcgaccccagacacggcaagtacatggcctgctgcatgctgtacagaggcgacgtggtgcccaaggacgtgaacgtggccatcgccgccatcaagaccaagagaaccatccagttcgtggactggtgccccaccggcttcaaggtgggcatcaactaccagccccccaccgtggtgcccggcggcgacctggccaaggtgcagagagccgtgtgcatgctgagcaacaccaccgccatcgccgaggcctgggccagactggaccacaagttcgacctgatgtacgccaagagagccttcgtgcactggtacgtgggcgagggcatggaggagggcgagttcagcgaggccagagaggacctggccgccctggagaaggactacgaggaggtgggcaccgacagcttcgaggaggagaacgagggcgaggagttctag

SEQ ID NO: 200471 - DNA, 1350 bp, Artificial Sequence
  derived and/or modified sequence
atgagggaatgcatttccgtgcacgttggccaggctggggtgcagattggcaacgcttgttgggaactgttctgcctggaacacggaattcaggccgatgggacctttgacgcacaggcttctaagataaatgacgatgactccttcacaacatttttctcagaaacgggcaacggcaagcacgtgcctagggcggttatgatcgacctggagcctacggtcgtggacgaagtgagggccggaacataccgacagctgtttcaccccgaacagctgattacaggcaaagaggacgcagcaaataactacgcaaggggccactacactgtcggcaaagaatcgatcgatcttgtcctggaccgaatcagaaaacttaccgatgcttgctctggcctgcagggattcctaatctttcacagcttcggtggaggcaccggatccggcttcactagcctgctaatggagaggctgagcctggactatgggaagaagtccaagctggagtttgcgatataccccgcacctcaagtctcgaccgcagtggtggaaccatataattcaattctgacaacacacaccacgctagagcatagcgattgcgcctttatggtcgacaacgaagctatttacgacatttgtcgccgtaacctcgatattgagaggccaacttacactaacctcaaccggcttatcagccagattgtctctagtattactgcctcgttaagattcgacggcgcattgaacgtggacctgaccgagtttcaaacaaatctcgtcccctatcctcgaattcatttccccttggtgacgtacgccccaattatcagtgccgagaaggcctatcacgagcagctcagcgtggcagagatcacctcctcatgtttcgaacccaacagtcaaatggtaaagtgcgatcctcgccatgggaagtacatggcctgctgtatgctctaccggggagacgtggtgcctaaggatgttaacgtggccatcgctgcgatcaaaacaaaacgaactatacagttcgtggattggtgccctaccggattcaaggtaggtatcaactaccagcctcccactgtggtgcccgggggagatttggctaaggtgcagcgggctgtgtgcatgctctccaacacaaccgcgattgcggaggcctgggcccggttagaccacaaatttgatcttatgtatgccaaaagagcttttgtccactggtacgtgggggaagggatggaggaaggcgaattctctgaagccagggaggatttagcagctctggagaaagactatgaagaggtcggaacagatagtttcgaggaagaaaacgagggggaagagttctag

SEQ ID NO: 200472 - DNA, 1350 bp, Artificial Sequence
  derived and/or modified sequence
atgagggagtgcatctctgtgcacgtgggccaggccggcgtgcagattggaaatgcctgctgggagctgttctgcctggagcacggcatccaggctgatggcacctttgatgcccaggccagcaagatcaatgatgatgacagcttcaccaccttcttcagcgagactggaaatggcaagcacgtgcccagggctgtgatgattgacctggagcccaccgtggtggatgaggtgcgggccggcacctaccggcagctgttccaccctgagcagctgatcaccgggaaggaggatgctgccaacaactatgcccggggccactacacagtgggcaaggagagcattgacctggtgctggaccgcatcaggaagctgacagatgcctgcagcggcctgcagggcttcctgatcttccacagctttggaggcggcactggaagtggcttcaccagcctgctgatggagcggctgagcctggactatggcaagaagagcaagctggagtttgccatctacccagccccccaggtgtccacagctgtggtggagccctacaacagcatcctgaccacccacaccaccctggagcacagcgactgtgccttcatggtggacaatgaggccatctatgacatctgcagaagaaacctggacatcgagcggcccacctacaccaacctgaacagactcatcagccagatcgtgagcagcatcacagccagcctgcgctttgatggagccctgaatgtggacctgacagagttccagaccaacctggtgccctacccccgcatccacttccccctggtgacctacgcccccatcatctctgctgagaaggcctaccacgagcagctgtctgtggccgagatcaccagcagctgctttgagcccaacagccagatggtgaagtgtgaccccaggcatggcaagtacatggcctgctgcatgctgtacagaggagatgtggtgcccaaggatgtgaatgtggccatcgccgccatcaagaccaagaggaccatccagtttgtggactggtgccccaccggcttcaaggtgggcatcaactaccagcccccaacagtggtgcctggaggagacctggccaaggtgcagagagctgtgtgcatgctgagcaacaccacagccatcgccgaggcctgggcccggctggaccacaagtttgacctgatgtatgccaagagggcctttgtgcactggtacgtgggggagggcatggaggagggggagttcagcgaggcccgggaggacctggccgccctggagaaggactatgaggaggtgggcacagacagctttgaggaggagaatgaaggagaggagttctag

SEQ ID NO: 200473 - DNA, 1350 bp, Artificial Sequence
  derived and/or modified sequence
atgcgggagtgcatcagcgtgcacgtgggccaggccggcgtgcagatcggtaacgcctgttgggagctgttttgcctggagcacggaatccaggccgacggcaccttcgacgcccaagcatcaaaaataaatgacgacgacagctttaccacattcttcagcgaaaccggcaatggaaaacacgtgcctcgggcagttatgattgatctggaacccaccgtggtagatgaggtaagagctgggacctacaggcagctgtttcatccagagcagctgatcacaggcaaggaagatgccgccaataactatgcacgcgggcactataccgtaggcaaggagtcaatcgacctagttctggaccggattcggaaactaacagacgcttgctctggcctgcagggctttttgatcttccacagttttggaggaggcaccgggtccgggttcaccagcttactcatggaacgattgagccttgactacggtaagaagagcaagttggagttcgccatttaccccgctccccaggtgtctaccgcagttgtcgagccctacaactccatccttacgacacacactaccctagagcactctgactgtgccttcatggtggataatgaagccatctacgatatctgccgacgcaatcttgatatcgagcgacccacttacacgaatctcaatcgactgatttcccaaattgttagctctattacagcctcactaaggtttgatggtgcactgaatgtggacctgactgaattccaaacaaatcttgtgccttacccacgcattcactttcctctggtgacttatgcccccattattagcgccgaaaaagcttaccatgagcagttatcggttgctgagattacctcttcctgttttgaaccgaatagccagatggtgaagtgtgaccctcgccacggcaagtatatggcctgctgtatgctgtatcgcggcgacgtggtgccaaaggatgtgaacgtcgcaattgccgccataaaaacaaaaaggacaattcagtttgtggactggtgcccaaccggattcaaagtggggataaattaccagccccccactgttgtaccaggcggggacctggctaaagtccagagggctgtgtgtatgttatcaaacactactgctattgccgaggcctgggcgcgtttagatcacaaattcgaccttatgtatgctaagagagcatttgttcactggtacgtgggtgaaggcatggaagaaggggagttttcagaggccagagaggatctggcagccctcgaaaaggactacgaagaggtgggcactgattcattcgaggaggagaatgagggcgaagagttctag

SEQ ID NO: 200474 - DNA, 1350 bp, Artificial Sequence
  derived and/or modified sequence
atgcgcgaatgcattagcgtgcacgttggccaggccggtgtccagatcgggaatgcctgttgggaattgttttgcctggagcacggaatccaggccgatgggacttttgacgcacaggcgtctaagatcaatgacgatgattccttcactaccttcttctccgagaccggcaatggaaagcatgtgcctcgcgctgttatgatagacctcgaacccaccgtggtggacgaggtccgcgctgggacctatcggcagctcttccatcccgagcaactgatcaccggcaaagaagacgcggctaataactacgctcggggacattacacagtgggcaaagagtcaattgatttagttcttgaccgaatacgtaagctgacagatgcttgctctgggttgcaggggttcttgattttccacagtttcggcggtgggacagggtcagggtttacttctctgctcatggagcgcctaagcttggactacggtaagaagtcgaagctggagtttgcaatttaccctgcccctcaggtgtcaaccgccgtggtcgagccttataattcaatactgacaacccatactaccctggaacattctgattgtgcctttatggtggataacgaagcaatctacgatatatgccgccgaaatctcgatattgagcgccctacatacaccaacctgaaccgcctaatttcccagatcgtttccagcatcacagcctccctgaggttcgatggagctctaaacgtggacctgaccgaattccagactaatcttgtgccctaccccagaatccacttccccctcgtcacatacgcccctatcatctccgccgaaaaagcgtaccacgaacagctgtcagtcgcggagattacaagcagctgctttgagccaaatagtcaaatggtgaagtgtgaccctagacacgggaaatatatggcctgttgtatgctatatcgcggtgatgttgttcccaaagatgtgaatgttgctattgcagctattaagactaagcggaccatccaatttgtggactggtgtccaaccggttttaaggttggtattaattatcagccaccaaccgtggtccccggaggggacttggcaaaagtgcaacgagccgtgtgcatgctctcgaacactacagcgattgcggaggcctgggctaggttggaccacaagttcgaccttatgtacgccaagagggctttcgtccactggtatgtcggagagggcatggaggaaggggagttctccgaggcacgagaggatctggcggctctggagaaggactatgaggaggtcggaacagactcatttgaagaagaaaacgagggagaggagttctag

SEQ ID NO: 200475 - DNA, 1518 bp, Artificial Sequence
  derived and/or modified sequence
tttgtgacctgcccgcccctccccggcactgtgatgccggggggcagctgcgggcccggcgcgcctgtccccggcgtccccccctcccggtgtgtcacaacggcggaggcggctgtatctggagcagtcggggcgggcaggcccagctgagagcgggaatgcatatcagtccacgtgggccaagcgggagttcagattggcaatgcctgctgggagctcttctgcctggaacacggcatccaggcagacggcacttttgatgctcaagctagcaagatcaacgatgatgactccttcaccacctttttcagcgagactggcaatgggaagcatgtgccccgggccgtcatgatagatctggagcctactgtagtggatgaggttcgggcaggaacctaccgccagctcttccatccagagcagctgatcacaggaaaggaggatgcagccaacaactatgcccggggccactacacggtgggcaaggagagcattgacctggtgctggaccgcatacggaagctgacagatgcttgctctggcctgcagggcttcctgattttccacagttttggtgggggcactggctccggcttcacttctctgctgatggaacgcctctccctggattatggcaagaaatccaagctggagtttgccatctacccagccccccaggtctctactgcagtggtggagccctacaactccatcctgaccacccacaccacactggaacattcagattgtgctttcatggtggacaacgaagccatctatgacatctgccgcaggaaccttgacattgagcgccctacctataccaacctcaaccgcctcatcagtcagattgtgtcctcaatcactgcttctctccgctttgacggggccctcaatgtggacctcactgagttccagaccaacctggtgccctacccccgcatccacttcccgctggtcacctacgcgcccatcatctctgccgagaaagcctatcacgaacagctctctgtggccgagataaccagctcctgctttgagcccaacagccagatggtgaagtgcgacccgagacatggcaagtacatggcctgctgcatgctctaccggggcgacgtggtgcccaaggatgtgaatgtcgctattgctgccatcaagaccaagaggaccatccagtttgtagactggtgtcccacaggcttcaaggtgggcatcaactaccagcccccgaccgtggtccccgggggagacctggccaaggtgcagcgggccgtctgcatgctcagcaacaccacggccattgcggaggcctgggcccgcctcgaccacaagttcgacctcatgtacgccaagcgggcctttgtgcattggtatgtgggagaggggatggaagaaggagaattttctgaggccagggaagacttagctgccctggagaaggattatgaagaagtggggactgattcgtttgaagaagaaaatgaaggggaggaattttaaatatataccttccccttg

SEQ ID NO: 200476 - DNA, 2018 bp, Artificial Sequence
  derived and/or modified sequence
aggcggctgtatctggagcagtcggggcgggcaggcccagctgagaggtgcgcgggcgaggacagcggcagcgatgcgggaatgcatatcagtccacgtgggccaagcgggagttcagattggcaatgcctgctgggagctcttctgcctggaacacggcatccaggcagacggcacttttgatgctcaagctagcaagatcaacgatgatgactccttcaccacctttttcagcgagactggcaatgggaagcatgtgccccgggccgtcatgatagatctggagcctactgtagtggatgaggttcgggcaggaacctaccgccagctcttccatccagagcagctgatcacaggaaaggaggatgcagccaacaactatgcccggggccactacacggtgggcaaggagagcattgacctggtgctggaccgcatacggaagctgacagatgcttgctctggcctgcagggcttcctgattttccacagttttggtgggggcactggctccggcttcacttctctgctgatggaacgcctctccctggattatggcaagaaatccaagctggagtttgccatctacccagccccccaggtctctactgcagtggtggagccctacaactccatcctgaccacccacaccacactggaacattcagattgtgctttcatggtggacaacgaagccatctatgacatctgccgcaggaaccttgacattgagcgccctacctataccaacctcaaccgcctcatcagtcagattgtgtcctcaatcactgcttctctccgctttgacggggccctcaatgtggacctcactgagttccagaccaacctggtgccctacccccgcatccacttcccgctggtcacctacgcgcccatcatctctgccgagaaagcctatcacgaacagctctctgtggccgagataaccagctcctgctttgagcccaacagccagatggtgaagtgcgacccgagacatggcaagtacatggcctgctgcatgctctaccggggcgacgtggtgcccaaggatgtgaatgtcgctattgctgccatcaagaccaagaggaccatccagtttgtagactggtgtcccacaggcttcaaggtgggcatcaactaccagcccccgaccgtggtccccgggggagacctggccaaggtgcagcgggccgtctgcatgctcagcaacaccacggccattgcggaggcctgggcccgcctcgaccacaagttcgacctcatgtacgccaagcgggcctttgtgcattggtatgtgggagaggggatggaagaaggagaattttctgaggccagggaagacttagctgccctggagaaggattatgaagaagtggggactgattcgtttgaagaagaaaatgaaggggaggaattttaaatatataccttccccttggctgtgtctctttatttatgctgtgccattcaaagcacatgttcaagagaacagaacactctccccgccccagcctgattcctgccttacccaggaggagggtgcctggccccagtacccagggtggcacgactgggctaagtggacactgagcttcatcaggccctccctgggtaggagcagctttgtgtcactaaagaaagtgagggccactgtctccggcgggtgaggctgcagcccagtttcacatgcgaggaggcctaatcaggagtttcaattccagatcgggctgggtccagccccaaaacatggcctgctggctggggagtgggaacactcagagaaaggggagatctgggcctgggaagattccggggcaggggtgagcggacgttcacatgagtgggtctatagcccgctccgggcatcatctagacttagcatgcattcactcccccatcacatattccaatacacaccctgtcctaggcactgagagctggagagttggtgataagcgagacgaacacatttcctgccctcatacacacataaataaagtgaatgagatcatgtc

SEQ ID NO: 200477 - protein, 450 aa, Artificial Sequence
  derived and/or modified sequence
MSCLMVERCGEILFENPDQNAKCVCMLGDIRLRGQTGVRAERRGSYPFIDFRLLNSTTYSGEIGTKKKVKRLLSFQRYFHASRLLRGIIPQAPLHLLDEDYLGQARHMLSKVGMWDFDIFLFDRLTNGNSLVTLLCHLFNTHGLIHHFKLDMVTLHRFLVMVQEDYHSQNPYHNAVHAADVTQAMHCYLKEPKLASFLTPLDIMLGLLAAAAHDVDHPGVNQPFLIKTNHHLANLYQNMSVLENHHWRSTIGMLRESRLLAHLPKEMTQDIEQQLGSLILATDINRQNEFLTRLKAHLHNKDLRLEDAQDRHFMLQIALKCADICNPCRIWEMSKQWSERVCEEFYRQGELEQKFELEISPLCNQQKDSIPSIQIGFMSYIVEPLFREWAHFTGNSTLSENMLGHLAHNKAQWKSLLPRQHRSRGSSGSGPDHDHAGQGTESEEQEGDSP

SEQ ID NO: 200478 - DNA, 603 bp, Artificial Sequence
  derived and/or modified sequence
tgacacatgctgagcaaggtgggcatgtgggacttcgacatcttcctgttcgacagactgaccaacggcaacagcctggtgaccctgctgtgccacctgttcaacacccacggcctgatccaccacttcaagctggacatggtgaccctgcacagattcctggtgatggtgcaggaggactaccacagccagaacccctaccacaacgccgtgcacgccgccgacgtgacccaggccatgcactgctacctgaaggagcccaagctggccagcttcctgacccccctggacatcatgctgggcctgctggccgccgccgcccacgacgtggaccaccccggcgtgaaccagcccttcctgatcaagaccaaccaccacctggccaacctgtaccaggtgagagagcccaacctggagcccgccaccgtgtggagcatcgccctgggccccgtgctgaagcccgagagctgcccctggagaaagccctgcttcagagtgctggaggtgcagagaagaatgaagcacaacctgtgcccccagaagttcgtgcagacccagatgctgaagatgagcaagatccaggccaacctgatccccgtgtag

SEQ ID NO: 200479 - DNA, 1353 bp, Artificial Sequence
  derived and/or modified sequence
atgtcctgtctgatggtggaacgctgtggggaaattctgttcgaaaatcctgatcagaatgctaaatgtgtctgcatgctgggcgacatccggctgaggggacagaccggggttagggccgagcgacgcgggagctatccctttatcgacttcagattgctgaacagtacaacatatagcggggagatcggcacgaagaagaaagtcaagaggttgctaagcttccaacggtactttcatgcgtcacggttgctgcggggtatcatcccacaggctccactccatctgctggacgaagactatttgggccaggccagacacatgctaagcaaggttggcatgtgggacttcgatattttcctgttcgaccggctgaccaacgggaattctttggtcaccttgctctgtcacctgttcaacacccacggactgattcaccactttaagctcgacatggttaccctgcataggttcctggtaatggtccaggaggattaccactctcaaaatccttaccataacgccgttcatgcggcagatgtgacccaagcaatgcactgttatctaaaagagcctaaattggctagtttcttgacccccctcgacattatgctgggattgcttgctgccgctgcccacgatgtggaccatcccggggtgaaccaaccatttctgatcaaaactaaccatcacctcgcaaacctatatcagaatatgtccgtactcgaaaatcatcactggagatccaccatcggcatgcttagagaaagccgccttctggcccacttgcccaaggagatgactcaggatattgagcagcagctgggaagcctgatccttgcaacagatatcaatcgccaaaatgagtttttgactcggctgaaggctcacctgcacaataaagacctgagactagaagacgctcaggatcgtcatttcatgctgcagatcgcacttaagtgcgccgacatttgtaacccgtgccgtatatgggagatgagcaaacaatggagtgaaagagtgtgtgaggaattctatagacagggggaactagagcagaagttcgaactggaaatctctcccctttgtaaccagcagaaagattccataccttcaatccagattggcttcatgtcttacatcgtcgaaccactttttcgggagtgggctcactttaccggcaattctactttgtccgagaatatgcttgggcatttggcacacaacaaggcccaatggaagagtctgcttcccaggcagcaccgatcccgaggaagctccggttccggaccggatcacgaccatgccggccaggggacagagtcagaggaacaggaaggggactcaccctag

SEQ ID NO: 200480 - DNA, 603 bp, Artificial Sequence
  derived and/or modified sequence
tagcacatgctgtccaaggtcggtatgtgggatttcgatattttcttgttcgatcgcctgacaaatggcaatagcctggttacgctcttgtgtcatctgttcaatacccatggcctcattcatcactttaaattggacatggttactctgcatagatttctggtgatggtgcaggaggactaccactcccaaaatccttaccacaacgcggttcacgccgccgacgttactcaagccatgcactgctacctcaaggaaccaaagctcgcttctttcttgactcctctcgatattatgttggggctattggccgcagcagcacacgacgtagatcaccctggcgtgaatcagccgttcctgatcaagacaaaccaccacttggctaatctctatcaggtgcgggaacccaacctggagcctgccacagtgtggtctatagctttaggacccgtgctgaaacccgaaagctgcccttggagaaaaccctgcttcagggtgctggaagtgcagcgccgcatgaagcacaacctttgcccacaaaagtttgtccagacccagatgctaaagatgtccaaaatccaggctaatttgatccccgtttag

SEQ ID NO: 200481 - DNA, 1353 bp, Artificial Sequence
  derived and/or modified sequence
atgagctgcctgatggtggagcgctgtggggagatcctgtttgaaaatccagaccagaatgccaagtgtgtgtgcatgctgggggacatccggctgcggggccagacaggagtgcgggcagagcggcggggcagctaccccttcatcgacttccggctgctgaacagcaccacctacagcggggagatcggcaccaagaagaaggtgaagaggctgctgtccttccagcgctacttccacgccagccggctgctgcggggcatcatcccccaggcccccctgcacctgctggatgaggactacctgggccaggcccggcacatgctgagcaaggtgggcatgtgggactttgacatcttcctgtttgaccggctgaccaatggaaacagcctggtgaccctgctgtgccacctgttcaacacccacggcctcatccaccacttcaagctggacatggtgaccctgcaccgcttcctggtgatggtgcaggaggactaccacagccagaacccctaccacaatgctgtgcacgccgcagatgtgacccaggccatgcactgctacctgaaggagcccaagctggccagcttcctgacccccctggacatcatgctgggcctgctggccgctgctgcccatgatgtggaccaccctggggtgaaccagcccttcctgatcaagaccaaccaccacctggccaacctgtaccagaacatgtctgtgctggagaaccaccactggaggagcaccatcggcatgctgcgggagagccggctgctggcccacctgcccaaggagatgacccaggacatcgagcagcagctgggcagcctcatcctggccacagacatcaaccggcagaatgagttcctgacccggctgaaggcccacctgcacaacaaggacctgcggctggaggatgcccaggacagacacttcatgctgcagatcgccctgaagtgtgccgacatctgcaacccctgccgcatctgggagatgagcaagcagtggagcgagcgggtgtgtgaggagttctaccggcagggcgagctggagcagaagtttgagctggagatcagccccctgtgcaaccagcagaaggacagcatccccagcatccagatcggcttcatgagctacatcgtggagcccctcttccgggagtgggcccacttcaccggcaacagcaccctgtctgagaacatgctgggccacctggcccacaacaaggcccagtggaagagcctgctgccccggcagcacaggagccggggcagcagcggcagcggccctgaccatgaccacgccggccagggcacagagagcgaggagcaggagggggacagcccctag

SEQ ID NO: 200482 - DNA, 603 bp, Artificial Sequence
  derived and/or modified sequence
tgacacatgctgagcaaggtgggcatgtgggactttgacatcttcctgtttgaccggctgaccaacggcaacagcctggtgaccctgctgtgccacctgttcaacacccacggcctcatccaccacttcaagctggacatggtgaccctgcaccgcttcctggtgatggtgcaggaggactaccacagccagaacccctaccacaatgctgtgcatgctgctgatgtgacccaggccatgcactgctacctgaaggagcccaagctggccagcttcctgacccccctggacatcatgctgggcctgctggccgccgccgcccatgatgtggaccaccctggggtgaaccagcccttcctgatcaagaccaaccaccacctggccaacctgtaccaggtgcgggagcccaacctggagcccgccaccgtgtggagcatcgccctgggccctgtgctgaagccagagagctgcccctggaggaagccctgcttccgggtgctggaggtgcagaggaggatgaagcacaacctgtgcccccagaagtttgtgcagacccagatgctgaagatgagcaagatccaggccaacctgatccctgtgtag

SEQ ID NO: 200483 - DNA, 1353 bp, Artificial Sequence
  derived and/or modified sequence
atgagctgcctgatggtggagcggtgcggcgagatcctgttcgagaatcctgaccagaatgccaagtgtgtgtgcatgctaggggatattcgcctgagaggccagacaggcgtcagggccgaacgccgcggatcatatccttttatagactttagactgttgaattctacaacctacagcggagaaatcggcaccaaaaagaaagtgaagagacttttgtcttttcagagatactttcacgcttcaagactgctcagaggaataatcccccaggcgccacttcacctcctagatgaagattacttgggtcaggccagacatatgctctctaaggtgggtatgtgggatttcgatattttccttttcgatcggctgactaacggcaactcgctagtgacactgttgtgtcacctcttcaacactcacggcctgatccaccattttaagctggacatggttaccctgcatcggttcctcgtcatggtacaggaagactatcattcacagaacccctaccataacgccgtacatgcggctgatgtgacccaagcgatgcactgctacctgaaagagcctaaactggctagctttttgactccacttgatatcatgttgggtctattagcagctgccgctcatgatgtggatcatccaggcgtgaatcagccttttctgattaagaccaatcaccacctggcaaacctgtatcagaatatgtccgtcctcgagaatcatcattggaggagcaccatcggcatgctccgagaatctcgactgttagcccaccttcccaaagagatgactcaagatatagagcagcaactcggctctctcatcttagctactgacatcaacaggcagaatgagttcctgacacggcttaaggctcacctgcacaataaagatctgaggttagaggatgcccaggatcgccattttatgctgcagatcgctcttaagtgtgctgacatctgtaacccctgtcgaatttgggagatgagtaaacagtggagcgaaagggtttgcgaagaattctatcgccagggtgaattggagcaaaagtttgaactcgagatttcacctctttgtaaccagcagaaggattcaattcctagtattcaaattgggttcatgtcatacattgttgaaccattgtttcgtgaatgggcccacttcacaggcaacagtaccctcagcgagaatatgcttggacatctggcacataacaaggcccagtggaagtccctgctaccccggcaacatcggtccagagggagctccgggtctggccctgaccacgatcacgccggacagggcaccgagagtgaagaacaggaaggagattccccctag

SEQ ID NO: 200484 - DNA, 603 bp, Artificial Sequence
  derived and/or modified sequence
tgacacatgctgagcaaggtgggcatgtgggacttcgacatcttcctttttgatcggctcaccaacgggaacagcctggttacactgctgtgccatctgtttaacactcacggtctaatccaccacttcaagttggacatggtaacacttcaccgctttctggtgatggtacaagaagactaccactcacagaatccgtaccacaacgcagtgcatgccgccgacgtaacacaggccatgcactgttatctaaaagaaccaaaacttgcaagttttctgacacctctggatataatgctaggactccttgctgcagcagcgcacgacgtggaccacccaggggtgaatcagccctttctgataaagaccaatcatcacttggccaacctgtaccaagtcagggagcctaatctggagcccgccactgtatggtccatagcattgggacccgtgctcaagcctgaatcttgtccctggcggaagccttgcttccgcgtgctggaggtccagcgccgcatgaagcataacctatgtccccagaagttcgttcagacacagatgctcaaaatgtcgaaaatccaagccaatcttataccggtgtag

SEQ ID NO: 200485 - DNA, 1353 bp, Artificial Sequence
  derived and/or modified sequence
atgtcttgcctgatggtcgagcgctgtggtgagattttgttcgaaaaccccgatcagaacgctaaatgcgtgtgtatgctgggagacatccgccttagaggtcagaccggtgtgcgtgcagaaagacgaggatcatacccatttattgacttcaggttattaaattcgacaacatattccggagagatcggaaccaagaaaaaagtgaaacgcctgttgtccttccagcggtacttccacgcgtcccggttactgcgcggaatcataccacaggcgcctttgcacctgctggacgaggactacttgggccaagccaggcatatgctttccaaagttggaatgtgggacttcgatatcttcctattcgaccgactgacaaacggcaacagtctggtcaccttactttgtcacctgttcaacacgcatggcctgatccatcattttaagcttgatatggtaaccctgcaccggttcctggtcatggtgcaggaagactaccactcacagaatccctaccataacgcggtgcacgctgccgatgtgacgcaggcgatgcattgttacctaaaggagcccaaattggcctcgtttctgacacctctagacatcatgctgggacttcttgcggcagctgcccacgatgtcgatcacccaggagtgaaccagcccttcctgatcaagactaaccatcacctggccaatctgtatcaaaacatgtccgttctggagaaccaccactggaggtcaaccattgggatgttgcgcgagagcagactgctcgcacatctaccaaaagagatgacgcaggacatcgaacagcagctgggatcattgattttggccactgacataaacagacagaatgagttccttaccagactgaaggctcatctgcacaacaaggacctcaggctcgaagacgcccaggatagacatttcatgctccagattgctttgaaatgcgcagacatatgcaacccctgtcggatctgggaaatgtccaagcaatggtccgagcgcgtgtgcgaggagttttaccgccagggcgagctcgaacagaaattcgaactcgagatcagcccactctgtaaccaacaaaaggacagcataccatcgatacaaataggctttatgtcttacatagtggaacccctgttcagagagtgggcacactttactggaaactcgactctcagcgaaaatatgctggggcacctcgctcacaacaaggctcagtggaagagcttgttgcccagacagcaccggtcaagggggtcgtcaggaagcggacctgatcatgatcatgcaggccagggtacggaatccgaggaacaggaaggcgatagcccctag

SEQ ID NO: 200486 - DNA, 603 bp, Artificial Sequence
  derived and/or modified sequence
tagcatatgctgtcaaaggtaggcatgtgggatttcgatatttttctgtttgacaggctgactaacggaaattctctcgtgacactcttatgccacctctttaatacccatggcttaattcatcatttcaagctagatatggtcaccctgcaccgtttcttggtcatggttcaggaagactatcactcccagaatccctaccacaacgctgttcacgccgcagacgtcactcaggctatgcactgttatctgaaggagccaaaactcgcatcgtttctaaccccccttgatatcatgctgggcctactggcagcagctgcacatgatgtcgaccatcctggagtgaatcagccttttctgatcaaaacaaatcatcatctcgcaaatctgtatcaggttcgtgagccaaatctcgaacctgctactgtttggagcatcgccttggggccagtccttaaaccagaaagctgtccctggcggaaaccctgcttccgcgttcttgaggttcagcgcagaatgaaacacaatttgtgtccccaaaagttcgtgcagacgcaaatgttaaaaatgagtaagatacaggccaacctcataccggtctag

SEQ ID NO: 200487 - DNA, 711 bp, Artificial Sequence
  derived and/or modified sequence
gcatatgctctccaaagtgggaatgtgggattttgacattttcttgtttgatcgcttgacaaatggaaacagcctggtaacactgttgtgccacctcttcaatacccatggactcattcaccatttcaagttagatatggtgaccttacaccgatttttagtcatggttcaagaagattaccacagccaaaacccgtatcacaatgctgttcacgcagccgacgtcacccaggccatgcactgctacctgaaagagccaaagcttgccagcttcctcacgcctctggacatcatgcttggactgctggctgcagcagcacacgatgtggaccacccaggggtgaaccagccatttttgataaaaactaaccaccatcttgcaaacctatatcaggtaagggagcccaacctggagccagccacagtatggtcaatcgccttaggcccggtgctcaagcctgaatcttgcccatggagaaagccttgttttagggtcctagaagttcaaagacgaatgaaacacaatctctgccctcaaaaatttgttcaaactcagatgctcaaaatgagcaaaatccaagcaaacttaatcccagtttgaaagaggtttgaggaattagctcatgtcgatacaattgttttttaaaatctctaaagagtaaatacttgtgctgttctttgtatccaaagaccttactagaataaagtgag

SEQ ID NO: 200488 - DNA, 5390 bp, Artificial Sequence
  derived and/or modified sequence
cagtcagttggtctgggcactgcagcaggctcggctctgtcccagcacttgtctgggagaaaagtggtgttactcacccagggagagtctctctttctaccttccttctttctcgatctccttgtgtgcttttgtgtttctttatttcttttccttttttttctttttttttttttgttacttaattatattcctaatcctggatgaagttgctggattctgcagcacaagtcttcatgaacaagcagcaccgctcagagatttcacggcattcaaaggtcacagaactgccactatggttaaatgtcttgtttaatggttgagaggtgtggcgaaatcttgtttgagaaccccgatcagaatgccaaatgtgtttgcatgctgggagatatacgactaaggggtcagacgggggttcgtgctgaacgccgtggctcctacccattcattgacttccgcctacttaacagtacaacatactcaggggagattggcaccaagaaaaaggtgaaaagactattaagctttcaaagatacttccatgcatcaaggctgcttcgtggaattataccacaagcccctctgcacctgctggatgaagactaccttggacaagcaaggcatatgctctccaaagtgggaatgtgggattttgacattttcttgtttgatcgcttgacaaatggaaacagcctggtaacactgttgtgccacctcttcaatacccatggactcattcaccatttcaagttagatatggtgaccttacaccgatttttagtcatggttcaagaagattaccacagccaaaacccgtatcacaatgctgttcacgcagccgacgtcacccaggccatgcactgctacctgaaagagccaaagcttgccagcttcctcacgcctctggacatcatgcttggactgctggctgcagcagcacacgatgtggaccacccaggggtgaaccagccatttttgataaaaactaaccaccatcttgcaaacctatatcagaatatgtctgtgctggagaatcatcactggcgatctacaattggcatgcttcgagaatcaaggcttcttgctcatttgccaaaggaaatgacacaggatattgaacagcagctgggctccttgatcttggcaacagacatcaacaggcagaatgaatttttgaccagattgaaagctcacctccacaataaagacttaagactggaggatgcacaggacaggcactttatgcttcagatcgccttgaagtgtgctgacatttgcaatccttgtagaatctgggagatgagcaagcagtggagtgaaagggtctgtgaagaattctacaggcaaggtgaacttgaacagaaatttgaactggaaatcagtcctctttgtaatcaacagaaagattccatccctagtatacaaattggtttcatgagctacatcgtggagccgctcttccgggaatgggcccatttcacgggtaacagcaccctgtcggagaacatgctgggccacctcgcacacaacaaggcccagtggaagagcctgttgcccaggcagcacagaagcaggggcagcagtggcagcgggcctgaccacgaccacgcaggccaagggactgagagcgaggagcaggaaggcgacagcccctaggggccggcccaacttagacgcggctctcctccggcagggcccccagagggcagaagcagcgtggaggggccctcacgcagcagcccagccactttctgagtgttgtcctggggctctttggaacgccatcttcctcccacttacctgcctcccctccttttcgcaaatgtacagaagccatttgtcacctcagcattcgctgccgaaatgagcaactccattcagtaacgtgggagctgatcccacgggcaggctctccctgctccaggagaagactaggaggaagaatgaggtgctcctgccgtgtccgccttgttccgggtcgcactggaacaggcagcaattcctaagtccggagcgtttgagcgtttgctatctgactgctgatctgcgtgacagaaacaccagcatatttgcaacgccaaggatattggtcttaagtgcaagagcacaaatgagagtgtgagagaaagtaccttctattttaataataatattattataaaaataataaatctttttaacttttatattttatgcactagacaatggatctgcaactttggactaaggtcattcaatgtacccaaacttgaacagggggttcattgttttgctattgactttattatgccactttggggcagagacttggcatcttcgcagtttaagaaaccacgtttcctatccaatccgaagggaaggtgctgtacagttcattcctttgcaccattagccaatctgtcttttatggattctgtgacatgtttatattcacccatgtacattttctgtaaataccaaacgctactgattcccatgccaaaatacatgagtattatgggattgctacctgtataaacaatggcactgtgaaaatactgttagttttaatacaagagaatgcatttgtaaatatggtatagagtttattaatatactattgtttgcagataaaggccttaactttaaacatctttcatcttctgaaagctgcccaacttaaatcctcatagatgtctttctcaactgccttcccatgttcatctgtatgttttccagctaaggtcacaaaccaaaactgaataaagtctttgaggaaacattttggaaacttcacatgcattccgcttgagaccatagtgtttaatctatggcaccaagcatcgtttcctcagattaatgagacccttcaacaagcctgaatcagtcacttttcaacacagcgatgttttaacaagccagctgctaagcttgtgtttatgtgactcttgttacagatcatggcggtgcgtcagcctcacaggagacatagcaggtctcagaaaccttctatgaccctgtcatctaaccatcagggaattccctgctcccatgccacacatttgtctattatggctatagtaccaaagtacttttggtgtttggttggtgtgcatttctttagtgtcgatagtaactggatttttctttttccttaatctcatgtgaacaactacccaactgtttagctgaagttcatattatttaagtaaagaaaatatttcagttttataacagactttaccttcctggcaggtcattgtagttaattatgtctctagcttggagtgtcaccttggaatttcgttgccattttttctcagacacctggccgtaaaatcagtttgttacagcattcttctctaggctgctaaacgctgtgcattgaaccttttctttagaagtttcagcgtaactaatgttagatgaaaattgttgatgcccctttctttttactttaaacaatgtggtagtgggagaatgactgtttctgccactatcaacctgatcctcatgctgatagaatgacagctagcacttatttcctaagtgcaactgttttagagatttttctcctaacatgcaaaggaaatactgattggcctataataagttcctatagggagactgaggcttgcagaattaaggttcaggggaaattttggaaagttggttgtattttcattgaagtaggagagattatcagatggtgctaaagaaagtgtgaagatcttatgaaataggtggatggtaagttgaaattattgatgtgggtaagaagggaggttgtggaaagttaacactagctttgtatttttttttctgtaaaactgtgaactgatatattttcctttatcactttagtattctgcagttctcagcttggtgaggctccaaaagagaatatgtcagatgtattcctacttccaaacctgtcttactttggtttgatggtacacatagggcttttgaacagtctatttttaatgtatatgaggtcaaatcaaggaaggcaattgctggggacaagaaaagtagaggtaggaaagaagacactattttagctaatggggtttcttgggactaaaaaatggctttgtttaaattataattatataataatttaaataaatgagattggaggtattcttagtagttctgagttgatagtttacattacaattaggtcttgaagaagagctcacagagaaaaaactaccaaatatccaatgggtaagcccatgatgtagccactagtacaataaaaatctgaagtaaaatgaggcataaacttgatgcagctgcctccctcattcaactggggagttcttgagttcctcatttgttggtaaaaagaaaaagaatgtgaaaatgtctctttttttcttggctattagtggctgtcttgcaatatttcaataggagtccaattactagttaaaacactggcggggtgcggtggctcacgcctgtaatcctagcactttgggaggccaagttgggcagatcacaagttcaagagatcgagaccattctggccaacatggtgaaaccccgtctctactaaaaatacaaaaattagctgggcatggcagtgcgtgcctgcaatcccagctactcaggaagctgaggcaggagaatcgcttgaacctgggaggtggaagttgtagtgaactgagatcgcaccactgcactccagcctggcaacagagctagaatccgtctcaaacaaacaaacaaaaaatcccacagctattggatcatccacagattttttctttacaatcttgttctccttgtccatggaccatcaatagttgacttgccaggtttaattctttcattgcttgagaagaaaggaatcaaaggactgtgtgtagtaagctgacggtaaagttaagattaaattaagacagagagagaatacatatcactgccaggcctgataggaaaaatctgctcttccttttaataacagtgatgaattgtcaggaccttatttaggaaaccctgacctacccataactccctgctaggctaagtagaaaccaggttatttctccctgcttatggctccccgcaaagggacttgcagcgtgtcctgcaactttgtcttcagatagtgcttcctacaaaactaggtcttgttttgtaatcttttctcgtgttgaatcagatctgcttacttatttaggtttggttatgagcttgtatctcactgtatttctcatgctttgttcttttaaacaaatcctttaaactgtgtcattttgtatacacatgtgaggtttgaaaaaaaaaaaaaaaaaaaaaagaactaccttgtgagttttgctcaaaatgtggcctaagtagccattggcatgtctagatgaacaaataaaaataaagataatttctttaaaatatca

SEQ ID NO: 200489 - DNA, 1353 bp, Artificial Sequence
  derived and/or modified sequence
atgagctgcctgatggtggagagatgcggcgagatcctgttcgagaaccccgaccagaacgccaagtgcgtgtgcatgctgggcgacatcagactgagaggccagaccggcgtgagagccgagagaagaggcagctaccccttcatcgacttcagactgctgaacagcaccacctacagcggcgagatcggcaccaagaagaaggtgaagagactgctgagcttccagagatacttccacgccagcagactgctgagaggcatcatcccccaggcccccctgcacctgctggacgaggactacctgggccaggccagacacatgctgagcaaggtgggcatgtgggacttcgacatcttcctgttcgacagactgaccaacggcaacagcctggtgaccctgctgtgccacctgttcaacacccacggcctgatccaccacttcaagctggacatggtgaccctgcacagattcctggtgatggtgcaggaggactaccacagccagaacccctaccacaacgccgtgcacgccgccgacgtgacccaggccatgcactgctacctgaaggagcccaagctggccagcttcctgacccccctggacatcatgctgggcctgctggccgccgccgcccacgacgtggaccaccccggcgtgaaccagcccttcctgatcaagaccaaccaccacctggccaacctgtaccagaacatgagcgtgctggagaaccaccactggagaagcaccatcggcatgctgagagagagcagactgctggcccacctgcccaaggagatgacccaggacatcgagcagcagctgggcagcctgatcctggccaccgacatcaacagacagaacgagttcctgaccagactgaaggcccacctgcacaacaaggacctgagactggaggacgcccaggacagacacttcatgctgcagatcgccctgaagtgcgccgacatctgcaacccctgcagaatctgggagatgagcaagcagtggagcgagagagtgtgcgaggagttctacagacagggcgagctggagcagaagttcgagctggagatcagccccctgtgcaaccagcagaaggacagcatccccagcatccagatcggcttcatgagctacatcgtggagcccctgttcagagagtgggcccacttcaccggcaacagcaccctgagcgagaacatgctgggccacctggcccacaacaaggcccagtggaagagcctgctgcccagacagcacagaagcagaggcagcagcggcagcggccccgaccacgaccacgccggccagggcaccgagagcgaggagcaggagggcgacagcccctag

SEQ ID NO: 200490 - protein, 359 aa, Artificial Sequence
  derived and/or modified sequence
MPLELELCPGRWVGGQHPCFIIAEIGQNHQGDLDVAKRMIRMAKECGADCAKFQKSELEFKFNRKALERPYTSKHSWGKTYGEHKRHLEFSHDQYRELQRYAEEVGIFFTASGMDEMAVEFLHELNVPFFKVGSGDTNNFPYLEKTAKKGRPMVISSGMQSMDTMKQVYQIVKPLNPNFCFLQCTSAYPLQPEDVNLRVISEYQKLFPDIPIGYSGHETGIAISVAAVALGAKVLERHITLDKTWKGSDHSASLEPGELAELVRSVRLVERALGSPTKQLLPCEMACNEKLGKSVVAKVKIPEGTILTMDMLTVKVGEPKGYPPEDIFNLVGKKVLVTVEEDDTIMEELVDNHGKKIKS

SEQ ID NO: 200491 - DNA, 1080 bp, Artificial Sequence
  derived and/or modified sequence
atgcccctggagctggagctgtgccccggcagatgggtgggcggccagcacccctgcttcatcatcgccgagatcggccagaaccaccagggcgacctggacgtggccaagagaatgatcagaatggccaaggagtgcggcgccgactgcgccaagttccagaagagcgagctggagttcaagttcaacagaaaggccctggagagaccctacaccagcaagcacagctggggcaagacctacggcgagcacaagagacacctggagttcagccacgaccagtacagagagctgcagagatacgccgaggaggtgggcatcttcttcaccgccagcggcatggacgagatggccgtggagttcctgcacgagctgaacgtgcccttcttcaaggtgggcagcggcgacaccaacaacttcccctacctggagaagaccgccaagaagggcagacccatggtgatcagcagcggcatgcagagcatggacaccatgaagcaggtgtaccagatcgtgaagcccctgaaccccaacttctgcttcctgcagtgcaccagcgcctaccccctgcagcccgaggacgtgaacctgagagtgatcagcgagtaccagaagctgttccccgacatccccatcggctacagcggccacgagaccggcatcgccatcagcgtggccgccgtggccctgggcgccaaggtgctggagagacacatcaccctggacaagacctggaagggcagcgaccacagcgccagcctggagcccggcgagctggccgagctggtgagaagcgtgagactggtggagagagccctgggcagccccaccaagcagctgctgccctgcgagatggcctgcaacgagaagctgggcaagagcgtggtggccaaggtgaagatccccgagggcaccatcctgaccatggacatgctgaccgtgaaggtgggcgagcccaagggctacccccccgaggacatcttcaacctggtgggcaagaaggtgctggtgaccgtggaggaggacgacaccatcatggaggagctggtggacaaccacggcaagaagatcaagagctag

SEQ ID NO: 200492 - DNA, 1080 bp, Artificial Sequence
  derived and/or modified sequence
atgcctttagaactagagctgtgcccaggtcgatgggtcggcggccagcatccctgcttcatcatcgctgaaatcggacagaaccatcagggagatctggacgtggcgaagcgaatgatccgcatggccaaggagtgtggagccgattgtgcaaaatttcaaaaatccgagctggaattcaagttcaatcgcaaagcccttgaacggccctataccagcaaacacagttgggggaaaacctacggagagcataaacgacacctggaatttagtcacgaccagtatcgcgaactgcagcgttacgccgaggaagtgggtatcttcttcacggccagtggtatggatgagatggccgtggagtttctgcatgagctcaatgtcccctttttcaaagttggcagcggagatacaaacaatttcccatatctcgaaaagaccgcaaagaagggaaggcccatggtgatcagctcagggatgcagagcatggatactatgaagcaggtgtatcagattgtgaagccgctgaacccaaatttttgctttttgcagtgcacctctgcttatccgcttcagccagaagacgtcaacctgcgagtcatttccgaatatcagaagctgtttccagatattccgatcggttatagtggacacgaaactgggatcgcgatcagcgttgctgcggtggccctcggcgcaaaagtcctggaacgccatattacattagataaaacctggaaaggttccgaccactcggctagcctagaaccaggcgaacttgcagagctagtgaggtctgtaagactcgttgagagggccctcggctccccaactaagcagctgcttccctgcgagatggcttgcaatgagaagctgggcaaatccgtggtggccaaggttaaaatccccgaagggacaattctaaccatggacatgctgaccgtgaaggtcggagagcccaaaggttacccgcctgaagacatatttaacctggtgggcaaaaaggtccttgtgaccgtggaagaagatgacacaattatggaggagctcgtggataaccacggaaagaaaataaaatcttag

SEQ ID NO: 200493 - DNA, 1080 bp, Artificial Sequence
  derived and/or modified sequence
atgcccctggagctggagctgtgccccggccgctgggtgggcggccagcacccctgcttcatcatcgccgagatcggccagaaccaccagggcgacctggatgtggccaagaggatgatccgcatggccaaggaatgtggggctgactgtgccaagttccagaagtctgagctggagttcaagttcaacaggaaggccctggagcggccctacaccagcaagcacagctggggcaagacctatggagagcacaagaggcacctggagttcagccatgaccagtaccgggagctgcagagatatgcagaggaggtgggcatcttcttcaccgccagcggcatggatgagatggctgtggagttcctgcacgagctgaatgtgcccttcttcaaggtgggcagcggggacaccaacaacttcccctacctggagaagacagccaagaagggccggcccatggtgatcagcagcggcatgcagagcatggacaccatgaagcaggtgtaccagatcgtgaagcccctgaaccccaacttctgcttcctgcagtgcaccagcgcctaccccctgcagccagaagatgtgaacctgcgggtcatcagcgagtaccagaagctgttcccagacatccccatcggctacagcggccatgaaacaggaattgccatctctgtggccgctgtggccctgggcgccaaggtgctggagcggcacatcaccctggacaagacctggaagggcagtgaccacagcgccagcctggagcccggggagctggccgagctggtgcgctctgtgcggctggtggagcgggccctgggcagccccaccaagcagctgctgccctgtgagatggcctgcaatgagaagctgggcaagtctgtggtggccaaggtgaagatccctgagggcaccatcctgaccatggacatgctgactgtgaaggtgggggagcccaagggctaccccccagaggacatcttcaacctggtgggcaagaaggtgctggtgacagtggaggaggatgacaccatcatggaggagctggtggacaaccacggcaagaagatcaagagctag

SEQ ID NO: 200494 - DNA, 1080 bp, Artificial Sequence
  derived and/or modified sequence
atgcccctggagctggagctgtgccccggccggtgggtgggcggccaacatccttgctttatcatcgccgaaatcggccagaatcaccagggggacctggacgttgcaaaaaggatgattaggatggccaaggaatgcggagctgactgtgcaaagttccaaaaaagtgaactcgaatttaagtttaatcgtaaggcgctggaacgcccttatacatctaagcattcttgggggaagacatatggtgagcataaacgacatttggagttctcccacgatcaatatagagaacttcagcggtacgcagaagaggttggtattttttttaccgcttctggcatggacgagatggccgtggaatttctccacgagctgaacgttccattcttcaaggtgggctcaggggataccaacaacttcccctatttggaaaagacagccaaaaaagggagacctatggtcatatcaagcgggatgcagagtatggacaccatgaagcaagtgtatcagatagtcaaaccattgaatccgaatttttgtttcctccaatgcacttcagcctacccactccagcccgaggacgtgaacctgcgcgtgatcagtgagtaccaaaagttgttcccagacattcccataggctacagcggccatgaaactgggatcgccatctcggttgccgccgttgcgctcggcgctaaagtgttggagaggcacataactctggacaaaacctggaaaggaagcgatcatagcgcgtccctcgaaccaggcgaactggccgagctggtgcgctctgtccggctggtagagagggcactcggatcccctacaaaacagctgctgccctgcgaaatggcctgtaacgagaagttgggtaaatctgtcgtggcaaaagtgaagattcctgagggaacaatccttacaatggacatgctcacagtcaaggtgggggaacctaagggatacccgccagaggacatttttaatctggtgggaaaaaaggtcttggtcacggtggaagaggatgatacaatcatggaggagctggtcgacaatcatggcaaaaagatcaaaagctag

SEQ ID NO: 200495 - DNA, 1080 bp, Artificial Sequence
  derived and/or modified sequence
atgccactggaacttgagctttgcccagggagatgggtcggaggacagcatccttgtttcatcattgcggagataggccagaatcatcaaggcgatctggacgtggcaaagagaatgattcgaatggcgaaggagtgtggagccgactgtgcaaaattccagaagagcgagctggaattcaaattcaatcgcaaggccctggaacgcccatacacctcaaagcattcttggggcaagacctacggggagcacaaacgacacctggaattctctcacgaccaataccgcgagctacaacgatacgccgaggaagtggggatttttttcacagcttccggcatggacgagatggccgtagagttcctccatgagctcaacgtgccgttcttcaaagtgggctccggagataccaataacttcccatacctggagaagactgcgaaaaagggacgcccaatggtgatcagttctggcatgcagagtatggatacaatgaagcaagtataccaaatcgtgaagccccttaatcctaacttctgtttcctgcagtgcacaagcgcatatcccctgcagcctgaagacgtgaatttgcgggttatttccgaatatcagaagctttttcccgatatacccatcggttattctggccatgagactggcattgcaatcagtgtggctgctgtcgccttgggggctaaggtgctcgaacggcacataaccctcgacaaaacatggaagggttcagaccatagcgctagtctggagccaggggaactggctgaactcgtaagaagcgtgaggctggtggagagagctctgggtagtcccactaagcagctgttgccctgcgaaatggcttgcaacgagaagctggggaagagtgtggtcgctaaggtgaagatcccagagggcactattctgaccatggacatgctgactgtgaaagtgggcgaacccaaaggatatccgcctgaggacatttttaaccttgtaggcaaaaaggtgctggtgaccgttgaggaggacgacaccataatggaagagctggtggacaatcacggtaaaaaaattaaatcttag

SEQ ID NO: 200496 - DNA, 1170 bp, Artificial Sequence
  derived and/or modified sequence
agagtagaggcggcggcggcggcggccggacccagactggtagtgaggctttggaccccgagccgctgcaatgccgctggagctggagctgtgtcccgggcgctgggtgggcgggcaacacccgtgcttcatcattgccgagatcggccagaaccaccagggcgacctggacgtagccaagcgcatgatccgcatggccaaggagtgtggggctgattgtgctaagttccagaagagtgagctagaattcaagtttaatcggaaagccttggagaggccatacacctcgaagcattcctgggggaagacgtacggggagcacaaacgacatctggagttcagccatgaccagtacagggagctgcagaggtacgccgaggaggttgggatcttcttcactgcctctggcatggatgagatggcagttgaattcctgcatgaactgaatgttccatttttcaaagttggatctggagacactaataattttccttatctggaaaagacagccaaaaaaggtcgcccaatggtgatctccagtgggatgcagtcaatggacaccatgaagcaagtttatcagatcgtgaagcccctcaaccccaacttctgcttcttgcagtgtaccagcgcatacccgctccagcctgaggacgtcaacctgcgggtcatctcggaatatcagaagctctttcctgacattcccatagggtattctgggcatgaaacaggcatagcgatatctgtggccgcagtggctctgggggccaaggtgttggaacgtcacataactttggacaagacctggaaggggagtgaccactcggcctcgctggagcctggagaactggccgagctggtgcggtcagtgcgtcttgtggagcgtgccctgggctccccaaccaagcagctgctgccctgtgagatggcctgcaatgagaagctgggcaagtctgtggtggccaaagtgaaaattccggaaggcaccattctaacaatggacatgctcaccgtgaaggtgggtgagcccaaaggctatcctcctgaagacatctttaatctagtgggcaagaaggtcctggtcactgttgaagaggatgacaccatcatggaagaattggtagataatcatggcaaaaaaatcaagtcttaaaaataaagtgccattctctg

SEQ ID NO: 200497 - protein, 105 aa, Artificial Sequence
  derived and/or modified sequence
MGDVEKGKKIFIMKCSQCHTVEKGGKHKTGPNLHGLFGRKTGQAPGYSYTAANKNKGIIWGEDTLMEYLENPKKYIPGTKMIFVGIKKKEERADLIAYLKKATNE

SEQ ID NO: 200498 - protein, 101 aa, Artificial Sequence
  derived and/or modified sequence
MGDVEKGKKIFIMKCSQCHTVEKGGKHKTGPNLHGLFGRKTGQAPGYSYTAANKNKGIIWGEDTLMEYLENPKKYIPGTKMIFVGIKKKEERADLIAYLKK

SEQ ID NO: 200499 - DNA, 318 bp, Artificial Sequence
  derived and/or modified sequence
atgggcgacgtggagaagggcaagaagatcttcatcatgaagtgcagccagtgccacaccgtggagaagggcggcaagcacaagaccggccccaacctgcacggcctgttcggcagaaagaccggccaggcccccggctacagctacaccgccgccaacaagaacaagggcatcatctggggcgaggacaccctgatggagtacctggagaaccccaagaagtacatccccggcaccaagatgatcttcgtgggcatcaagaagaaggaggagagagccgacctgatcgcctacctgaagaaggccaccaacgagtag

SEQ ID NO: 200500 - DNA, 306 bp, Artificial Sequence
  derived and/or modified sequence
atgggcgacgtggagaagggcaagaagatcttcatcatgaagtgcagccagtgccacaccgtggagaagggcggcaagcacaagaccggccccaacctgcacggcctgttcggcagaaagaccggccaggcccccggctacagctacaccgccgccaacaagaacaagggcatcatctggggcgaggacaccctgatggagtacctggagaaccccaagaagtacatccccggcaccaagatgatcttcgtgggcatcaagaagaaggaggagagagccgacctgatcgcctacctgaagaagtag

SEQ ID NO: 200501 - DNA, 4098 bp, Artificial Sequence
  derived and/or modified sequence
gtagccgccagctcggccgcacgtcagggcgcgggagcgcggagcgagtttggttgcacttacaccggtacttaagcgcggaccggcgtgtccttggacttagagagtggggacgtccggcttcggagcgggagtgttcgttgtgccagcgactaaaaagagaattaaatatgggtgatgttgagaaaggcaagaagatttttattatgaagtgttcccagtgccacaccgttgaaaagggaggcaagcacaagactgggccaaatctccatggtctctttgggcggaagacaggtcaggcccctggatactcttacacagccgccaataagaacaaaggcatcatctggggagaggatacactgatggagtatttggagaatcccaagaagtacatccctggaacaaaaatgatctttgtcggcattaagaagaaggaagaaagggcagacttaatagcttatctcaaaaaagctactaatgagtaataattggccactgccttatttattacaaaacagaaatgtctcatgacttttttatgtgtaccatcctttaatagatctcatacaccagaattcagatcatgaatgactgacagaatattttgttgggcagtcctgatttaaaactaagactggcttgtggttaaatgaatatgttcagtttttgaattttaatagtaactccaattcagtaaatggtatcactgtttaccccttttaaagatatgattagacttcgttagtaatgttcaacttttcacaaagatggtgagtgccatcttaaaacttactggagattggttttatatttagatttatataactggttatgtgaatatatttaaatactggggaaattgcttcactgtcttagaaccaagcaagattcacctgtgttttgtgttcatgttcatttgcctcttaaaggcaagggttgaagataaataaggtagcaatgtctatagttttggccttaactatgccaatctaattataattccctgtatttaaaatggtttcttttacttattgaaaggcattttagtgtggtttatgtgtaatattaaagattattcaacacctctcacatcttacagatctataaggtcacatgcttttaaaatagtagcaagttaaacttcactcttgaattctttacaatctaagtcaaactaagttataatttaggattgtctttaaacagccattcagaaacaaaactgtagaactgtgtatttgattgggaatggtgcttttgccaacttaaaaggattaaagtaacggagatatacacaaattttaaaattatgtgtgatcacaagactaaagataattaaaaagaaaaccacagatcatgactttttgactgtgcttgatttcatgactgatgcacaaattttaatgattaaaaagtgcaggagccctaaatgtcagtgcagcagccctaaatgtcagtgcagcagtgttaaccagtcatggtgctagattgtttacttggttttctaggactgcctcaactagaataacacttcactaattgactcttagtttctttgctcagattgagaactgcagcatttatgccagacatggacagaggaatgcctgtggtcatagttttgtgatgtgtaacagtgtataattacatactgaattatttcatgcatagtctgtgccatacacatttagagtagtccttggagattttatggagatggtgagcacaaggtaagtcataaagaataatgagaaaataaatctatgctggtgcagctgagaactgtatctttgtgggacagtgagaagactgagaagatgtgaatccatggtctcaaaggtgatagggacgattagataggtgttttaaggcctgaaagcaatttataacatatgagtcttatttttatttatagaaatgtggaaagcttgctgtaattcatatttgaagtcctagtctgagttctggtggggaatttaaaaatgcatcctggaaatcctttaaagatttcagactttgaaaggccttgtagcagaggacttggtgactgtataaagttagtggtattcagggacagtgtagcaagtagcttacaaggggacaattctggactaatgagaaagacctgaagtgaaggctagagagttgattttttttttttttggcatcctggaaatgatacaggaaacatattaagatagatacagaaatgtgttcaaccttccatcttggctagttgtggcgtttagtttgttttttgagacatggtcacgctgtgtcgccaaggctggagtgcagtggtgcgatctcggctggctgcaacctctatttcccaggctcaagcgattctctcacttcagcttcccaagtagctgggactacaggtgttcgccaccatgcccagctaatttttttgtagagatggagttttgccatgtggtcccaggctggtctcaaactcctgagctcaagcaatccgtccacttgccttggctccccaaagtgctgggattacaggcgtgagccaccaggccctgcctggttttcaaattcagaaatcttattatttaacccagaagtaatcagcccagtagtaacttaggtttaattttttttcaggtttaaaatttttctcatttattttttctgagacggagtttcgcccttttcgcccaggctgagtacagtggtgcaatctcactgcaacctccgccttccagttgcaagtgattctcctgcctcagcctcctgagtagctgggattacaggcacccgccaccacgcctggctaatttttgtatttttagtggagatggtgtttcaccatgttggccagactggtcttggactcctgacctcgtgatccacccaccttggcctcccaaagttctaggattacaggtgtgagccaccacgtccggccaatttttctcatttctatgcctcctatattaaggtctgtgttggcacagatgagtaactgccatgttctaggtcagttatacccaagcacttctggtggtttaaaatgtgattctgtaacttttttatttttatttttttgagataatttcactcttgttgcccaggctggagtgcaatggcgtgatcgctgctcaccgcaacctccgccttccaggttcaagcgattctcctgactcagcctctcaagtagctgggattacaagcatgcgccaccatgcccagcttattttgtgtttttagtagagacagggtttctccatgctggacaggctggtcttgaactcccgacgtcaggtgatctacctgcctcggcctcccaaagtgctgggattacaggcgtgagccaccacgcctggccaattatgtaattttttaaaaaggacatttctatcagggatatataccttcagaaataaggaaataggggaaaaaaagagcactataaaccacatgttttcatttctagtgcttcgctgtaagtggctaggttggtagaatcaaaaacaagggccagatgtatttaaggggtattcagatgccacctacatgcttattttgtctagaacagtgctgtctaatagaactttctgtgacgatggatattttgtagacttttgctgtccagtgtggtagccactaaccacatgtggctgttaagcccttgaaatatagctagtgtgactagaaagtattttattttaaatttacataggcacaagtggctagtggctactgtattgacattctgggtctaggactagaaccagtggtctgtaacaaaagtactttctctttactctattaaatctagaattagccgggcatggtcgctcatgcctgtaatcccagcactttgggaggccaaggcaggcagatcacttgaggtcaggcgtttgagaccagcctggtcaacatggcgaaaccctgtctctacaaaaaacataaaaattagccaggtgtggtggtgggcacctgtaatctcagctacttgggaggctgaggcacaagaatcacttgaacttgggaggtggaggttgcagtgagccaagattgtgccactgcactcaagcctgggtgacgagtgaaactgtctccaaaaaaaaaaaaaaa

SEQ ID NO: 200502 - DNA, 974 bp, Artificial Sequence
  derived and/or modified sequence
acgtccggcttcggagcgggagtgttcgttgtgccagcgactaaaaagaggtgagagcgggtcgcggaggccgcacctggttagaggcagagctgtgggaggcgcgcacttgcgagcgaccgaaacccaagcggggagcattcgagtggagcccgcgctgggtgggagggcggggagtgaagaccctggactgtggtcagaccgagctgggcgagtaacggcttgaggtgcggcggagccctaactagggacagaattaaatatgggtgatgttgagaaaggcaagaagatttttattatgaagtgttcccagtgccacaccgttgaaaagggaggcaagcacaagactgggccaaatctccatggtctctttgggcggaagacaggtcaggcccctggatactcttacacagccgccaataagaacaaaggcatcatctggggagaggatacactgatggagtatttggagaatcccaagaagtacatccctggaacaaaaatgatctttgtcggcattaagaagaaggaagaaagggcagacttaatagcttatctcaaaaaagctactaatgagtaataattggccactgccttatttattacaaaacagaaatgtctcatgacttttttatgtgtaccatcctttaatagatctcatacaccagaattcagatcatgaatgactgacagaatattttgttgggcagtcctgatttaaaactaagactggcttgtggttaaatgaatatgttcagtttttgaattttaatagtaactccaattcagtaaatggtatcactgtttaccccttttaaagatatgattagacttcgttagtaatgttcaacttttcacaaagatggtgagtgccatcttaaaacttactggagattggttttatatttagatttatataactggttatgtgaatatatttaaatactggggaaattgcttcactgtcttagaac

SEQ ID NO: 200503 - DNA, 799 bp, Artificial Sequence
  derived and/or modified sequence
agagagtggggacgtccggcttcggagcgggagtgttcgttgtgccagcgactaaaaagagagggcaaaagctgttgctcttctaataaggggccagttcttttcgtgggcacatgtttcttccgtcagtcgttctgacatcctagaaggagtttcatcaatcaccttgaaaccgacctggacgggtgacctcgtggtcgccccaggagatcacagaattaaatatgggtgatgttgagaaaggcaagaagatttttattatgaagtgttcccagtgccacaccgttgaaaagggaggcaagcacaagactgggccaaatctccatggtctctttgggcggaagacaggtcaggcccctggatactcttacacagccgccaataagaacaaaggcatcatctggggagaggatacactgatggagtatttggagaatcccaagaagtacatccctggaacaaaaatgatctttgtcggcattaagaagaaggaagaaagggcagacttaatagcttatctcaaaaaagctactaatgagtaataattggccactgccttatttattacaaaacagaaatgtctcatgacttttttatgtgtaccatcctttaatagatctcatacaccagaattcagatcatgaatgactgacagaatattttgttgggcagtcctgatttaaaactaagactggcttgtggttaaatgaatatgttcagtttttgaattttaatagtaactccaattcagtaaatggtatcactgtttaccccttttaaagatatgattagacttcgt

SEQ ID NO: 200504 - DNA, 498 bp, Artificial Sequence
  derived and/or modified sequence
agagagtggggacgtccggcttcggagcgggagtgttcgttgtgccagcgactaaaaagaggggccagttcttttcgtgggcacatgtttcttccgtcagtcgttctgacatcctagaaggagtttcatcaatcaccttgaaaccgacctggacgggtgacctcgtggtcgccccaggagatcacagaattaaatatgggtgatgttgagaaaggcaagaagatttttattatgaagtgttcccagtgccacaccgttgaaaagggaggcaagcacaagactgggccaaatctccatggtctctttgggcggaagacaggtcaggcccctggatactcttacacagccgccaataagaacaaaggcatcatctggggagaggatacactgatggagtatttggagaatcccaagaagtacatccctggaacaaaaatgatctttgtcggcattaagaagaaggaagaaagggcagacttaatagcttatctcaaaaaa

SEQ ID NO: 200505 - DNA, 318 bp, Artificial Sequence
  derived and/or modified sequence
atgggcgacgtggagaagggtaagaagatttttattatgaaatgcagccaatgtcataccgtcgagaagggtggtaaacacaagaccggccccaacctccacgggctgtttggaagaaagactggtcaggcccctgggtactcctacactgccgccaataagaacaaggggataatctggggtgaagacacgctcatggagtacctcgagaatccaaaaaaatacatcccaggtacgaaaatgatattcgtcggtattaaaaagaaagaggaaagggcggacctgatcgcctatcttaagaaggccacaaatgagtag

SEQ ID NO: 200506 - DNA, 318 bp, Artificial Sequence
  derived and/or modified sequence
atgggcgatgtcgagaagggcaagaaaatctttattatgaaatgttcacagtgccataccgtcgaaaagggagggaaacacaagaccgggccgaatttacatggactgttcgggagaaaaaccgggcaagcacccggttactcttatactgctgctaacaagaacaagggtatcatatggggcgaagacaccctgatggagtaccttgaaaatcctaagaaatacattccgggtacaaaaatgatcttcgttgggatcaaaaagaaggaagagagggcggatctgatagcttacctgaagaaggctacgaatgagtag

SEQ ID NO: 200507 - DNA, 318 bp, Artificial Sequence
  derived and/or modified sequence
atgggagacgtggaaaaaggaaagaagatctttatcatgaaatgcagtcagtgtcacaccgtggagaaggggggcaaacacaagacaggccccaatcttcatgggcttttcggaaggaagaccggtcaggccccagggtactcttacactgccgccaacaaaaacaaggggatcatctggggcgaggatactctgatggagtacctagaaaaccccaagaagtatatccctggtacaaaaatgattttcgtggggatcaaaaagaaggaagaacgcgccgatctcatcgcatatcttaagaaagcaaccaacgagtag

SEQ ID NO: 200508 - DNA, 306 bp, Artificial Sequence
  derived and/or modified sequence
atgggagatgtggaaaagggcaaaaagatctttatcatgaagtgttctcagtgccacactgtcgaaaagggcggtaaacataagaccggccctaatttgcacggactgtttgggcgaaagactgggcaggcgcctggctatagctacactgccgcgaataagaacaaaggcattatatggggagaggacaccctgatggaataccttgagaatcctaaaaaatacatccctggcacaaaaatgatttttgtaggaataaaaaaaaaggaagaacgggccgatctgatcgcttatctgaaaaagtag

SEQ ID NO: 200509 - DNA, 318 bp, Artificial Sequence
  derived and/or modified sequence
atgggagatgtggagaagggcaagaagatcttcatcatgaagtgcagccagtgccacacagtggagaagggcggcaagcacaagacaggccccaacctgcacggcctgtttggaaggaagacaggccaggcccctggctacagctacacagctgccaacaagaacaagggcatcatctggggcgaggacaccctgatggagtacctggagaaccccaagaagtacatccctggcaccaagatgatctttgtgggcatcaagaagaaggaggagagagctgacctgattgcctacctgaagaaggccaccaatgaatag

SEQ ID NO: 200510 - DNA, 306 bp, Artificial Sequence
  derived and/or modified sequence
atgggagatgtggagaagggcaagaagatcttcatcatgaagtgcagccagtgccacacagtggagaagggcggcaagcacaagacaggccccaacctgcacggcctgtttggaaggaagacaggccaggcccctggctacagctacacagctgccaacaagaacaagggcatcatctggggcgaggacaccctgatggagtacctggagaaccccaagaagtacatccctggcaccaagatgatctttgtgggcatcaagaagaaggaggagagagctgacctgattgcctacctgaagaagtag

SEQ ID NO: 200511 - DNA, 318 bp, Artificial Sequence
  derived and/or modified sequence
atgggcgacgtggagaagggcaagaagatcttcatcatgaagtgcagccagtgccatacagtggagaaaggcggaaagcacaaaaccgggccaaacttgcatggtctgttcgggcgaaagactgggcaggcccctggttactcctatacagcggctaacaaaaacaaaggaattatatggggcgaggatacgcttatggagtatcttgagaacccgaaaaagtacatcccaggcacaaaaatgatatttgtgggaatcaagaagaaagaggaaagagcggaccttatcgcctatctgaagaaggccacgaacgagtag

SEQ ID NO: 200512 - DNA, 318 bp, Artificial Sequence
  derived and/or modified sequence
atgggcgacgtggagaagggcaagaagatcttcatcatgaagtgctcacagtgtcacacagttgaaaagggcgggaagcataaaaccggcccgaatttgcacggcttgtttggacgtaagacagggcaagccccaggttactcttatacagctgccaacaagaacaaagggattatttggggagaggatacactcatggagtacctcgagaatcccaaaaaatatattcccggaacaaagatgatttttgtagggataaaaaaaaaagaggaaagagcagacctcattgcctacctaaaaaaggccactaacgagtag

SEQ ID NO: 200513 - DNA, 318 bp, Artificial Sequence
  derived and/or modified sequence
atgggcgacgtggagaagggcaagaagatcttcatcatgaagtgcagccagtgtcacacggtggagaagggtggcaagcacaagacaggacccaatctgcacggtttgtttggtagaaaaacaggtcaggcacccggctactcttatacagcagccaataagaataaagggatcatctggggcgaggatactctaatggaatacctagagaatcccaaaaaatatattccagggactaagatgatcttcgtaggtatcaaaaaaaaggaggaacgggccgacctcatcgcttaccttaaaaaggccactaacgagtag

SEQ ID NO: 200514 - DNA, 306 bp, Artificial Sequence
  derived and/or modified sequence
atgggcgacgtggagaagggcaagaagatcttcatcatgaagtgctctcagtgccacaccgtggagaagggaggcaaacacaaaacggggccaaatctgcacggactcttcggcagaaaaacaggccaggctcccggctactcatacactgctgccaacaaaaataaagggattatttggggcgaggatactctgatggagtaccttgaaaatcctaagaaatatatcccgggcactaagatgatattcgttgggataaaaaagaaagaagaaagggcggacctgattgcttacttaaaaaagtag

SEQ ID NO: 200515 - DNA, 318 bp, Artificial Sequence
  derived and/or modified sequence
atgggcgatgtggagaagggcaaaaaaatttttattatgaagtgttctcagtgccatactgtcgagaagggcggtaaacataaaactggaccaaacctgcacggactatttgggaggaagactggacaagctcccggatactcatatacggctgctaacaagaacaagggaattatttggggcgaggacacactgatggagtatctggagaacccgaagaaatatattccaggtactaaaatgatatttgtcggcatcaaaaaaaaagaggaacgcgctgacttaattgcctacctaaaaaaagccactaacgaatag

SEQ ID NO: 200516 - DNA, 318 bp, Artificial Sequence
  derived and/or modified sequence
atgggcgatgtggagaagggaaaaaaaatttttataatgaaatgcagtcagtgtcatacagtggaaaagggaggcaagcacaaaacgggaccaaacctccacggcttgtttggtaggaaaacgggtcaggcacccggatattcctatacagctgctaataagaacaaggggattatctggggagaagatactctgatggaatacctcgaaaaccctaaaaaatatatacctgggacaaaaatgattttcgtggggattaagaagaaggaggagagagctgacctcatcgcttatttaaagaaggctactaacgagtag

SEQ ID NO: 200517 - DNA, 318 bp, Artificial Sequence
  derived and/or modified sequence
atgggtgacgtggagaaaggcaaaaagattttcattatgaaatgcagccagtgtcacacagttgagaaaggaggcaagcacaagacaggacccaatttgcacggcttatttgggcgtaagaccggtcaagccccaggatacagctatactgccgcaaataaaaataagggcataatctggggagaagataccttgatggagtacctggagaaccctaaaaagtatatccccggaacaaaaatgatctttgtagggataaagaagaaagaggagagggcagatttgatcgcctacctgaagaaggccaccaatgagtag

SEQ ID NO: 200518 - DNA, 306 bp, Artificial Sequence
  derived and/or modified sequence
atgggagacgttgagaagggaaagaaaatctttattatgaaatgttcccagtgccatacagtggagaaggggggaaagcataaaacaggcccaaatctccatggccttttcggcagaaagaccgggcaggcgccaggatacagttacacggccgcaaataagaacaagggtataatttggggtgaggacactttgatggaatatcttgagaatcccaagaaatatattcctggcaccaaaatgatcttcgtaggcatcaaaaagaaagaggagcgggctgatctgatcgcatatttgaagaaatag

SEQ ID NO: 200519 - protein, 389 aa, Artificial Sequence
  derived and/or modified sequence
MALTPESPSSFPGLAATGSSVPEPPGGPNATLNSSWASPTEPSSLEDLVATGTIGTLLSAMGVVGVVGNAYTLVVTCRSLRAVASMYVYVVNLALADLLYLLSIPFIVATYVTKEWHFGDVGCRVLFGLDFLTMHASIFTLTVMSSERYAAVLRPLDTVQRPKGYRKLLALGTWLLALLLTLPVMLAMRLVRRGPKSLCLPAWGPRAHRAYLTLLFATSIAGPGLLIGLLYARLARAYRRSQRASFKRARRPGARALRLVLGIVLLFWACFLPFWLWQLLAQYHQAPLAPRTARIVNYLTTCLTYGNSCANPFLYTLLTRNYRDHLRGRVRGPGSGGGRGPVPSLQPRARFQRCSGRSLSSCSPQPTDSLVLAPAAPARPAPEGPRAPA

SEQ ID NO: 200520 - DNA, 1170 bp, Artificial Sequence
  derived and/or modified sequence
atggccctgacccccgagagccccagcagcttccccggcctggccgccaccggcagcagcgtgcccgagccccccggcggccccaacgccaccctgaacagcagctgggccagccccaccgagcccagcagcctggaggacctggtggccaccggcaccatcggcaccctgctgagcgccatgggcgtggtgggcgtggtgggcaacgcctacaccctggtggtgacctgcagaagcctgagagccgtggccagcatgtacgtgtacgtggtgaacctggccctggccgacctgctgtacctgctgagcatccccttcatcgtggccacctacgtgaccaaggagtggcacttcggcgacgtgggctgcagagtgctgttcggcctggacttcctgaccatgcacgccagcatcttcaccctgaccgtgatgagcagcgagagatacgccgccgtgctgagacccctggacaccgtgcagagacccaagggctacagaaagctgctggccctgggcacctggctgctggccctgctgctgaccctgcccgtgatgctggccatgagactggtgagaagaggccccaagagcctgtgcctgcccgcctggggccccagagcccacagagcctacctgaccctgctgttcgccaccagcatcgccggccccggcctgctgatcggcctgctgtacgccagactggccagagcctacagaagaagccagagagccagcttcaagagagccagaagacccggcgccagagccctgagactggtgctgggcatcgtgctgctgttctgggcctgcttcctgcccttctggctgtggcagctgctggcccagtaccaccaggcccccctggcccccagaaccgccagaatcgtgaactacctgaccacctgcctgacctacggcaacagctgcgccaaccccttcctgtacaccctgctgaccagaaactacagagaccacctgagaggcagagtgagaggccccggcagcggcggcggcagaggccccgtgcccagcctgcagcccagagccagattccagagatgcagcggcagaagcctgagcagctgcagcccccagcccaccgacagcctggtgctggcccccgccgcccccgccagacccgcccccgagggccccagagcccccgcctag

SEQ ID NO: 200521 - DNA, 1170 bp, Artificial Sequence
  derived and/or modified sequence
atggccctgacaccggaatcccccagctcctttccaggactagctgcaactggctcttcagttccggagccacctggcgggccaaatgccacactgaattctagctgggcctctccaaccgaacccagtagcctcgaggatctcgtggctactgggacgatagggacactgctaagcgccatgggagtcgttggtgtcgtcggaaacgcgtacacgctggtagtcacatgtcgtagcttgagagccgtggcatcaatgtatgtctacgtagtgaacctggccttggcagacctgctgtacctgctcagtatccccttcatcgtcgccacctatgtgacaaaggaatggcactttggggatgtgggctgtcgtgtcttattcggccttgactttcttacgatgcatgccagcatcttcaccctgaccgtgatgtccagcgagaggtatgccgctgtgctgcggccattggatactgttcagaggcctaagggttacaggaagctgctcgctctgggcacatggttgcttgcccttctcctgactctccccgtgatgctggcgatgaggctggtgaggaggggtccaaagtctctgtgcttgcctgcctgggggccaagggcccaccgcgcttacctgactcttctgtttgccactagcatcgccggacctggcctcttgattggcctgctctatgctagactggcccgcgcctataggcgttctcagagggcctcctttaaacgggctagaagacctggagcaagagctttgcgcctggtgttgggtattgtgctgttgttctgggcctgcttcctgcccttctggctttggcaattactcgcccagtaccaccaggcccccctcgccccccggactgcccgcattgtcaattacctcacaacctgcttgacatatggaaactcatgcgccaaccccttcctgtataccttgctcacccggaactaccgcgatcatctacggggcagagtccgcggccccggatctggaggcggccgcggccctgtgccatccctccagcctagagccagatttcaacggtgttctggaaggtctttgagttcttgcagcccgcagccaactgatagcttggtcctggcccccgcggctccagcaaggcccgctccggagggacctcgggcccccgcttag

SEQ ID NO: 200522 - DNA, 1170 bp, Artificial Sequence
  derived and/or modified sequence
atggccctgaccccagagagccccagcagcttccctggcctggccgccaccggcagctctgtgcctgagcccccaggcggccccaatgccaccctgaacagctcctgggccagccccacagagcccagcagcctggaggacctggtggccaccggcaccatcggcaccctgctgagcgccatgggcgtggtgggcgtggtgggcaatgcctacaccctggtggtgacctgccgcagcctgcgggctgtggcctccatgtatgtgtatgtggtgaacctggccctggccgacctgctgtacctgctgagcatccccttcatcgtggccacctacgtgaccaaggagtggcactttggagatgtgggctgccgggtgctgtttggcctggacttcctgaccatgcacgccagcatcttcaccctgactgtgatgagcagcgagagatatgctgctgtgctgcggcccctggacacagtgcagaggcccaagggctacaggaagctgctggccctgggcacctggctgctggccctgctgctgaccctgcctgtgatgctggccatgaggctggtgcggcggggccccaagagcctgtgcctgcctgcctggggcccccgggcccaccgggcctacctgaccctgctgtttgccaccagcattgctggccctggcctgctgattggcctgctgtatgcccggctggcccgggcctacagaagaagccagagggccagcttcaagagggcccggcggcctggggcccgggccctgcggctggtgctgggcatcgtgctgctcttctgggcctgcttcctgcccttctggctgtggcagctgctggcccagtaccaccaggcccccctggcccccaggacagccagaattgtgaactacctgaccacctgcctgacctacggcaacagctgtgccaaccccttcctgtacaccctgctgaccaggaactacagagaccacctgcggggccgggtgcggggccctggcagcggcggcggccggggccctgtgcccagcctgcagccccgggcccgcttccagcgctgcagcggccgcagcctgagcagctgcagcccccagcccacagacagcctggtgctggccccagctgccccagcccggcctgcccctgagggcccccgggccccagcctag

SEQ ID NO: 200523 - DNA, 1170 bp, Artificial Sequence
  derived and/or modified sequence
atggccctgacccccgagagccccagcagcttccccggcctggccgccaccggatcctccgtgcccgagccacctggcggaccgaatgcgactttaaactcaagctgggcgagcccgactgagccctcaagtctcgaagacttggtcgcgacagggactattggaacactcttgtctgccatgggggtagtcggcgtagtgggtaatgcttatactcttgtggtgacctgtagaagcttgagagccgtcgctagtatgtacgtgtacgttgtgaaccttgctctggccgacctcctctacctgctctccattccctttatcgtcgctacgtatgttacaaaagagtggcacttcggagacgtcggctgcagagtcctttttggactggattttttgacgatgcacgcctccattttcaccctgacagtcatgagcagtgagaggtacgctgcggtgctgcgccctctcgatacggtgcagaggcctaagggctacagaaagctgctggctttaggaacttggctccttgccctattgctgaccctcccagttatgttagctatgcggctggtgcgtcgagggccaaaatcattgtgcctgcctgcttggggcccaagggcccatcgagcctatctcactttgctgttcgctacctccattgctggccccggcttgctgattgggctcctatatgctcggctggctcgggcttaccggcgaagccagcgcgccagttttaaaagggcgagacggccaggtgctcgggcactgcggctggtcctggggatagtcttgcttttctgggcatgcttcctgcctttctggctgtggcaacttctcgcccagtaccaccaggcccctcttgctcctcgaacagcccggattgtcaattacctgaccacgtgcctcacctacggtaactcctgcgcaaatccattcttatatacactcttgactcggaactaccgggatcatctgcggggacgcgttagaggccccggaagcgggggcggacggggccccgtgccaagcttacaaccccgtgcacgcttccaaagatgttccggcagaagcctgtcaagctgctcgccccagcccaccgattcactggttttggctcccgcggcccctgccaggcccgcgcccgaagggccaagagccccggcttag

SEQ ID NO: 200524 - DNA, 1170 bp, Artificial Sequence
  derived and/or modified sequence
atggccctgaccccagagagcccttccagttttcccggattggcagcgactggcagctcagtccccgaaccgccaggcggacctaatgcaacactgaatagcagttgggccagccctactgagccatcatccctcgaggacctagtggccacaggtacgattggaacgctactttctgctatgggggtggtgggcgtggtcggtaatgcatacacattggttgtgacatgccgttccctaagggccgtcgcatcgatgtacgtatatgttgtcaatctcgccctggctgacctgttgtacctgttgtccatcccttttatcgtcgctacctatgttaccaaggagtggcatttcggagacgttggctgccgcgtcctgtttgggttggacttcctcacaatgcacgcgagcattttcactctgacagtgatgagtagcgaacggtatgcagcagtcctgcgacctctcgacacagtgcagaggccaaagggctatagaaagctcttggccctcggcacctggctcctggctctgctgctgacgctgccagtgatgctggcaatgaggcttgtgcggcgagggcctaaatcactgtgtttgcccgcttggggcccacgggctcacagggcttatttaaccttgctgtttgcaacctccattgcaggcccaggccttctgatcggcctgctgtacgctaggctggctagggcctatcgacggtcccagcgcgcttcattcaagcgggctagacgcccaggggcaagggctcttagactcgtgctgggcatcgtacttcttttttgggcctgctttctgccattctggctatggcagttactggcacagtatcaccaggcgccacttgctcctcgcaccgccagaatagttaattacctgacaacctgcctgacctacggcaattcctgtgccaacccattcctttacacactcctgacccgcaactatagggaccatctgaggggccgtgtcagaggacccggatcgggtggcggacggggacctgtgccaagcttgcagccaagggcacgctttcaacggtgtagcgggagatcgctgtcttcatgctctcctcaacccacggatagcctcgtgctggctcccgctgcaccagccaggcctgctcccgagggccctcgagctcccgcatag

SEQ ID NO: 200525 - DNA, 1310 bp, Artificial Sequence
  derived and/or modified sequence
tctcagggagtgtccacccagccctgagcccgtcgtgaggggtcagagatggcgctgacccccgagtccccgagcagcttccctgggctggccgccactggcagctctgtgccggagccgcctggcggccccaacgcaaccctcaacagctcctgggccagcccgaccgagcccagctccctggaggacctggtggccacgggcaccattgggactctgctgtcggccatgggcgtggtgggcgtggtgggcaacgcctacacgctggtggtcacctgccgctccctgcgtgcggtggcctccatgtacgtctacgtggtcaacctggcgctggccgacctgctgtacctgctcagcatccccttcatcgtggccacctacgtcaccaaggagtggcacttcggggacgtgggctgccgcgtgctcttcggcctggacttcctgaccatgcacgccagcatcttcacgctgaccgtcatgagcagcgagcgctacgctgcggtgctgcggccgctggacaccgtgcagcgccccaagggctaccgcaagctgctggcgctgggcacctggctgctggcgctgctgctgacgctgcccgtgatgctggccatgcggctggtgcgccggggtcccaagagcctgtgcctgcccgcctggggcccgcgcgcccaccgcgcctacctgacgctgctcttcgccaccagcatcgcggggcccgggctgctcatcgggctgctctacgcgcgcctggcccgcgcctaccgccgctcgcagcgcgcctccttcaagcgggcccggcggccgggggcgcgcgcgctgcgcctggtgctgggcatcgtgctgctcttctgggcctgcttcctgcccttctggctgtggcagctgctcgcccagtaccaccaggccccgctggcgccgcggacggcgcgcatcgtcaactacctgaccacctgcctcacctacggcaacagctgcgccaaccccttcctctacacgctgctcaccaggaactaccgcgaccacctgcgcggccgcgtgcggggcccgggcagcgggggaggccgggggcccgttccctccctgcagccccgcgcccgcttccagcgctgttcgggccgctccctgtcttcctgcagcccacagcccactgacagcctcgtgctggccccagcggccccggcccgacctgcgcccgagggtcccagggccccggcgtgagcacgcggaggggcggctggagtccaggcggggacgcgccccaaagccccagccactcccgggagcccccccaactcccaaatcacaggccc

SEQ ID NO: 200526 - protein, 346 aa, Artificial Sequence
  derived and/or modified sequence
MAPRSLLLLLSGALALTDTWAGSHSLRYFSTAVSRPGRGEPRYIAVEYVDDTQFLRFDSDAAIPRMEPREPWVEQEGPQYWEWTTGYAKANAQTDRVALRNLLRRYNQSEAGSHTLQGMNGCDMGPDGRLLRGYHQHAYDGKDYISLNEDLRSWTAADTVAQITQRFYEAEEYAEEFRTYLEGECLELLRRYLENGKETLQRADPPKAHVAHHPISDHEATLRCWALGFYPAEITLTWQRDGEEQTQDTELVETRPAGDGTFQKWAAVVVPPGEEQRYTCHVQHEGLPQPLILRWEQSPQPTIPIVGIVAGLVVLGAVVTGAVVAAVMWRKKSSDRNRGSYSQAAV

SEQ ID NO: 200527 - protein, 346 aa, Artificial Sequence
  derived and/or modified sequence
MAPRSLLLLLSGALALTDTWAGSHSLRYFSTAVSRPGRGEPRYIAVEYVDDTQFLRFDSDAAIPRMEPREPWVEQEGPQYWEWTTGYAKANAQTDRVALRNLLRRYNQSEAGSHTLQGMNGCDMGPDGRLLRGYHQHAYDGKDYISLNEDLRSWTAADTVAQITQRFYEAEEYAEEFRTYLEGECLELLRRYLENGKETLQRADPPKAHVAHHPISDHEATLRCWALGFYPAEITLTWQRDGEEQTQDTELVETRPAGDGTFQKWAAVVVPSGEEQRYTCHVQHEGLPQPLILRWEQSPQPTIPIVGIVAGLVVLGAVVTGAVVAAVMWRKKSSDRNRGSYSQAAV

SEQ ID NO: 200528 - protein, 225 aa, Artificial Sequence
  derived and/or modified sequence
  misc_feature (1)..(1): Xaa can be any naturally occurring amino acid
XPDPPPGRVPGAFTEHAYDGKDYISLNEDLRSWTAADTVAQITQRFYEAEEYAEEFRTYLEGECLELLRRYLENGKETLQRADPPKAHVAHHPISDHEATLRCWALGFYPAEITLTWQRDGEEQTQDTELVETRPAGDGTFQKWAAVVVPSGEEQRYTCHVQHEGLPQPLILRWEQSPQPTIPIVGIVAGLVVLGAVVTGAVVAAVMWRKKSSDRNRGSYSQAAV

SEQ ID NO: 200529 - protein, 225 aa, Artificial Sequence
  derived and/or modified sequence
  misc_feature (1)..(1): Xaa can be any naturally occurring amino acid
XPDPPPGRVPGAFTQHAYDGKDYISLNEDLRSWTAADTVAQITQRFYEAEEYAEEFRTYLEGECLELLRRYLENGKETLQRADPPKAHVAHHPISDHEATLRCWALGFYPAEITLTWQRDGEEQTQDTELVETRPAGDGTFQKWAAVVVPPGEEQRYTCHVQHEGLPQPLILRWEQSPQPTIPIVGIVAGLVVLGAVVTGAVVAAVMWRKKSSDRNRGSYSQAAV

SEQ ID NO: 200530 - protein, 225 aa, Artificial Sequence
  derived and/or modified sequence
  misc_feature (1)..(1): Xaa can be any naturally occurring amino acid
XPDPPPGRVPGAFTQHAYDGKDYISLNEDLRSWTAADTVAQITQRFYEAEEYAEEFRTYLEGECLELLRRYLENGKETLQRADPPKAHVAHHPISDHEATLRCWALGFYPAEITLTWQRDGEEQTQDTELVETRPAGDGTFQKWAAVVVPSGEEQRYTCHVQHEGLPQPLILRWEQSPQPTIPIVGIVAGLVVLGAVVTGAVVAAVMWRKKSSDRNRGSYSQAAV

SEQ ID NO: 200531 - DNA, 1041 bp, Artificial Sequence
  derived and/or modified sequence
atggcccccagaagcctgctgctgctgctgagcggcgccctggccctgaccgacacctgggccggcagccacagcctgagatacttcagcaccgccgtgagcagacccggcagaggcgagcccagatacatcgccgtggagtacgtggacgacacccagttcctgagattcgacagcgacgccgccatccccagaatggagcccagagagccctgggtggagcaggagggcccccagtactgggagtggaccaccggctacgccaaggccaacgcccagaccgacagagtggccctgagaaacctgctgagaagatacaaccagagcgaggccggcagccacaccctgcagggcatgaacggctgcgacatgggccccgacggcagactgctgagaggctaccaccagcacgcctacgacggcaaggactacatcagcctgaacgaggacctgagaagctggaccgccgccgacaccgtggcccagatcacccagagattctacgaggccgaggagtacgccgaggagttcagaacctacctggagggcgagtgcctggagctgctgagaagatacctggagaacggcaaggagaccctgcagagagccgacccccccaaggcccacgtggcccaccaccccatcagcgaccacgaggccaccctgagatgctgggccctgggcttctaccccgccgagatcaccctgacctggcagagagacggcgaggagcagacccaggacaccgagctggtggagaccagacccgccggcgacggcaccttccagaagtgggccgccgtggtggtgccccccggcgaggagcagagatacacctgccacgtgcagcacgagggcctgccccagcccctgatcctgagatgggagcagagcccccagcccaccatccccatcgtgggcatcgtggccggcctggtggtgctgggcgccgtggtgaccggcgccgtggtggccgccgtgatgtggagaaagaagagcagcgacagaaacagaggcagctacagccaggccgccgtgtag

SEQ ID NO: 200532 - DNA, 1041 bp, Artificial Sequence
  derived and/or modified sequence
atggcccccagaagcctgctgctgctgctgagcggcgccctggccctgaccgacacctgggccggcagccacagcctgagatacttcagcaccgccgtgagcagacccggcagaggcgagcccagatacatcgccgtggagtacgtggacgacacccagttcctgagattcgacagcgacgccgccatccccagaatggagcccagagagccctgggtggagcaggagggcccccagtactgggagtggaccaccggctacgccaaggccaacgcccagaccgacagagtggccctgagaaacctgctgagaagatacaaccagagcgaggccggcagccacaccctgcagggcatgaacggctgcgacatgggccccgacggcagactgctgagaggctaccaccagcacgcctacgacggcaaggactacatcagcctgaacgaggacctgagaagctggaccgccgccgacaccgtggcccagatcacccagagattctacgaggccgaggagtacgccgaggagttcagaacctacctggagggcgagtgcctggagctgctgagaagatacctggagaacggcaaggagaccctgcagagagccgacccccccaaggcccacgtggcccaccaccccatcagcgaccacgaggccaccctgagatgctgggccctgggcttctaccccgccgagatcaccctgacctggcagagagacggcgaggagcagacccaggacaccgagctggtggagaccagacccgccggcgacggcaccttccagaagtgggccgccgtggtggtgcccagcggcgaggagcagagatacacctgccacgtgcagcacgagggcctgccccagcccctgatcctgagatgggagcagagcccccagcccaccatccccatcgtgggcatcgtggccggcctggtggtgctgggcgccgtggtgaccggcgccgtggtggccgccgtgatgtggagaaagaagagcagcgacagaaacagaggcagctacagccaggccgccgtgtag

SEQ ID NO: 200533 - DNA, 678 bp, Artificial Sequence
  derived and/or modified sequence
tgacccgaccccccccccggcagagtgcccggcgccttcaccgagcacgcctacgacggcaaggactacatcagcctgaacgaggacctgagaagctggaccgccgccgacaccgtggcccagatcacccagagattctacgaggccgaggagtacgccgaggagttcagaacctacctggagggcgagtgcctggagctgctgagaagatacctggagaacggcaaggagaccctgcagagagccgacccccccaaggcccacgtggcccaccaccccatcagcgaccacgaggccaccctgagatgctgggccctgggcttctaccccgccgagatcaccctgacctggcagagagacggcgaggagcagacccaggacaccgagctggtggagaccagacccgccggcgacggcaccttccagaagtgggccgccgtggtggtgcccagcggcgaggagcagagatacacctgccacgtgcagcacgagggcctgccccagcccctgatcctgagatgggagcagagcccccagcccaccatccccatcgtgggcatcgtggccggcctggtggtgctgggcgccgtggtgaccggcgccgtggtggccgccgtgatgtggagaaagaagagcagcgacagaaacagaggcagctacagccaggccgccgtgtag

SEQ ID NO: 200534 - DNA, 678 bp, Artificial Sequence
  derived and/or modified sequence
tgacccgaccccccccccggcagagtgcccggcgccttcacccagcacgcctacgacggcaaggactacatcagcctgaacgaggacctgagaagctggaccgccgccgacaccgtggcccagatcacccagagattctacgaggccgaggagtacgccgaggagttcagaacctacctggagggcgagtgcctggagctgctgagaagatacctggagaacggcaaggagaccctgcagagagccgacccccccaaggcccacgtggcccaccaccccatcagcgaccacgaggccaccctgagatgctgggccctgggcttctaccccgccgagatcaccctgacctggcagagagacggcgaggagcagacccaggacaccgagctggtggagaccagacccgccggcgacggcaccttccagaagtgggccgccgtggtggtgccccccggcgaggagcagagatacacctgccacgtgcagcacgagggcctgccccagcccctgatcctgagatgggagcagagcccccagcccaccatccccatcgtgggcatcgtggccggcctggtggtgctgggcgccgtggtgaccggcgccgtggtggccgccgtgatgtggagaaagaagagcagcgacagaaacagaggcagctacagccaggccgccgtgtag

SEQ ID NO: 200535 - DNA, 678 bp, Artificial Sequence
  derived and/or modified sequence
tgacccgaccccccccccggcagagtgcccggcgccttcacccagcacgcctacgacggcaaggactacatcagcctgaacgaggacctgagaagctggaccgccgccgacaccgtggcccagatcacccagagattctacgaggccgaggagtacgccgaggagttcagaacctacctggagggcgagtgcctggagctgctgagaagatacctggagaacggcaaggagaccctgcagagagccgacccccccaaggcccacgtggcccaccaccccatcagcgaccacgaggccaccctgagatgctgggccctgggcttctaccccgccgagatcaccctgacctggcagagagacggcgaggagcagacccaggacaccgagctggtggagaccagacccgccggcgacggcaccttccagaagtgggccgccgtggtggtgcccagcggcgaggagcagagatacacctgccacgtgcagcacgagggcctgccccagcccctgatcctgagatgggagcagagcccccagcccaccatccccatcgtgggcatcgtggccggcctggtggtgctgggcgccgtggtgaccggcgccgtggtggccgccgtgatgtggagaaagaagagcagcgacagaaacagaggcagctacagccaggccgccgtgtag

SEQ ID NO: 200536 - DNA, 1041 bp, Artificial Sequence
  derived and/or modified sequence
atggccccgcggtcactgctcctactgctcagcggtgcactggcgcttactgacacgtgggccggaagtcacagtttgcggtacttctccaccgcagtcagtcgccctggccgaggtgagccaagatacatcgcagtggagtacgtcgatgatactcaatttctgaggtttgacagcgatgccgccataccccgaatggaaccacgagaaccgtgggtagaacaggagggaccccaatattgggaatggacaaccggctatgccaaggcgaacgcacagactgatcgcgtagctctacgaaacttactccggcggtacaatcagtcggaggcaggtagccatacgctgcagggcatgaacggatgcgacatggggccagacgggagattactgcgcggctatcaccaacatgcttacgacggtaaggattatatatctcttaatgaagacctgcgatcctggacagctgcagatactgtagcacagattacccagaggttctatgaggcagaggagtatgcagaagagttccggacgtatcttgaaggtgagtgccttgagctgttacgcaggtacctcgaaaacggcaaagaaaccctccaacgagcagacccgcctaaggcccacgtggcacatcaccctatctccgatcatgaggccacgctgaggtgttgggccctcggcttttatcctgcagaaataaccctaacctggcagcgtgatggcgaggaacagactcaagatactgagttagtcgaaactcgtcctgccggggacggaaccttccagaagtgggcagctgttgtggtgcctcccggcgaagagcagagatatacatgtcacgtgcagcacgaaggactgccccaaccgctgatcctccgttgggaacagtccccacagcctaccatccccatagtaggaatcgttgccggacttgtcgtactaggtgctgtggtgacaggagcagtggtggctgctgttatgtggcgcaagaagtctagcgatagaaacaggggttcctacagccaggccgcagtttag

SEQ ID NO: 200537 - DNA, 1041 bp, Artificial Sequence
  derived and/or modified sequence
atggcaccaagaagtttactgcttctactgtctggtgctctggccctgacagatacctgggccggttcacacagcctccgatatttcagtactgctgtgagtcgacccgggcgaggcgaaccacggtatatcgcagtcgaatacgtcgacgacacgcaatttctgcgcttcgattcagatgcagccatcccacgcatggaaccccgagagccatgggtggagcaggaaggcccacagtactgggagtggacaactgggtacgctaaagccaacgcacaaacagacagggtggcactaagaaacctgctgcggcgatataaccaaagtgaggctggatcccacactctccaggggatgaatggctgcgatatgggacctgacggcaggctcctaaggggataccaccagcacgcttatgacggcaaagactacatctctctcaacgaagatctgaggtcttggactgccgccgatacagttgctcagattacccaaagattttatgaagcggaggagtacgccgaagagttccggacctacctggagggcgaatgcttagaattgttgagaagatacttggagaatgggaaagagaccctacagagggccgaccctcccaaagcacacgtggcccaccatcccatttccgaccatgaggctaccttgcgatgctgggcccttggcttttaccccgccgagatcactttgacctggcagcgcgacggggaggagcagactcaggacacagagctggtggagactcgcccagccggcgacggtacttttcagaagtgggccgccgtggtcgttccttccggagaagagcagagatacacctgccatgtgcagcatgagggacttcctcagcctctgatcctccggtgggaacaaagccctcagccaaccatacccatcgtcgggatcgtcgccggactggtcgtcctgggtgccgtcgtgactggggcggtggtggcagccgttatgtggcggaagaagagttctgaccgtaatcgaggctcctactctcaggccgcggtgtag

SEQ ID NO: 200538 - DNA, 1041 bp, Artificial Sequence
  derived and/or modified sequence
atggcacctagaagcctgttgttgctgttgtctggagctctcgctctgaccgacacctgggctggatctcattctcttcggtatttctctaccgctgtctcccggcctggacgcggggagccccgttatatcgccgtagaatatgtggatgatacgcaatttctgcgcttcgactccgacgcagccattcccaggatggagcccagggaaccctgggtggagcaggagggcccgcaatattgggagtggacgacaggttacgccaaggctaatgcgcagacggatcgggtcgctctgagaaacctgctgagaagatacaaccagagcgaagcaggctctcatactttacaaggcatgaatgggtgcgatatggggcccgacggcaggctcctgagaggctaccaccaacatgcttatgacggtaaggactacatctctctgaacgaggaccttcggtcttggacagcagcagataccgtggcccaaatcacccaacgcttctacgaggccgaagagtatgccgaagaatttaggacctatctcgagggcgagtgtctcgaactactgcgccggtatcttgagaacggcaaggaaacgctgcagcgcgcagaccccccaaaggcccatgtcgctcatcatcccattagtgaccatgaggcaactctacgttgctgggcactgggcttctaccccgccgagatcaccctgacctggcaacgagatggcgaggaacagacccaagataccgaactggtagagacaaggcctgctggtgacgggactttccagaaatgggccgctgtagttgtccctccaggagaggaacagcggtacacttgtcatgtccagcacgaaggcctcccccaaccactgattctaaggtgggagcagagcccacagcccacaatcccaatcgtggggatcgtcgccggtttagtggttctgggcgctgtggtcacaggggcggttgtcgctgctgtgatgtggaggaagaaatcctcggatagaaatagaggtagctatagccaggcagctgtctag

SEQ ID NO: 200539 - DNA, 1041 bp, Artificial Sequence
  derived and/or modified sequence
atggcgccccgcagccttctcttactgctgagtggagctctagcgctaactgatacatgggccggatctcacagcctgagatatttttcgaccgctgtgagcaggcccggccggggcgagccccgctacatagctgtcgagtatgtggatgacacacagtttctcaggttcgacagtgatgccgctataccaaggatggaaccacgagagccctgggtggaacaggaaggccctcaatactgggagtggaccactggttacgccaaagcgaatgcccagactgatcgtgtggctttgcggaacctgctcaggagatacaaccaatccgaagccgggtcacacacactgcagggcatgaatggctgtgatatgggacccgacggcaggctcctgcgcgggtatcatcagcacgcttacgatgggaaagactacattagtctcaacgaggatcttcgatcatggactgcagccgatactgttgcccagatcactcagcggttctatgaagccgaggagtatgccgaagaattcaggacatatcttgaaggagaatgtctcgagctgctgcgtagatacctggaaaacgggaaggagaccctgcagcgtgccgatccccctaaagcccatgtagcgcaccaccctatatctgatcatgaagctactcttagatgttgggctttgggcttctacccagctgaaatcaccctcacttggcagcgagatggtgaggagcaaacccaggatactgaactggttgagacacgaccagcaggagacgggaccttccagaaatgggccgcggttgtggttcccagcggtgaggaacagaggtacacttgtcacgtccagcatgagggccttcctcagccgttaattctcagatgggagcagtcccctcagccgacaattcccatcgtcggcattgtagccggacttgtggtcctgggggctgtcgtaaccggcgcggttgtggcagccgtgatgtggaggaaaaaatccagcgaccgaaatcggggctcctattctcaggccgccgtatag

SEQ ID NO: 200540 - DNA, 678 bp, Artificial Sequence
  derived and/or modified sequence
tgacctgatccacctccaggccgagttcctggcgccttcacagagcacgcttacgatggcaaggactacatctcactgaacgaggacctacggtcctggactgcggcagacaccgtcgcccagatcacccagcggttttatgaggccgaggagtacgccgaggagttccgaacctacctagagggagaatgcctcgaattactcagaaggtacttggagaatggtaaagaaaccctgcagagggccgacccgccgaaagctcatgtggcccaccatcccataagcgatcacgaggccacccttcgatgctgggcacttggcttctaccctgccgaaataaccttgacctggcaacgagatggagaggagcagactcaggatacagaactcgtagagactcgccctgcaggggatggcactttccagaaatgggccgcagtggtggtgcccagtggtgaggagcagagatatacttgtcacgtgcaacatgagggactccctcagccgctgatcctgcgctgggagcagtcccctcagccgactattcccatcgttggcatcgtcgcgggtctcgtcgtacttggtgccgtggtgactggggcggtggttgcggccgtgatgtggaggaagaagtcttccgatcgcaatcgcgggtcatactcccaggccgcggtctag

SEQ ID NO: 200541 - DNA, 1041 bp, Artificial Sequence
  derived and/or modified sequence
atggcgcctagaagtctgttattgctgctttctggggctctggcactgaccgatacttgggcgggaagccattcactcaggtacttcagtactgctgttagccgtccaggtcggggcgaacccagatacatagccgtggagtacgtcgacgacacccagttcttacgttttgatagcgacgctgcaatccctcggatggaaccaagagagccttgggtcgagcaggagggacctcagtattgggaatggacaaccgggtacgctaaggccaatgcccagaccgatagggtcgcccttagaaatctgctccgccgttacaatcagtcagaagccggcagccacacactccagggcatgaatggatgcgatatgggcccagacggcagactgctgcgggggtaccatcagcatgcttatgatggtaaagattatatttcactgaatgaagatctgcggtcttggaccgccgctgacacggtagcccagattacccagagattttacgaagccgaggagtatgctgaggagtttcgtacctatctggaaggcgagtgtctagagttgcttcgcagatatttggagaacggcaaggaaactttgcaaagagccgacccgccaaaggcgcacgtggctcatcatccaatcagcgatcacgaggcgacgctgaggtgttgggccttgggattttaccctgcagagatcacccttacctggcaacgtgatggggaagagcagacacaagatacagaactggtggagactcgtcctgcaggcgatgggaccttccagaagtgggccgccgtcgtcgtgcccagcggagaagagcagaggtacacgtgtcatgttcagcacgagggactaccacaacctctgatccttcggtgggaacaatcacctcaaccgactatacctattgtgggaatcgttgccggcctggtggttttaggcgcagtggtgaccggcgctgtcgtggcggcagttatgtggcggaaaaaaagctcagacaggaacagaggcagttattcccaggcagccgtgtag

SEQ ID NO: 200542 - DNA, 678 bp, Artificial Sequence
  derived and/or modified sequence
tgaccagaccctccacccgggcgggttccaggcgcctttactgaacacgcatacgatggaaaagactacataagtttgaacgaggacctccggtcgtggactgctgcggacacagttgcccagattacgcaaaggttctacgaagccgaggaatatgccgaggaattcagaacctacctcgaaggagaatgtctggagttgctgcgtcgttatctggaaaacgggaaagagacactgcagcgcgcggatcctcctaaggcccacgtagcccatcacccaattagcgaccacgaggctaccctcagatgctgggccctcggcttttatccagccgaaattacgctgacctggcagcgggatggcgaagaacagacccaggacacagaactggtggagacccgaccggcgggcgacggaaccttccaaaaatgggctgccgtggtggtccctagtggagaagagcagagatatacctgtcacgtacagcacgaaggtcttccccagccattaatactgcgatgggaacagagcccgcagcccaccatcccaatcgtggggattgtggcaggcctggttgtgcttggcgccgtagtaactggcgccgtagtcgcagccgtgatgtggagaaagaagtccagtgacagaaacaggggctcctactcccaggctgcggtgtag

SEQ ID NO: 200543 - DNA, 678 bp, Artificial Sequence
  derived and/or modified sequence
tgacctgatccacctccaggtcgcgtgcccggtgcgttcactcaacatgcctacgacggcaaggactatattagcctgaatgaggacctacgttcttggactgcggccgacaccgtcgctcaaattacccaacgcttctacgaagcagaggaatacgccgaggagttccgtacgtacttggagggggaatgcctggaattgctgcgaagatacttagagaacggtaaggagaccctgcagagagcagacccaccgaaggcccatgtagctcatcatccgatttccgatcacgaagctacactaagatgttgggctctgggcttctatccggccgaaataacactgacttggcaacgcgacggcgaggagcagacacaggacacagagctcgtcgaaactcggcccgcaggagatgggacctttcagaaatgggcagccgtggttgttcctccgggtgaagaacaacggtatacctgccacgtacagcacgaaggtctgccacagccactaatccttagatgggagcagagcccccagcctaccatacccatcgttgggattgtggccggactcgtagtcctgggcgcagtggtgaccggtgcggtggtggccgcagtgatgtggagaaagaagtcctccgatcggaatcgcggatcatatagccaggctgctgtgtag

SEQ ID NO: 200544 - DNA, 678 bp, Artificial Sequence
  derived and/or modified sequence
tgacccgatccacctccgggcagggtgcctggggctttcactgaacacgcttacgatggaaaagactatattagcctgaacgaggatttgcgctcctggacagctgctgatacggtcgctcagattacccagcgattctacgaggctgaagaatacgccgaggaattcaggacttacctcgagggtgagtgtctcgagctgctcaggcgctacctggagaacgggaaagaaacactgcagcgggccgatcctccaaaggcccatgtggcccaccatcctatctctgatcacgaggcaacattaaggtgttgggctctgggattttacccagcagagataactctgacgtggcaacgcgatggtgaggagcagacgcaggatacagagttggttgaaactaggcccgccggagatgggactttccaaaaatgggctgccgttgtagtacctagcggtgaggagcaaagatacacatgccacgtgcagcacgagggcctgccccagcccctaatcctccgatgggaacagtctccgcagcctaccattcccatcgtcggcatcgttgccggattagtcgtgttgggcgcggtggtcacaggagccgttgttgccgctgtcatgtggcgtaagaagagctcagaccgcaatcgcgggtcatactcacaagctgccgtgtag

SEQ ID NO: 200545 - DNA, 1041 bp, Artificial Sequence
  derived and/or modified sequence
atggcaccacgctctctcttgttattgctcagcggcgccctggctcttactgacacctgggccggttcccatagcctcagatactttagcaccgcggttagccgtccaggccggggtgaaccacggtatatagcagttgaatacgttgatgatactcagttcctccggttcgactcagatgcagcgatcccccgcatggagccgcgggaaccttgggtagagcaggaggggccgcaatattgggagtggactaccggttacgccaaagcaaatgcacagaccgaccgtgtcgctctgaggaacctgctcagacggtacaaccagagtgaggcaggttctcacaccctccaggggatgaatggatgtgacatggggcccgacggccgcctcttgcggggataccaccagcacgcatacgatggcaaagactatattagcctcaacgaggacttgcggagctggactgccgcagacactgtagcacagatcacccagcgattttatgaagccgaagaatatgctgaggaatttagaacctacttggagggagagtgcctggaattgctgcggaggtacctcgaaaacgggaaggagacgctccagcgggctgatcctcccaaagcgcatgtggcgcaccaccccatctccgaccacgaagctacactgcggtgctgggcactcggcttttatccggcagaaattaccttgacatggcagagagacggggaggaacaaactcaggatactgagcttgtcgagactcggcccgctggcgatgggacatttcagaagtgggctgccgtagttgtgcccagcggcgaggagcaaaggtacacatgtcatgtgcagcatgagggactcccccagcctctcatactccgctgggagcagagtccacaacctaccatcccaattgttggaattgtcgcaggactggtcgtgttaggcgcagtcgttaccggagctgtggtggcagctgtgatgtggcgaaagaaaagcagtgaccggaatagagggtcctactcccaggctgctgtctag

SEQ ID NO: 200546 - DNA, 1041 bp, Artificial Sequence
  derived and/or modified sequence
atggcgcccagaagtctgctgttgttgctgagcggcgctctcgccctaactgacacctgggcaggatctcattctctccggtatttcagcacagccgtgagtcggcctggccgaggtgaaccacgatacattgccgtcgagtacgtggacgatactcagttcttgcgctttgactctgacgcagcaatccctaggatggagcccagggagccctgggttgaacaggaaggaccacaatattgggaatggacgaccggatatgctaaagctaatgcgcagactgatcgcgtggccctgcgtaatctcttgagacggtataatcaatccgaggcgggaagccacacattgcagggcatgaatggctgcgatatgggccccgatggccggcttctccgagggtaccaccagcacgcatacgacggaaaagattacatttcactcaatgaggatctgcggtcatggacagccgccgacacagtggctcagatcactcaacgtttctatgaagccgaagagtacgctgaggagtttaggacgtacctggagggcgaatgcctggagctgctccgaaggtatctggagaatggaaaagagaccttgcagcgcgcagacccgcctaaggcccacgttgctcatcaccctatctcagatcatgaggctacgctgcgatgctgggctctgggcttttatcccgccgagatcactctgacttggcagcgcgatggggaggaacagacccaagacaccgaactcgtggagactcggcccgcaggtgatggaacctttcagaagtgggcagccgtagtcgtgccttcaggggaggaacagcggtacacctgtcacgttcagcacgagggactgccacagcctctcatcttgcgctgggaacagtcacctcagcccacaattcctattgtgggcattgtggcagggttggttgttttgggggccgtcgtgacaggagccgtagtagccgccgtaatgtggcgaaagaagtctagtgaccggaatcgcggttcttactcccaggctgctgtctag

SEQ ID NO: 200547 - DNA, 678 bp, Artificial Sequence
  derived and/or modified sequence
taaccagacccccccccgggacgagtacccggagcctttactcagcacgcatacgacggaaaggactatatcagcttgaatgaagacctgcggtcgtggactgccgccgacaccgtagcgcaaatcactcagcgtttctatgaggccgaggagtacgcagaagaatttagaacttaccttgagggagaatgtctggagctccttaggcgctatctggagaacggcaaagaaacactgcagcgggctgaccctcctaaagcgcacgtggcccaccaccctataagtgaccatgaggccaccttgagatgctgggctctcggcttttaccctgccgagatcaccctgacgtggcagcgggacggtgaagagcagacacaggatacggagcttgtggagactaggcccgcgggcgacggtacatttcagaaatgggctgcggtcgtagtcccaagtggcgaggagcagcggtacacctgccatgtgcagcacgagggtcttcctcagcccctgatcctaagatgggagcagtccccccaaccaactatcccaatcgtgggcatagtggctggactggtcgtgctgggcgcagtcgtcaccggcgccgtggtggccgcggtcatgtggaggaagaagtcttctgaccggaacagaggcagttattctcaggcggcagtttag

SEQ ID NO: 200548 - DNA, 678 bp, Artificial Sequence
  derived and/or modified sequence
tgaccagaccccccacccggacgggtccccggggcatttactcagcacgcttacgatgggaaggactatattagcctgaacgaggatttgcgctcatggacagctgctgatactgtagcccagattacacagaggttctacgaggccgaagagtacgcggaggagttccggacatatttggagggagaatgtcttgaattactccggagatatctcgagaacggcaaagaaaccctccagcgggcggacccacctaaagcacatgttgctcaccaccctattagcgatcatgaagctactctgcggtgctgggctcttggcttctaccccgcagagataaccctgacatggcagagagatggcgaagagcaaacacaggacaccgagcttgttgagaccagaccggcaggagacgggacttttcagaaatgggcagccgtggtagtgccttctggagaggagcagagatacacgtgtcacgtccagcacgaaggcttaccacagcctctgatcttaagatgggagcagtctccacagcctacaatcccgatagtcgggattgtcgctgggttagtggtgctcggcgcggttgttactggagccgtagtggctgcggtgatgtggcgcaagaagtcttccgatcggaatcgaggcagctatagtcaggctgctgtttag

SEQ ID NO: 200549 - DNA, 1041 bp, Artificial Sequence
  derived and/or modified sequence
atggccccacggagcctgctgctgttgctgagcggcgcacttgccctaactgatacttgggccgggagccacagcctgagatatttttccactgctgtttcaaggcccggacgtggggaaccacgctacatagccgtcgagtacgtagacgacacccaatttctccgctttgacagtgatgcagcgatcccccggatggaaccccgggagccctgggtggagcaggagggtccccaatactgggaatggaccaccggttacgcaaaggcaaacgctcagacagacagggtggccttacgaaaccttctgaggcgctataaccagtctgaggctggcagccacacactacaaggcatgaatggctgcgacatgggtcccgatggcagactgctccgcggctaccatcagcacgcatatgacggtaaggattacatttcgcttaatgaagacctgaggtcctggacggctgcggacacagtggctcagataacccagagattctatgaagctgaggagtacgctgaggagttccggacctacctggaaggtgaatgtctggagctactgcggagatacctggagaacggcaaagaaactttgcagagagcagatccacccaaggctcatgtcgctcatcatcccattagcgatcatgaggcaacccttcggtgctgggccctggggttctaccccgcagaaatcactttaacttggcagcgagacggggaggaacagacccaggacactgagctcgttgagacgaggccagccggagatggcacttttcagaagtgggcagcagtcgttgtcccctcaggggaggagcagcgttatacttgccatgtgcagcatgaaggcttacctcagcccctgatccttcgatgggaacagtctccacaacccacaattccaattgttggcattgtcgctggtctggtagtgctgggggccgttgtgacaggagctgtggtggccgcagtgatgtggaggaagaaatcatccgaccggaaccgaggttcatactctcaggctgccgtctag

SEQ ID NO: 200550 - DNA, 1041 bp, Artificial Sequence
  derived and/or modified sequence
atggccccacggagcctgctcctgttgctgtcaggcgccttggcactgacagatacctgggcgggcagccatagtctgcggtatttctctacggcagtgagtcgcccagggaggggcgaaccaagatacatcgccgttgaatacgtggatgacactcagtttctccgatttgatagcgatgctgcaatcccacggatggagccccgcgaaccttgggtggagcaggagggacctcagtactgggagtggaccacaggctatgcaaaggccaacgcccagaccgatcgtgtcgccctcaggaatctacttaggcgatacaaccagtcagaggccgggagccatacactgcaaggaatgaacggctgcgatatggggcccgacggaaggttattacgggggtaccatcagcacgcgtacgacggtaaggattacatttctctgaatgaggatctgaggagctggactgctgccgacactgtggcccaaatcacacaaagattttacgaggcagaggagtacgctgaggaatttcgaacctatctggaaggggaatgcctcgaactactgcgacgatacttggaaaatgggaaggagaccctacagcgggccgatccaccaaaggctcatgtggcacaccacccgatatctgaccacgaagccactctgcgttgctgggcgcttggattctacccggctgaaatcactttgacttggcagcgcgatggcgaggaacagacacaggacaccgaattagtggagacccggcccgcaggcgatgggacctttcagaagtgggctgccgtcgtcgtgccctccggagaagaacagaggtacacctgccacgtccaacacgaaggtctcccacagccactgatcctgagatgggagcagagtccccaacctaccataccaatagtgggaattgttgccgggctggtcgttctcggcgcagtcgtcactggagccgtggtagccgcagttatgtggcggaagaagtcgtccgaccgaaaccgaggctcctactcccaagccgcagtgtag

SEQ ID NO: 200551 - DNA, 1041 bp, Artificial Sequence
  derived and/or modified sequence
atggccccaaggtcactcctgttattgctctccggagcgctggcactaacagatacatgggccgggagtcactcactaaggtactttagtacggccgttagtcgtcccgggcgtggggaaccccggtatattgccgttgagtatgtcgacgatactcaattcctgaggtttgattccgacgcagccattcccagaatggaaccccgggagccctgggtcgaacaggagggtccccaatattgggagtggaccactgggtacgccaaagcgaacgcccagacagaccgcgttgctttgcggaacctgctacgcaggtataatcaaagcgaagccggaagccacacactacaaggcatgaacggttgcgatatgggccccgacggccgactcctgcgtggctaccaccagcacgcttacgatggcaaagactacatatctctcaacgaggatttgcgaagttggacggctgcagatactgtggcacaaatcactcagagattctatgaggctgaagagtacgccgaggaattccggacctacctcgaaggtgagtgtctcgaattattgagacgctatttggaaaatgggaaagagaccctccagagagcggaccccccgaaggctcatgtcgctcaccatccaatttctgaccatgaggccaccctgcgatgctgggctctgggtttctatccagccgaaattactctgacctggcagcgcgacggagaagagcagacacaggataccgagttggtggaaaccaggcctgccggggacggaacgtttcaaaaatgggccgccgtagtcgtgcctagtggtgaggagcagcgatatacctgtcacgtacagcatgagggcttaccccagccactcatcctgcgttgggaacagtccccacagccaaccattccgattgtgggcatagtagcagggctcgtcgtgctgggggcagtagtcaccggggccgtggtggcagccgtcatgtggcggaaaaaatcatctgatagaaacaggggctcctactcgcaggcggcagtctag

SEQ ID NO: 200552 - DNA, 1041 bp, Artificial Sequence
  derived and/or modified sequence
atggccccacgttctctgctgcttctgctcagtggagccctggctcttacagatacttgggctgggtcccattctctcagatactttagtaccgcagtgtctcgcccaggcagaggcgaaccgaggtacatcgcagtagagtatgtggatgacactcagtttttaagattcgacagcgacgcagcaatcccacgcatggagccgagagagccatgggtggaacaggagggaccccagtactgggagtggactactgggtatgccaaggcaaacgcacagactgatagagtagctctgaggaatctcctccgaagatataatcaatcagaggccgggagccacacactccaagggatgaacgggtgtgatatgggaccagacggcagactgctcagagggtatcaccaacacgcctacgatggcaaagactatatatctttgaatgaggaccttcgatcctggacagccgcggacacggtagcacagatcacgcagcgcttttatgaagccgaagagtatgcagaggagttccgcacgtacctcgagggggagtgtctagagctactccgcaggtatcttgagaatgggaaggagaccctacagagggccgacccccctaaggctcacgtggctcaccaccccatctccgaccacgaggctacccttaggtgctgggcacttggattttacccagccgagattacacttacttggcagcgagacggtgaagagcagacgcaggacaccgagctcgtcgaaacccggccagccggtgacggaactttccaaaaatgggcagctgtggtagtgccaagtggggaagagcagagatatacctgccacgtgcaacacgagggcctcccccaaccactaatactcagatgggaacagagcccccagcctaccatccctatcgttggtattgtggcaggcctggtggtccttggcgctgtggttaccggagctgtggtagctgcggtgatgtggcggaagaagtcttctgatcgtaacaggggcagctattcccaggctgccgtgtag

SEQ ID NO: 200553 - DNA, 1281 bp, Artificial Sequence
  derived and/or modified sequence
tttctcactcccattgggcgtcgcgtttctagagaagccaatcagtgtcgccgcagttcccaggttctaaagtcccacgcaccccgcgggactcatatttttcccagacgcggaggttggggtcatggcgccccgaagcctcctcctgctgctctcaggggccctggccctgaccgatacttgggcgggctcccactccttgaggtatttcagcaccgctgtgtcgcggcccggccgcggggagccccgctacatcgccgtggagtacgtagacgacacgcaattcctgcggttcgacagcgacgccgcgattccgaggatggagccgcgggagccgtgggtggagcaagaggggccgcagtattgggagtggaccacagggtacgccaaggccaacgcacagactgaccgagtggccctgaggaacctgctccgccgctacaaccagagcgaggctgggtctcacaccctccagggaatgaatggctgcgacatggggcccgacggacgcctcctccgcgggtatcaccagcacgcgtacgacggcaaggattacatctccctgaacgaggacctgcgctcctggaccgcggcggacaccgtggctcagatcacccagcgcttctatgaggcagaggaatatgcagaggagttcaggacctacctggagggcgagtgcctggagttgctccgcagatacttggagaatgggaaggagacgctacagcgcgcagatcctccaaaggcacacgttgcccaccaccccatctctgaccatgaggccaccctgaggtgctgggccctgggcttctaccctgcggagatcacgctgacctggcagcgggatggggaggaacagacccaggacacagagcttgtggagaccaggcctgcaggggatggaaccttccagaagtgggccgctgtggtggtgcctcctggagaggaacagagatacacatgccatgtgcagcacgaggggctgccccagcccctcatcctgagatgggagcagtctccccagcccaccatccccatcgtgggcatcgttgctggccttgttgtccttggagctgtggtcactggagctgtggtcgctgctgtgatgtggaggaagaagagctcagatagaaacagagggagctactctcaggctgcagtgtgagacagcttccttgtgtgggactgagaagcaagatatcaatgtagcagaattgcacttgtgcctcacgaacatacataaattttaaaaataaagaataaaaatatatctttttatag

SEQ ID NO: 200554 - DNA, 1544 bp, Artificial Sequence
  derived and/or modified sequence
gaaggagaggaagaggaagaggaagaagaagaagaagaagaagaagaagaagaagaagaagaagaagaagaagaagaagaagaagaagaagaagaagaagaagaagaagaagaagaaaaggaagaagaagaaactgtctctacaccttcattctcaggacaagttcattgtctggcaccaagctccttggggtgaattttcttccaaaagagtccggggagtccaggtccttcttcctggatactcataacgcggccccatttctcactcccattgggcgtcgcgtttctagagaagccaatcagtgtcgccgcagttcccaggttctaaagtcccacgcaccccgcgggactcatatttttcccagacgcggaggttggggtcatggcgccccgaagcctcctcctgctgctctcaggggccctggccctgaccgatacttgggcgggctcccactccttgaggtatttcagcaccgctgtgtcgcggcccggccgcggggagccccgctacatcgccgtggagtacgtagacgacacgcaattcctgcggttcgacagcgacgccgcgattccgaggatggagccgcgggagccgtgggtggagcaagaggggccgcagtattgggagtggaccacagggtacgccaaggccaacgcacagactgaccgagtggccctgaggaacctgctccgccgctacaaccagagcgaggctgggtctcacaccctccagggaatgaatggctgcgacatggggcccgacggacgcctcctccgcgggtatcaccagcacgcgtacgacggcaaggattacatctccctgaacgaggacctgcgctcctggaccgcggcggacaccgtggctcagatcacccagcgcttctatgaggcagaggaatatgcagaggagttcaggacctacctggagggcgagtgcctggagttgctccgcagatacttggagaatgggaaggagacgctacagcgcgcagatcctccaaaggcacacgttgcccaccaccccatctctgaccatgaggccaccctgaggtgctgggccctgggcttctaccctgcggagatcacgctgacctggcagcgggatggggaggaacagacccaggacacagagcttgtggagaccaggcctgcaggggatggaaccttccagaagtgggccgctgtggtggtgccttctggagaggaacagagatacacatgccatgtgcagcacgaggggctgccccagcccctcatcctgagatgggagcagtctccccagcccaccatccccatcgtgggcatcgttgctggccttgttgtccttggagctgtggtcactggagctgtggtcgctgctgtgatgtggaggaagaagagctcagatagaaacagagggagctactctcaggctgcagtgtgagacagcttccttgtgtgggactgagaagcaagatatcaatgtagcagaattgcacttgtgcctcacgaacatacataaattttaaaaataaagaataaaaatatatctttttatagata

SEQ ID NO: 200555 - DNA, 1544 bp, Artificial Sequence
  derived and/or modified sequence
gaagaggaagaggaagaagaagaagaagaagaagaagaagaagaagaagaagaagaagaagaagaagaagaagaagaagaagaagaagaagaagaagaagaagaagaagaagaagaaaaggaagaagaagaaactgtctctacaccttcattctcaggacaagttcattgtctggcaccaagctccttggggtgaattttcttccaaaagagtccggggagtccaggtccttcttcctggatactcataacgcggccccatttctcactcccattgggcgtcgcgtttctagagaagccaatcagtgtcgccgcagttcccaggttctaaagtcccacgcaccccgcgggactcatatttttcccagacgcggaggttggggtcatggcgccccgaagcctcctcctgctgctctcaggggccctggccctgaccgatacttgggcgggctcccactccttgaggtatttcagcaccgctgtgtcgcggcccggccgcggggagccccgctacatcgccgtggagtacgtagacgacacgcaattcctgcggttcgacagcgacgccgcgattccgaggatggagccgcgggagccgtgggtggagcaagaggggccgcagtattgggagtggaccacagggtacgccaaggccaacgcacagactgaccgagtggccctgaggaacctgctccgccgctacaaccagagcgaggctgggtctcacaccctccagggaatgaatggctgcgacatggggcccgacggacgcctcctccgcgggtatcaccagcacgcgtacgacggcaaggattacatctccctgaacgaggacctgcgctcctggaccgcggcggacaccgtggctcagatcacccagcgcttctatgaggcagaggaatatgcagaggagttcaggacctacctggagggcgagtgcctggagttgctccgcagatacttggagaatgggaaggagacgctacagcgcgcagatcctccaaaggcacacgttgcccaccaccccatctctgaccatgaggccaccctgaggtgctgggccctgggcttctaccctgcggagatcacgctgacctggcagcgggatggggaggaacagacccaggacacagagcttgtggagaccaggcctgcaggggatggaaccttccagaagtgggccgctgtggtggtgcctcctggagaggaacagagatacacatgccatgtgcagcacgaggggctgccccagcccctcatcctgagatgggagcagtctccccagcccaccatccccatcgtgggcatcgttgctggccttgttgtccttggagctgtggtcactggagctgtggtcgctgctgtgatgtggaggaagaagagctcagatagaaacagagggagctactctcaggctgcagtgtgagacagcttccttgtgtgggactgagaagcaagatatcaatgtagcagaattgcacttgtgcctcacgaacatacataaattttaaaaataaagaataaaaatatatctttttatagata

SEQ ID NO: 200556 - DNA, 1544 bp, Artificial Sequence
  derived and/or modified sequence
gaagaggaagaggaagaggaagaggaagaagaagaagaagaagaagaagaagaagaagaagaagaagaagaagaagaagaagaagaagaagaagaagaagaagaagaagaagaagaagaggaagaagaagaaactgtctctagaccttcattctcaggacaagttcattgtctggcaccaagctccttggggtgaattttcttccaaaagagtccggggagtccaggtccttcatcctggatactcataacgcggccccatttctcactcccattgggcgtcgcgtttctagagaagccaatcagtgtcgccgcagttcccaggttctaaagtcccacgcaccccgcgggactcatatttttcccagacgcggaggttggggtcatggcgccccgaagcctcctcctgctgctctcaggggccctggccctgaccgatacttgggcgggctcccactccttgaggtatttcagcaccgctgtgtcgcggcccggccgcggggagccccgctacatcgccgtggagtacgtagacgacacgcaattcctgcggttcgacagcgacgccgcgattccgaggatggagccgcgggagccgtgggtggagcaagaggggccgcagtattgggagtggaccacagggtacgccaaggccaacgcacagactgaccgagtggccctgaggaacctgctccgccgctacaaccagagcgaggctgggtctcacaccctccagggaatgaatggctgcgacatggggcccgacggacgcctcctccgcgggtatcaccagcacgcgtacgacggcaaggattacatctccctgaacgaggacctgcgctcctggaccgcggcggacaccgtggctcagatcacccagcgcttctatgaggcagaggaatatgcagaggagttcaggacctacctggagggcgagtgcctggagttgctccgcagatacttggagaatgggaaggagacgctacagcgcgcagatcctccaaaggcacacgttgcccaccaccccatctctgaccatgaggccaccctgaggtgctgggccctgggcttctaccctgcggagatcacgctgacctggcagcgggatggggaggaacagacccaggacacagagcttgtggagaccaggcctgcaggggatggaaccttccagaagtgggccgctgtggtggtgccttctggagaggaacagagatacacatgccatgtgcagcacgaggggctgccccagcccctcatcctgagatgggagcagtctccccagcccaccatccccatcgtgggcatcgttgctggccttgttgtccttggagctgtggtcactggagctgtggtcgctgctgtgatgtggaggaagaagagctcagatagaaacagagggagctactctcaggctgcagtgtgagacagcttccttgtgtgggactgagaagcaagatatcaatgtagcagaattgcacttgtgcctcacgaacatacataaattttaaaaataaagaataaaaatatatctttttatagata

SEQ ID NO: 200557 - DNA, 796 bp, Artificial Sequence
  derived and/or modified sequence
gcccagaccctccacccgggagagtcccaggcgcctttaccgagcacgcgtacgacggcaaggattacatctccctgaacgaggacctgcgctcctggaccgcggcggacaccgtggctcagatcacccagcgcttctatgaggcagaggaatatgcagaggagttcaggacctacctggagggcgagtgcctggagttgctccgcagatacttggagaatgggaaggagacgctacagcgcgcagatcctccaaaggcacacgttgcccaccaccccatctctgaccatgaggccaccctgaggtgctgggccctgggcttctaccctgcggagatcacgctgacctggcagcgggatggggaggaacagacccaggacacagagcttgtggagaccaggcctgcaggggatggaaccttccagaagtgggccgctgtggtggtgccttctggagaggaacagagatacacatgccatgtgcagcacgaggggctgccccagcccctcatcctgagatgggagcagtctccccagcccaccatccccatcgtgggcatcgttgctggccttgttgtccttggagctgtggtcactggagctgtggtcgctgctgtgatgtggaggaagaagagctcagatagaaacagagggagctactctcaggctgcagtgtgagacagcttccttgtgtgggactgagaagcaagatatcaatgtagcagaattgcacttgtgcctcacgaacatacataaattttaaaaataaagaataaaaatatatctttttatagata

SEQ ID NO: 200558 - DNA, 1544 bp, Artificial Sequence
  derived and/or modified sequence
gaagaagaagaagaagaggaagaggaagaggaagaagaagaagaagaagaagaagaagaagaagaagaagaagaagaagaagaagaagaagaagaagaagaagaagaagaagaagaagaggaagaagaagaaactgtctctagaccttcattctcaggacaagttcattgtctggcaccaagctccttggggtgaattttcttccaaaagagtccggggagtccaggtccttcatcctggatactcataacgcggccccatttctcactcccattgggcgtcgcgtttctagagaagccaatcagtgtcgccgcagttcccaggttctaaagtcccacgcaccccgcgggactcatatttttcccagacgcggaggttggggtcatggcgccccgaagcctcctcctgctgctctcaggggccctggccctgaccgatacttgggcgggctcccactccttgaggtatttcagcaccgctgtgtcgcggcccggccgcggggagccccgctacatcgccgtggagtacgtagacgacacgcaattcctgcggttcgacagcgacgccgcgattccgaggatggagccgcgggagccgtgggtggagcaagaggggccgcagtattgggagtggaccacagggtacgccaaggccaacgcacagactgaccgagtggccctgaggaacctgctccgccgctacaaccagagcgaggctgggtctcacaccctccagggaatgaatggctgcgacatggggcccgacggacgcctcctccgcgggtatcaccagcacgcgtacgacggcaaggattacatctccctgaacgaggacctgcgctcctggaccgcggcggacaccgtggctcagatcacccagcgcttctatgaggcagaggaatatgcagaggagttcaggacctacctggagggcgagtgcctggagttgctccgcagatacttggagaatgggaaggagacgctacagcgcgcagatcctccaaaggcacacgttgcccaccaccccatctctgaccatgaggccaccctgaggtgctgggccctgggcttctaccctgcggagatcacgctgacctggcagcgggatggggaggaacagacccaggacacagagcttgtggagaccaggcctgcaggggatggaaccttccagaagtgggccgctgtggtggtgccttctggagaggaacagagatacacatgccatgtgcagcacgaggggctgccccagcccctcatcctgagatgggagcagtctccccagcccaccatccccatcgtgggcatcgttgctggccttgttgtccttggagctgtggtcactggagctgtggtcgctgctgtgatgtggaggaagaagagctcagatagaaacagagggagctactctcaggctgcagtgtgagacagcttccttgtgtgggactgagaagcaagatatcaatgtagcagaattgcacttgtgcctcacgaacatacataaattttaaaaataaagaataaaaatatatctttttatagata

SEQ ID NO: 200559 - DNA, 796 bp, Artificial Sequence
  derived and/or modified sequence
gcccagaccctccacccgggagagtcccaggcgcctttacccagcacgcgtacgacggcaaggattacatctccctgaacgaggacctgcgctcctggaccgcggcggacaccgtggctcagatcacccagcgcttctatgaggcagaggaatatgcagaggagttcaggacctacctggagggcgagtgcctggagttgctccgcagatacttggagaatgggaaggagacgctacagcgcgcagatcctccaaaggcacacgttgcccaccaccccatctctgaccatgaggccaccctgaggtgctgggccctgggcttctaccctgcggagatcacgctgacctggcagcgggatggggaggaacagacccaggacacagagcttgtggagaccaggcctgcaggggatggaaccttccagaagtgggccgctgtggtggtgcctcctggagaggaacagagatacacatgccatgtgcagcacgaggggctgccccagcccctcatcctgagatgggagcagtctccccagcccaccatccccatcgtgggcatcgttgctggccttgttgtccttggagctgtggtcactggagctgtggtcgctgctgtgatgtggaggaagaagagctcagatagaaacagagggagctactctcaggctgcagtgtgagacagcttccttgtgtgggactgagaagcaagatatcaatgtagcagaattgcacttgtgcctcacgaacatacataaattttaaaaataaagaataaaaatatatctttttatagata

SEQ ID NO: 200560 - DNA, 1504 bp, Artificial Sequence
  derived and/or modified sequence
agaagaagaggaggggggcggggaggagcaggaggaggaggaaagaaggaggagaaggagaaggagaaggagaagaagaagaagaagaagaaactgtctctacaccttcattctcaggacaagttcattgtctggcaccaagctccttggggtgaattttcttccaaaagagtccggggagtccaggtccttcttcctggttactcataacgcggccccatttctcactcccattgggcgtcgggtttctagagaagccaatcagtgtcgccgcagttcccaggttctaaagtcccacgcaccccgcgggactcatatttttcccagacgcggaggttggggtcatggcgccccgaagcctcctcctgctgctctcaggggccctggccctgaccgatacttgggcaggctcccactccttgaggtatttcagcaccgctgtgtcgcggcccggccgcggggagccccgctacatcgccgtggagtacgtagacgacacgcaattcctgcggttcgacagcgacgccgcgattccgaggatggagccgcgggagccgtgggtggagcaagaggggccgcagtattgggagtggaccacagggtacgccaaggccaacgcacagactgaccgagtggccctgaggaacctgctccgccgctacaaccagagcgaggctgggtctcacaccctccagggaatgaatggctgcgacatggggcccgacggacgcctcctccgcgggtatcaccagcacgcgtacgacggcaaggattacatctccctgaacgaggacctgcgctcctggaccgcggcggacaccgtggctcagatcacccagcgcttctatgaggcagaggaatatgcagaggagttcaggacctacctggagggcgagtgcctggagttgctccgcagatacttggagaatgggaaggagacgctacagcgcgcagatcctccaaaggcacacgttgcccaccaccccatctctgaccatgaggccaccctgaggtgctgggccctgggcttctaccctgcggagatcacgctgacctggcagcgggatggggaggaacagacccaggacacagagcttgtggagaccaggcctgcaggggatggaaccttccagaagtgggccgctgtggtggtgccttctggagaggaacagagatacacatgccatgtgcagcacgaggggctgccccagcccctcatcctgagatgggagcagtctccccagcccaccatccccatcgtgggcatcgttgctggccttgttgtccttggagctgtggtcactggagctgtggtcgctgctgtgatgtggaggaagaagagctcagatagaaacagagggagctactctcaggctgcagtgtgagacagcttccttgtgtgggactgagaagcaagatatcaatgtagcagaattgcacttgtgcctcacgaacatacataaattttaaaaataaagaataaaaatatatctttttatagata

SEQ ID NO: 200561 - DNA, 796 bp, Artificial Sequence
  derived and/or modified sequence
gcccagaccctccacccgggagagtcccaggcgcctttacccagcacgcgtacgacggcaaggattacatctccctgaacgaggacctgcgctcctggaccgcggcggacaccgtggctcagatcacccagcgcttctatgaggcagaggaatatgcagaggagttcaggacctacctggagggcgagtgcctggagttgctccgcagatacttggagaatgggaaggagacgctacagcgcgcagatcctccaaaggcacacgttgcccaccaccccatctctgaccatgaggccaccctgaggtgctgggccctgggcttctaccctgcggagatcacgctgacctggcagcgggatggggaggaacagacccaggacacagagcttgtggagaccaggcctgcaggggatggaaccttccagaagtgggccgctgtggtggtgccttctggagaggaacagagatacacatgccatgtgcagcacgaggggctgccccagcccctcatcctgagatgggagcagtctccccagcccaccatccccatcgtgggcatcgttgctggccttgttgtccttggagctgtggtcactggagctgtggtcgctgctgtgatgtggaggaagaagagctcagatagaaacagagggagctactctcaggctgcagtgtgagacagcttccttgtgtgggactgagaagcaagatatcaatgtagcagaattgcacttgtgcctcacgaacatacataaattttaaaaataaagaataaaaatatatctttttatagata

SEQ ID NO: 200562 - DNA, 1281 bp, Artificial Sequence
  derived and/or modified sequence
tttctcactcccattgggcgtcgggtttctagagaagccaatcagtgtcgccgcagttcccaggttctaaagtcccacgcaccccgcgggactcatatttttcccagacgcggaggttggggtcatggcgccccgaagcctcctcctgctgctctcaggggccctggccctgaccgatacttgggcaggctcccactccttgaggtatttcagcaccgctgtgtcgcggcccggccgcggggagccccgctacatcgccgtggagtacgtagacgacacgcaattcctgcggttcgacagcgacgccgcgattccgaggatggagccgcgggagccgtgggtggagcaagaggggccgcagtattgggagtggaccacagggtacgccaaggccaacgcacagactgaccgagtggccctgaggaacctgctccgccgctacaaccagagcgaggctgggtctcacaccctccagggaatgaatggctgcgacatggggcccgacggacgcctcctccgcgggtatcaccagcacgcgtacgacggcaaggattacatctccctgaacgaggacctgcgctcctggaccgcggcggacaccgtggctcagatcacccagcgcttctatgaggcagaggaatatgcagaggagttcaggacctacctggagggcgagtgcctggagttgctccgcagatacttggagaatgggaaggagacgctacagcgcgcagatcctccaaaggcacacgttgcccaccaccccatctctgaccatgaggccaccctgaggtgctgggccctgggcttctaccctgcggagatcacgctgacctggcagcgggatggggaggaacagacccaggacacagagcttgtggagaccaggcctgcaggggatggaaccttccagaagtgggccgctgtggtggtgccttctggagaggaacagagatacacatgccatgtgcagcacgaggggctgccccagcccctcatcctgagatgggagcagtctccccagcccaccatccccatcgtgggcatcgttgctggccttgttgtccttggagctgtggtcactggagctgtggtcgctgctgtgatgtggaggaagaagagctcagatagaaacagagggagctactctcaggctgcagtgtgagacagcttccttgtgtgggactgagaagcaagatatcaatgtagcagaattgcacttgtgcctcacgaacatacataaattttaaaaataaagaataaaaatatatctttttatag

SEQ ID NO: 200563 - DNA, 1281 bp, Artificial Sequence
  derived and/or modified sequence
tttctcactcccattgggcgtcgcgtttctagagaagccaatcagtgtcgccgcagttcccaggttctaaagtcccacgcaccccgcgggactcatatttttcccagacgcggaggttggggtcatggcgccccgaagcctcctcctgctgctctcaggggccctggccctgaccgatacttgggcgggctcccactccttgaggtatttcagcaccgctgtgtcgcggcccggccgcggggagccccgctacatcgccgtggagtacgtagacgacacgcaattcctgcggttcgacagcgacgccgcgattccgaggatggagccgcgggagccgtgggtggagcaagaggggccgcagtattgggagtggaccacagggtacgccaaggccaacgcacagactgaccgagtggccctgaggaacctgctccgccgctacaaccagagcgaggctgggtctcacaccctccagggaatgaatggctgcgacatggggcccgacggacgcctcctccgcgggtatcaccagcacgcgtacgacggcaaggattacatctccctgaacgaggacctgcgctcctggaccgcggcggacaccgtggctcagatcacccagcgcttctatgaggcagaggaatatgcagaggagttcaggacctacctggagggcgagtgcctggagttgctccgcagatacttggagaatgggaaggagacgctacagcgcgcagatcctccaaaggcacacgttgcccaccaccccatctctgaccatgaggccaccctgaggtgctgggccctgggcttctaccctgcggagatcacgctgacctggcagcgggatggggaggaacagacccaggacacagagcttgtggagaccaggcctgcaggggatggaaccttccagaagtgggccgctgtggtggtgccttctggagaggaacagagatacacatgccatgtgcagcacgaggggctgccccagcccctcatcctgagatgggagcagtctccccagcccaccatccccatcgtgggcatcgttgctggccttgttgtccttggagctgtggtcactggagctgtggtcgctgctgtgatgtggaggaagaagagctcagatagaaacagagggagctactctcaggctgcagtgtgagacagcttccttgtgtgggactgagaagcaagatatcaatgtagcagaattgcacttgtgcctcacgaacatacataaattttaaaaataaagaataaaaatatatctttttatag

SEQ ID NO: 200564 - DNA, 1041 bp, Artificial Sequence
  derived and/or modified sequence
atggcccccaggagcctgctgctgctgctgagcggggccctggccctgacagacacctgggccggcagccacagcctgcgctacttcagcacagctgtgtcccggcccggccgcggggagccccgctacatcgctgtggagtatgtggatgacacccagttcctgcgctttgacagtgatgctgccatccccaggatggagccccgggagccctgggtggagcaggagggcccccagtactgggagtggaccaccggctacgccaaggccaatgcccagacagacagagtggccctgaggaacctgctgcggcgctacaaccagagcgaggccggcagccacaccctgcagggcatgaatggctgtgacatgggcccagatggccgcctgctgcggggctaccaccagcacgcctatgatggcaaggactacatcagcctgaatgaagacctgcgctcctggacagctgctgacacagtggcccagatcacccagcgcttctatgaggccgaggagtatgcagaggagttccgcacctacctggagggggagtgcctggagctgctgcggcgctacctggagaatggcaaggagaccctgcagagagctgacccccccaaggcccacgtggcccaccaccccatcagtgaccacgaggccaccctgcgctgctgggccctgggcttctacccagctgagatcaccctgacctggcagagagatggagaggagcagacccaggacacagagctggtggagaccaggcctgctggagatggcaccttccagaagtgggccgctgtggtggtgcccccaggagaggagcagcgctacacctgccacgtgcagcacgagggcctgccccagcccctcatcctgcgctgggagcagagcccccagcccaccatccccatcgtgggcatcgtggccggcctggtggtgctgggcgctgtggtgactggagctgtggtggccgctgtgatgtggaggaagaagagcagtgacaggaacagaggcagctacagccaggccgctgtgtag

SEQ ID NO: 200565 - DNA, 1041 bp, Artificial Sequence
  derived and/or modified sequence
atggcccccaggagcctgctgctgctgctgagcggggccctggccctgacagacacctgggccggcagccacagcctgcgctacttcagcacagctgtgtcccggcccggccgcggggagccccgctacatcgctgtggagtatgtggatgacacccagttcctgcgctttgacagtgatgctgccatccccaggatggagccccgggagccctgggtggagcaggagggcccccagtactgggagtggaccaccggctacgccaaggccaatgcccagacagacagagtggccctgaggaacctgctgcggcgctacaaccagagcgaggccggcagccacaccctgcagggcatgaatggctgtgacatgggcccagatggccgcctgctgcggggctaccaccagcacgcctatgatggcaaggactacatcagcctgaatgaagacctgcgctcctggacagctgctgacacagtggcccagatcacccagcgcttctatgaggccgaggagtatgcagaggagttccgcacctacctggagggggagtgcctggagctgctgcggcgctacctggagaatggcaaggagaccctgcagagagctgacccccccaaggcccacgtggcccaccaccccatcagtgaccacgaggccaccctgcgctgctgggccctgggcttctacccagctgagatcaccctgacctggcagagagatggagaggagcagacccaggacacagagctggtggagaccaggcctgctggagatggcaccttccagaagtgggccgctgtggtggtgcccagcggggaggagcagcgctacacctgccacgtgcagcacgagggcctgccccagcccctcatcctgcgctgggagcagagcccccagcccaccatccccatcgtgggcatcgtggccggcctggtggtgctgggcgctgtggtgactggagctgtggtggccgctgtgatgtggaggaagaagagcagtgacaggaacagaggcagctacagccaggccgctgtgtag

SEQ ID NO: 200566 - DNA, 678 bp, Artificial Sequence
  derived and/or modified sequence
tgaccagaccccccacctggccgggtgcctggggccttcacagagcacgcctatgatggcaaggactacatcagcctgaatgaagacctgcgctcctggacagctgctgacacagtggcccagatcacccagcgcttctatgaagctgaggagtatgcagaggagttccgcacctacctggagggagaatgtctggagctgctgcggcgctacctggagaatggcaaggagaccctgcagagagctgacccccccaaggcccacgtggcccaccaccccatcagtgaccacgaggccaccctgcgctgctgggccctgggcttctacccagctgagatcaccctgacctggcagagagatggagaggagcagacccaggacacagagctggtggagaccaggcctgctggagatggcaccttccagaagtgggccgctgtggtggtgcccagcggggaggagcagcgctacacctgccacgtgcagcacgagggcctgccccagcccctcatcctgcgctgggagcagagcccccagcccaccatccccatcgtgggcatcgtggccggcctggtggtgctgggcgctgtggtgactggagctgtggtggccgctgtgatgtggaggaagaagagcagtgacaggaacagaggcagctacagccaggccgctgtgtag

SEQ ID NO: 200567 - DNA, 678 bp, Artificial Sequence
  derived and/or modified sequence
tgaccagaccccccacctggccgggtgcctggggccttcacccagcacgcctatgatggcaaggactacatcagcctgaatgaagacctgcgctcctggacagctgctgacacagtggcccagatcacccagcgcttctatgaagctgaggagtatgcagaggagttccgcacctacctggagggagaatgtctggagctgctgcggcgctacctggagaatggcaaggagaccctgcagagagctgacccccccaaggcccacgtggcccaccaccccatcagtgaccacgaggccaccctgcgctgctgggccctgggcttctacccagctgagatcaccctgacctggcagagagatggagaggagcagacccaggacacagagctggtggagaccaggcctgctggagatggcaccttccagaagtgggccgctgtggtggtgcccccaggagaggagcagcgctacacctgccacgtgcagcacgagggcctgccccagcccctcatcctgcgctgggagcagagcccccagcccaccatccccatcgtgggcatcgtggccggcctggtggtgctgggcgctgtggtgactggagctgtggtggccgctgtgatgtggaggaagaagagcagtgacaggaacagaggcagctacagccaggccgctgtgtag

SEQ ID NO: 200568 - DNA, 678 bp, Artificial Sequence
  derived and/or modified sequence
tgaccagaccccccacctggccgggtgcctggggccttcacccagcacgcctatgatggcaaggactacatcagcctgaatgaagacctgcgctcctggacagctgctgacacagtggcccagatcacccagcgcttctatgaagctgaggagtatgcagaggagttccgcacctacctggagggagaatgtctggagctgctgcggcgctacctggagaatggcaaggagaccctgcagagagctgacccccccaaggcccacgtggcccaccaccccatcagtgaccacgaggccaccctgcgctgctgggccctgggcttctacccagctgagatcaccctgacctggcagagagatggagaggagcagacccaggacacagagctggtggagaccaggcctgctggagatggcaccttccagaagtgggccgctgtggtggtgcccagcggggaggagcagcgctacacctgccacgtgcagcacgagggcctgccccagcccctcatcctgcgctgggagcagagcccccagcccaccatccccatcgtgggcatcgtggccggcctggtggtgctgggcgctgtggtgactggagctgtggtggccgctgtgatgtggaggaagaagagcagtgacaggaacagaggcagctacagccaggccgctgtgtag

SEQ ID NO: 200569 - DNA, 1041 bp, Artificial Sequence
  derived and/or modified sequence
atggccccccggagcctgctgctgctgctgagcggcgccctggccctaacagacacctgggctgggtcacactcactgcgttacttctccactgctgtgagtcggcctggcaggggtgaaccccggtatattgccgtggagtacgtggatgacactcagttcctgcgctttgattcagatgctgctatcccaagaatggaacctagggagccttgggtggagcaggagggaccgcagtactgggaatggacaacgggctacgccaaagccaatgctcagacagacagggtcgccctgaggaacctattgcggcgatataaccagtctgaagccggctctcacacgcttcaagggatgaacggctgcgatatgggtcctgatgggcggttgctaaggggataccaccagcatgcttatgacgggaaagactatatcagcctgaacgaggatttgaggtcttggacagctgctgataccgtggcccagatcacacagcgcttttatgaagcagaggagtacgctgaagagttccgcacctatctcgagggagaatgtttagaactgcttaggcggtacctcgagaacggaaaggagactctccagcgggccgatccgcccaaggcacacgtggctcatcaccctatctcagatcacgaagcaacactgagatgttgggccctcgggttttaccccgccgaaataaccctgacctggcagagggacggtgaagagcagactcaggatacagagcttgtcgaaaccagaccggccggggacggcaccttccagaagtgggccgctgtggtggtaccgccaggcgaggagcagcgatacacatgccatgtacagcatgagggtttgccccaacccctcatcctgcggtgggaacagtctccccagcctacaatacccattgtcgggattgtggccgggctcgtcgtactgggagcggttgtcacaggcgccgttgttgcggctgtgatgtggaggaagaagtctagtgaccgcaataggggctcatatagtcaggctgcagtgtag

SEQ ID NO: 200570 - DNA, 1041 bp, Artificial Sequence
  derived and/or modified sequence
atggccccccggagcctgctgctgctgctgagcggcgccctggcccttaccgacacctgggccggtagccattctctgaggtacttctccactgccgtttctcgaccagggcgcggggagcctaggtatatagctgtggagtatgttgacgatacccagttcctgcggtttgactcagatgctgctatcccaagaatggagccaagagaaccttgggttgagcaggagggtccgcagtattgggagtggaccactgggtacgccaaggccaatgctcaaacggaccgtgtcgccctgcgcaacctcctacggcggtacaatcaatctgaggctggtagccacaccttacagggcatgaacggttgcgacatgggcccagatgggcggctcctacggggttaccaccagcatgcatacgacggcaaggactatatcagtctcaatgaagatctgaggtcctggactgctgctgacactgtggctcagatcacacagaggttctacgaagccgaggagtacgccgaggagtttcggacatatctcgaaggtgagtgtttagaactcttgcgcagatacctcgaaaatggcaaagagacgttacaaagggctgacccccctaaggcccatgtggcccaccatcccatcagcgaccatgaggccactcttcgatgctgggcgttgggattctacccagcagaaatcaccctgacatggcagcgtgatggcgaggagcagactcaggatacggaactcgtggaaaccagacccgccggtgatgggacctttcagaagtgggctgccgtggtcgtcccgtcaggggaagagcagcgctacacatgtcacgtccaacacgaagggctaccgcagccgcttatattgcgctgggagcagtcgccacaaccgactattcccatagtcggaatagtcgctggcctggtggtcctgggcgccgtcgtcaccggggctgtggtggcagccgtgatgtggaggaagaagtcctccgacagaaaccgcggatcatactcccaggccgctgtttag

SEQ ID NO: 200571 - DNA, 1041 bp, Artificial Sequence
  derived and/or modified sequence
atggccccccggagcctgctgctgctgctgagcggcgccctggccctgactgatacctgggcgggaagccattccttacggtacttctcaactgcagtatctagaccaggccgcggcgaaccccggtacatcgccgtggaatacgtagatgacacccagtttttgaggttcgactcagacgcggctatcccaagaatggagcctcgcgagccgtgggtcgagcaggagggaccgcagtactgggagtggacaaccggatacgcaaaagccaacgctcagaccgatcgggtcgcgcttcggaatctgttgcgtcggtacaaccaatctgaggctggtagccacactttgcagggcatgaacggatgcgacatggggcccgatgggaggctgctgcgcggataccaccaacatgcatacgacgggaaggattacatttctctgaacgaagacctgcgctcgtggacggccgccgacactgtggctcagattacccaacggttttatgaagccgaagagtacgcagaggagttcaggacatatttggaaggcgagtgcctggaacttctgcgaaggtacttagagaatgggaaagaaacgttacagagagcagatccccctaaggcacacgttgcccatcaccctatctccgatcatgaggccacgctgcgctgttgggctcttggcttctaccctgcagagataaccctcacctggcagagagatggggaagagcaaacccaggacactgagttggtggagactagacccgcaggagacgggacgtttcagaaatgggcagctgtcgtggtaccacctggagaggagcagagatacacttgccatgtccagcacgagggactgccccaaccactcatattgcggtgggagcagtctccccaacctacaatccccattgttggcatcgttgccggactggtggtgctgggggccgtggtgactggggccgtcgtagccgccgtcatgtggcgcaagaaaagctctgacaggaaccggggttcttattcccaggccgctgtgtag

SEQ ID NO: 200572 - DNA, 1041 bp, Artificial Sequence
  derived and/or modified sequence
atggccccccggagcctgctgctgctgctgagcggcgccctggccctgaccgatacttgggcgggctctcatagcctgagatacttcagcacagcggtatcaaggcccgggagaggcgagcctaggtacatagccgtggaatatgtggacgacactcagtttctccgttttgactcagatgctgcgattccacgcatggagccaagggagccctgggtggagcaagagggccctcagtactgggagtggactaccggctacgccaaggcgaatgcccagactgaccgggtggccctgcggaatctattgagacgttacaaccagtccgaagccggtagccacacattgcagggtatgaatgggtgcgacatgggcccagacggacgattacttcgaggttaccaccagcatgcctacgacggcaaggattacatctcacttaacgaggaccttaggagttggacggcagccgatactgtggcccagattacccagaggttttacgaagcagaagaatatgccgaggaatttcggacctacctagagggtgagtgtctggagctcctgaggagatacctggagaacggcaaagagacactgcagagagccgatcctccaaaagcgcatgtcgcacatcacccaatctccgatcatgaagctactctacggtgttgggctcttggcttctatcctgcagaaattacattgacatggcagcgagacggcgaggaacaaacccaggacactgagctggtggaaactagacccgctggagacggcaccttccaaaagtgggccgcggtagtggtgccaagtggagaagaacagcgctatacatgccatgtccagcatgaaggcctgcctcagcctctgatccttaggtgggagcaaagcccacaacccaccatcccaatcgtaggaatcgtggcagggctagtagtcctgggagccgtcgtaactggcgccgttgtcgctgctgtcatgtggaggaaaaagtcaagtgaccggaatagaggtagctactcccaagcggcagtgtag

SEQ ID NO: 200573 - DNA, 678 bp, Artificial Sequence
  derived and/or modified sequence
tgacccgaccccccccccggccgggtgcccggcgccttcaccgagcatgcttacgacgggaaagattatattagtcttaacgaggatctccgaagctggaccgcagctgataccgttgcgcaaatcacacagcgtttttatgaggcagaggagtatgccgaagagttccgcacatatctagaaggcgaatgcttggagctgctccggagatacttggaaaatggtaaggagacactccagagggcagatcctcccaaggcgcacgtcgcacaccatcctattagcgatcatgaggctactcttcggtgttgggctctgggtttttatcccgcagagattaccctgacttggcagcgggatggggaagaacaaacccaggatactgagctggttgagacacgcccagcaggtgatgggacctttcagaagtgggccgctgtcgtggtgccatctggagaagagcaacgttacacctgtcacgtgcagcatgaggggttaccccagccgcttatcctccggtgggaacagtcccctcagcccacaatccccatcgtcggcatcgtggctggactggtggttttgggagccgtggtgacaggcgcagtcgtggcagctgtgatgtggcgtaaaaagagctccgacaggaataggggctcttatagccaggcggccgtctag

SEQ ID NO: 200574 - DNA, 1041 bp, Artificial Sequence
  derived and/or modified sequence
atggccccccggagcctgctgctgctgctgagcggcgccctggccctcaccgacacctgggcaggcagccattctctgcgttattttagcaccgcagtgagccgcccggggaggggcgaaccccgctatatagctgtagaatatgtcgatgacacacagttcctgaggttcgatagtgacgcagcgattcctcgcatggagccacgggagccctgggtcgaacaggagggtccccagtactgggaatggaccaccgggtatgcgaaggcaaatgcacagactgaccgggtcgccctgcgaaacttactccggcggtacaaccaaagtgaagccgggagccatactctccagggcatgaatggctgcgatatgggccctgatggtaggctgctcaggggctatcaccagcatgcgtacgatgggaaggactatatttcactcaacgaggaccttcgttcttggaccgcagccgacaccgttgcacagattacccagcgattctacgaagctgaagaatacgccgaggagttccgcacatacctcgaaggcgagtgcctggagctccttcgtcggtacttggagaacgggaaagaaacccttcagcgagctgatccccccaaagctcacgtggctcaccaccccatatccgatcacgaagctactctcagatgctgggcgcttggtttctacccggccgagattacactgacctggcagcgtgatggagaagagcagactcaggacaccgaattggttgaaacccgtcccgcaggagatggtactttccaaaaatgggccgctgtggtagtaccatccggggaagagcagaggtacacctgtcacgttcagcatgaggggctcccccagcctctcatcctgaggtgggaacaaagtccacagccaaccatccctatcgtcggaatcgtggcaggcctggtggtgctgggagctgttgttacaggtgccgtagtcgctgcggtgatgtggaggaagaagagttccgatcggaatcgcggaagctactcccaggcagcggtgtag

SEQ ID NO: 200575 - DNA, 678 bp, Artificial Sequence
  derived and/or modified sequence
tgacccgaccccccccccggccgggtgcccggcgccttcaccgagcacgcctatgacggcaaggactatatatccttgaatgaagatcttcggtcctggaccgcagcagataccgtggcccaaatcacccaacgcttctacgaggccgaagagtatgctgaggaatttcgcacctatcttgagggcgagtgccttgagctgctgagacggtaccttgaaaacgggaaggaaacactccagagagccgaccctcctaaggcgcacgtcgcccaccaccccattagcgaccatgaagctaccctgaggtgctgggcgctgggcttttatccagcagagattacactaacttggcaacgcgatggagaggagcagacacaggacacagagctcgtggagacaaggccggcaggcgacggtactttccagaagtgggctgcggtcgtagtcccctccggggaggaacaacgatacacatgccacgtgcagcacgaaggcctgccacagcctctgatcctgaggtgggagcagtcaccccagccaacgattcccatcgtgggaattgtagccggcctggtcgtgctgggagcagtggtgacaggcgcagtcgttgctgctgtcatgtggcgtaagaagtctagcgataggaaccgggggtcctactctcaggcagcagtttag

SEQ ID NO: 200576 - DNA, 678 bp, Artificial Sequence
  derived and/or modified sequence
tgacccgaccccccccccggccgggtgcccggcgccttcacccagcacgcgtacgatggtaaagattatatcagtctgaatgaggaccttagaagctggacggcagctgatacggtggctcagatcacacaacgcttctacgaggccgaggagtacgccgaggaattcagaacttatctggagggggagtgcttggagctcctccgaagatacctggagaacggcaaggaaactctgcagagagcagatccccccaaagcccatgtggcacaccatcccatttccgaccacgaagctactctgcgctgctgggctctgggtttttacccggccgagattaccctcacctggcagagagatggcgaggagcagacccaagacactgaattggtagaaacacgacctgccggtgatggaacatttcagaaatgggccgccgtcgttgtgcctcctggggaggagcaacggtacacatgtcacgtccagcacgagggcctccctcagcctctcattcttagatgggagcagtctcctcaacccaccattcctatcgttggtatcgtagctggcctggtcgttttaggcgccgtggtgaccggcgcagtcgtcgctgccgtgatgtggcgtaagaagtcgtctgaccgcaataggggctcatactcccaggctgcagtgtag

SEQ ID NO: 200577 - DNA, 678 bp, Artificial Sequence
  derived and/or modified sequence
tgacccgaccccccccccggccgggtgcccggcgccttcaccgagcacgcctatgacggcaaagattacatctccctcaatgaagacctacgctcgtggactgccgctgacactgtcgcacagataacgcagaggttttatgaagcagaggaatacgctgaagagttccgaacttacctggagggggagtgtctggagctgctaaggcggtatctggagaatggcaaggagactctgcagagggccgatcctcctaaagctcacgtggctcaccacccaatctccgatcatgaagcaaccctgcggtgttgggcccttggattttaccccgcggagattaccttgacatggcaaagggatggagaagaacagacgcaagacacggagctggtcgaaactcggccagccggcgatggaaccttccagaaatgggctgctgtcgtcgtgccttctggagaggagcaaaggtacacctgccacgtccaacatgaagggcttccacagccattgatcttgaggtgggagcagagtccccagcctacaatcccaatcgtggggattgtcgctggactggtggttctgggagctgtggtaaccggggcagtggtcgccgctgtgatgtggcggaagaaatcctctgatcggaatcgaggcagctacagccaggcagctgtgtag

SEQ ID NO: 200578 - DNA, 1041 bp, Artificial Sequence
  derived and/or modified sequence
atggccccccggagcctgctgctgctgctgagcggcgccctggccctcaccgatacttgggccggatctcactctcttcggtattttagcaccgccgtcagcaggcccggtcgcggagaaccccgctacatagctgtggagtacgtggacgacacgcagtttctccgtttcgatagtgacgcagctatcccaaggatggagcccagggaaccatgggtggagcaagaagggcctcaatactgggaatggacaaccggctacgcgaaagcaaatgcccaaactgaccgggtggcactgaggaacctgcttagacgttacaaccagtccgaagcagggagccacacgctccagggtatgaacgggtgtgacatgggccctgacggtcgcctgctgcgtggctatcatcagcacgcctatgatgggaaggattatatcagtctgaatgaagacctgcggagttggactgctgctgacaccgtcgcccaaattactcaaagattttacgaggccgaagagtacgccgaggagtttagaacctacctggagggagaatgtcttgagctgctccgaagatacctggagaatgggaaggagacactgcaacgggctgaccctccgaaagcccatgtcgcgcaccacccaatttcagatcacgaggctacactacgctgttgggctctgggcttctaccctgcagaaattacgctgacatggcaaagagatggagaagaacaaacccaagacacagagctggtcgaaaccagaccagctggagatggaaccttccagaaatgggcggccgtcgtggtcccatctggggaggaacagcgctatacctgccacgtgcagcacgaagggcttccacagcctctaatactgagatgggagcaatcgcctcaaccaacgattcccatagtgggtattgtggctggcctggtggtcctgggtgcagtggtaaccggcgctgtggtagcggccgttatgtggcggaagaaatcgtccgatcgcaaccgcggctcctattctcaagctgccgtgtag

SEQ ID NO: 200579 - DNA, 1041 bp, Artificial Sequence
  derived and/or modified sequence
atggccccccggagcctgctgctgctgctgagcggcgccctggccctaaccgatacctgggcgggaagtcacagcttgcggtacttcagtacagctgtgtctcggcccgggcgtggagagcctcgatatatcgccgttgaatacgtcgacgacacccaatttctaaggttcgattcggatgctgccatcccccggatggagcctcgggaaccctgggtcgagcaggaaggcccgcagtactgggagtggactaccggctatgcaaaagctaacgctcagacagaccgggtagctttgagaaacctgctccggcggtacaaccagagcgaagcgggctcccatactctgcagggcatgaacggctgtgatatggggcctgacgggaggctccttcgcggttatcatcaacatgcctacgatggcaaggactatatatccctgaatgaggatcttcggagttggaccgctgccgacactgtcgcacaaatcactcagcggttttatgaggccgaagagtatgccgaggaatttagaacctatttggagggtgaatgcctggagttgcttcggaggtatctagagaacggcaaagaaaccctccagcgcgccgacccgcccaaggcacatgttgcccatcacccgatatccgaccacgaggccacactcagatgctgggccttgggattttacccagccgaaataactctcacgtggcagcgagatggtgaggagcaaacccaggatacggagctggtggaaacaagaccagccggtgacggcacgttccagaaatgggccgcagtagtagtgccatcaggagaagaacagcgatacacctgtcacgtccaacacgagggcctgcctcagcctctgattctgcggtgggaacagagtccccagcctaccattcccattgtcgggattgttgccggcctcgtggttctcggtgcggtggtgacaggcgccgtggtggccgctgttatgtggagaaaaaaaagctccgatagaaatagagggtcgtattcacaggctgctgtgtag

SEQ ID NO: 200580 - DNA, 678 bp, Artificial Sequence
  derived and/or modified sequence
tgacccgaccccccccccggccgggtgcccggcgccttcacccagcacgcctacgacggtaaagattatatcagcctcaacgaggatctgcggagctggacagccgctgatacagtggcccagattactcagcgcttctatgaagcagaggagtatgccgaggaattcagaacctatctggaaggcgagtgcttggaactcctgagaagatacctcgagaacgggaaggaaaccctgcaacgtgcagatccccccaaggcccacgtcgcccatcaccctattagtgaccatgaggctactttgcgatgttgggcgctcggattctatcccgccgagatcaccctgacttggcagagggatggggaagagcagactcaagacactgagctcgtggagacaaggcctgccggggacggcacattccagaagtgggccgcagtggtcgtgccatccggcgaagaacagcgatacacgtgccatgtacaacacgagggcctgccccaaccactgatcctgcgttgggagcagtcaccgcagccaaccatccccatcgtgggcattgttgccggtctggtggtgctgggcgcagttgttactggcgccgtggtggcagcagtaatgtggcgtaaaaaaagcagtgacagaaacaggggctcgtatagccaggccgcagtttag

SEQ ID NO: 200581 - DNA, 678 bp, Artificial Sequence
  derived and/or modified sequence
tgacccgaccccccccccggccgggtgcccggcgccttcacccagcacgcctatgatggaaaagactatatctccctaaacgaggatctgcggtcctggacagctgctgatactgtggcacaaattactcagaggttctatgaagccgaggaatatgccgaagagtttcgcacttacctcgagggtgagtgtctggagctcctgcggcggtacctggagaatggcaaggaaacgctgcaaagagctgatccacccaaggctcatgtggctcaccaccccatatcagatcatgaggccaccctcagatgttgggccctgggcttttatcccgccgagattacgctgacctggcagagggacggtgaggaacagacacaggacacagaattagttgaaacacggcccgcaggagatggcacttttcaaaaatgggcggctgtggttgtgccttcaggagaggagcagcgttatacatgccatgtccagcatgaggggctcccccagccccttatattgcggtgggagcagagcccacagccaacaattccgatagtcggtatcgtggctgggctcgtcgttctgggggccgtggtgaccggtgccgttgtggctgctgttatgtggaggaagaagtcttctgatagaaacaggggatcctactctcaggcagccgtatag

SEQ ID NO: 200582 - DNA, 1041 bp, Artificial Sequence
  derived and/or modified sequence
atggccccccggagcctgctgctgctgctgagcggcgccctggccctgacagatacctgggccggctcacatagcctcaggtacttcagcacagcagtgagccgacctgggcgaggagagcctcggtatatcgccgtggagtacgtggatgatactcaatttctgcgcttcgactcagatgctgctataccgcgcatggagcccagggagccttgggtggagcaagaaggaccacagtactgggaatggaccacgggatacgctaaagcaaatgctcagaccgatagggtggccttaaggaacctactgcgtcgctacaaccaatctgaagcaggctcccacacactccagggcatgaatggatgcgatatggggccagacgggcggctgctccggggctatcaccagcacgcttacgatggaaaggactatatctcgctgaacgaggacctgcgttcttggactgctgcggatacagtggcccaaattacacagcgtttttatgaggctgaggaatacgctgaggagtttcgcacttatttggagggcgagtgtctcgagctcctgcgacgttatttggagaacgggaaagaaacgcttcagcgtgccgaccccccaaaggctcacgtcgcacaccatcccatttcagatcatgaggccactttgaggtgctgggccttgggtttctacccagccgagattaccctgacctggcagagagatggtgaggaacaaacgcaggacacagaattggtggagactcgaccggcgggcgatggcacatttcagaagtgggccgccgtggtggttccatctggagaggaacagcgctatacttgtcacgttcaacacgagggcctgccacagccattgattctgcggtgggagcaaagccctcagccgaccattccaatcgtagggatcgtggcgggactcgtggtgctgggggcagtggtcaccggagccgtagtcgccgccgtgatgtggcgcaaaaagtcttcagatagaaatcggggcagctactctcaggctgccgtctag

SEQ ID NO: 200583 - DNA, 1041 bp, Artificial Sequence
  derived and/or modified sequence
atggccccccggagcctgctgctgctgctgagcggcgccctggccttaactgacacctgggcagggtcacatagcctacgctatttctctaccgcagtgagtcgaccaggacgcggtgagccccgttacatagctgtggagtatgtcgatgatactcagttcctacgattcgactccgacgccgcaattccacgcatggagcctcgagaaccctgggttgagcaggagggtccacagtattgggagtggactacaggatacgctaaagccaatgcccagacagaccgcgtggccttgcgcaacctgctgcgtcggtataaccaatctgaggccggctcgcatacactgcagggtatgaatggttgcgatatggggcctgatgggcggttgttgcgggggtaccaccagcatgcatatgacggcaaggattacatctccctcaatgaggacctgcggtcttggactgcagcagacacagtggcacagattacgcagcgcttttatgaggctgaggaatatgctgaagagttcaggacctacttggagggcgaatgtctagaactgctgcgtcgatacctggagaatgggaaggagaccctccagcgggccgacccccctaaagcccatgtggcacaccaccccataagtgaccacgaggctactcttcgttgttgggccttgggtttctaccccgctgagattacactgacatggcagagagatggggaggagcagacccaggacacagagctggtcgagactcggccagctggcgatgggaccttccaaaaatgggctgcagttgtcgtaccttccggtgaggagcagcgctatacctgccacgtacagcatgaaggactgccccagccactgatcttaagatgggagcagtccccccagcccactattcccatcgtcggcatcgtcgctggccttgtcgtgctaggagccgtggtgactggagccgttgtagcagccgtcatgtggcgcaagaagtcctctgaccggaacagggggagttactctcaggctgctgtgtag

SEQ ID NO: 200584 - DNA, 1041 bp, Artificial Sequence
  derived and/or modified sequence
atggccccccggagcctgctgctgctgctgagcggcgccctggcccttacggacacctgggccggaagccattctttgcggtacttcagcacagctgttagcagaccaggccggggtgagcctcgttacatcgccgtggaatatgtcgatgatactcagttccttagattcgattcagacgcggcgatccctcgcatggaaccacgagaaccttgggtggaacaggaggggccacaatactgggagtggaccactggctatgccaaggccaatgcgcagaccgatcgagttgccctgcgaaatctacttaggagatataatcagtcagaggcaggttcccatactctgcagggaatgaacgggtgcgacatgggccctgacggtagactcctgagagggtaccatcagcacgcctacgatggaaaggattacatctcgctgaatgaagatctgcgcagttggaccgctgctgatacagtggcccagattactcaacgcttctacgaggcagaggaatatgccgaggagttccggacttacctcgagggcgaatgtctagagctcctgcggcgttacttggaaaacggcaaagagactttacaacgcgccgaccctccaaaagcccacgtcgcccaccatcctatcagtgaccacgaggctactctcaggtgttgggctctcggcttttaccctgccgaaatcaccttaacctggcagagagatggagaagagcagacacaagataccgagctggtcgagacccgtcctgcaggtgatggcacctttcagaagtgggcagcagtggtggtcccatcaggagaggagcagcggtacacatgtcatgtccaacacgaagggctgccgcaacctttaattttgcggtgggaacagagtccgcagcccactattcccatcgtgggcatcgttgccggtctggtggtgctgggcgctgttgtgaccggagccgtcgtggccgcagtcatgtggcggaaaaagtcaagcgataggaaccgagggagctatagtcaagcggctgtttag

SEQ ID NO: 200585 - DNA, 1041 bp, Artificial Sequence
  derived and/or modified sequence
atggccccccggagcctgctgctgctgctgagcggcgccctggccctgacagacacctgggccggatcacactccttgcgctatttctcaactgctgtgtccagaccaggacgaggagagcctagatacattgcagtggaatacgtagatgacacccagttcctgcgctttgactccgatgctgccattccgaggatggagccccgcgagccatgggttgagcaggaaggacctcagtattgggaatggacaacaggctacgctaaggctaatgctcaaactgaccgcgtagccctcaggaacctgctgcgaagatataatcagagtgaggctggtagccacacactgcaaggaatgaacggctgtgatatgggccccgatgggaggcttctgaggggatatcaccagcacgcctacgacggcaaggactatatttcactgaacgaggatctgaggtcctggacggccgccgatacagtagctcagatcacacagagattctatgaagctgaagagtatgccgaagaattccgcacatacctcgagggtgagtgcttagagttactgcgcagatatctcgaaaatggcaaagaaacgctacagcgcgctgacccgcctaaggctcacgtggcccatcacccaatatccgatcatgaggccacactgcgttgctgggcactcgggttctaccctgccgaaatcactctgacgtggcagcgggacggcgaggagcagacccaggacaccgagctggtggagacaaggcccgcaggcgatggcactttccagaagtgggccgctgtggttgtccctagcggcgaagagcagagatacacctgtcacgtgcagcatgaagggctcccgcagcctctgatcttacggtgggagcagagtccccagccaactataccaatcgtgggcattgtggcaggcctagtagtgctaggagccgtcgtcacaggcgcagtagtcgcggccgttatgtggcggaagaagagcagtgataggaatagaggaagctatagccaagctgcggtctag

SEQ ID NO: 200586 - DNA, 1041 bp, Artificial Sequence
  derived and/or modified sequence
atggcccctagaagcttgctcttacttctgtcgggggctcttgcactaaccgatacatgggccggaagccactctcttcggtacttttctacagcggtgtcaaggccaggaagaggagagccccgttatattgcggttgagtatgttgatgacacacagtttctacgctttgactctgacgctgctattcccagaatggaacccagagagccatgggttgagcaggagggtccgcaatactgggaatggacaacaggatacgccaaggctaatgcccagacagacagagtggctctgcgaaaccttctcagacgatacaaccagtctgaggcgggatctcacacgctgcagggaatgaatgggtgtgacatgggccctgatggacgtctgctcagagggtatcaccagcatgcatacgatggcaaggactacatctccctgaacgaggatctgagaagttggaccgccgctgatactgtggcccaaataacccagcgcttctatgaagccgaagagtacgctgaggagttccggacgtacctggagggggagtgcttggagctgcttcgaagataccttgagaatggaaaagagacgctgcagagggctgacccccctaaagcccacgtagcgcaccatccgatctccgaccacgaagcaactctccgctgctgggcactgggcttttatccagctgagataacactgacatggcagcgggacggcgaggagcagacacaggacaccgaactcgtggaaacgcgcccagccggagatggaacattccagaagtgggccgctgtggttgtgcctcccggtgaggaacagcggtatacatgccacgtgcagcatgagggcctgccacagcctctcattctgcgctgggaacagagtccacagcccacgatccctattgttggtatcgtggccggacttgtggtacttggcgctgtcgtgactggcgcagtggtagcagctgtcatgtggcgaaagaaaagctctgatagaaacaggggcagctatagccaagccgctgtgtag

SEQ ID NO: 200587 - DNA, 1041 bp, Artificial Sequence
  derived and/or modified sequence
atggccccacgttcactgctgctgctgctgagcggcgctctggccctcaccgatacatgggccggaagtcatagcctccgctacttctcgaccgccgtgagccgccctggcagaggcgagcctcgctacatcgccgtggagtacgtggatgatacccagtttctgagattcgattcagacgcggcaataccgagaatggaacccagggaaccttgggtggagcaagaagggccacagtactgggagtggacaaccggctacgccaaagctaacgcccagaccgacagggtcgccttacgaaatctgttgcggaggtacaaccagtctgaagctgggtctcataccctgcaggggatgaacggatgcgacatgggtccagatggcagactgctgcgcggatatcaccagcacgcttacgatgggaaagattacatctcgctaaatgaggaccttcgcagctggactgcagccgacactgtggcccagattacccagagattttatgaggctgaggaatatgccgaggagtttaggacatacctggagggcgagtgtttagagttacttcgcagatacctcgagaatgggaaggagactctgcagcgggctgaccccccaaaagcgcacgtggcccaccaccccatttctgatcatgaggccactctccggtgctgggctcttggattttacccagcagaaatcacactcacatggcaaagggacggcgaagagcagacgcaagatacagaattggtggaaacccgcccagctggggacggtacctttcagaaatgggccgcagtggtggtgccctccggagaagaacagcgctatacttgccacgtgcagcacgaaggtctcccccagcctctcatactacgatgggagcaaagtcctcagcccacaatcccgattgtggggattgtggctgggctggtcgtccttggggcagtggtaacaggagccgtggttgccgctgtgatgtggcgaaagaaatcaagtgacaggaatagagggagttattctcaggcggctgtttag

SEQ ID NO: 200588 - DNA, 1041 bp, Artificial Sequence
  derived and/or modified sequence
atggcccctcgcagtctgcttctgctactcagtggcgcattggcactcacagatacctgggccggaagtcatagtctgagatatttttcgaccgccgtctcccggcctggtcgaggggagcccagatacatcgctgtcgagtacgtagatgatactcagttcctgcggttcgactccgatgctgccatcccaaggatggagcccagagaaccttgggtggagcaggaagggccacagtactgggaatggaccacaggttacgcgaaggcaaatgctcagacagacagggtggcacttagaaacctgttgaggcggtacaatcagtctgaggctggcagccacacattgcagggcatgaatgggtgcgatatggggcctgatggccgtcttcttcggggatatcaccagcacgcatacgacgggaaagactacattagcctgaatgaggacttaaggtcgtggactgccgctgacacagtcgcacaaattacccagagattttatgaagcggaggaatacgccgaagagtttcggacatacctggagggcgagtgtcttgaactgctacgcaggtatttggaaaatggaaaagagacacttcagcgagcagaccctcctaaggcccacgtggctcatcatccaatttcggaccacgaagccaccctaagatgttgggcgctagggttttaccccgcagagataacactcacctggcaaagagatggtgaggagcaaacccaggacaccgagctcgtggaaactcggccagccggagacggaacattccagaagtgggcagcagtagtcgtgcctccaggggaggaacagcgttatacatgtcacgtgcaacacgaagggttaccacagccactcatcctcagatgggagcagagcccacagccgacaatccccattgtgggcatcgtggcgggactggtggtgctcggagctgtggtgacaggggctgtggtcgccgctgtgatgtggagaaaaaagtcaagcgatcggaaccgcggaagttactctcaggcagcagtctag

SEQ ID NO: 200589 - DNA, 1041 bp, Artificial Sequence
  derived and/or modified sequence
atggctcctcgcagtcttctgctgttactctcaggcgcactggcactgacagacacttgggccggatcacactctctgaggtacttttcgacagccgtgtcacggccagggcgaggcgagcccaggtacatagctgttgagtatgttgatgatactcagttcctgagatttgatagcgatgcagccattcctaggatggaaccgagagaaccttgggtcgagcaagagggtccgcagtactgggagtggacaaccggttacgcgaaggctaatgcccagactgatcgagtcgcactgaggaatctgctcaggaggtataatcagtcggaggctggttcgcacaccctgcaggggatgaacgggtgcgacatgggtccagatggccgattactgaggggataccaccaacacgcttacgatggtaaggactatatctcccttaatgaagacctgagatcatggacggcagctgacacagtggctcagatcacacagcgtttttacgaagccgaagagtatgctgaggagtttaggacctacttggagggagaatgcttggagttactccgacgctatctagagaacggcaaggaaacactgcaaagagccgatccccctaaggcgcatgtggcacaccaccctattagcgaccatgaagccaccctgaggtgctgggcccttgggttctacccagcagagatcacactgacctggcagcgcgatggggaggaacagacacaggatactgaacttgtcgagaccaggccggctggcgatggcacttttcagaagtgggccgcagttgtcgttcctagcggagaggagcagcgatacacatgccacgtccagcatgagggcctgccccagcctctgatactgagatgggagcagtcaccccagcctaccattcccattgtcggaatcgtggctggcttggttgtactcggtgctgttgttacaggagccgttgtggcagccgtaatgtggcgtaagaagtcatccgatcggaaccgcggaagctacagccaagcagctgtgtag

SEQ ID NO: 200590 - DNA, 678 bp, Artificial Sequence
  derived and/or modified sequence
tagcccgatccgccaccgggacgggttccaggcgctttcactgagcatgcatacgacggaaaagattatatttccctaaacgaggatctgcggtcatggacagccgctgacaccgtggcacagatcacacagcggttttatgaagctgaggagtacgcagaagaattccgcacctacttggagggcgaatgccttgagctgttgcgccgttatcttgaaaacggtaaggagaccctccaaagggccgatcccccaaaggcccatgttgctcaccatccgatttcggaccatgaggcaacgcttcgctgctgggcactgggattctatccagccgagattacactgacgtggcagagagacggcgaggagcagacacaagacactgaacttgtggaaaccagaccagcgggagatgggactttccagaaatgggctgctgtcgtggtcccctctggcgaggaacagaggtacacctgccacgttcagcacgagggcttgcctcagcctctgatcctgcggtgggagcaaagcccacaacctacaattcccatcgtgggaattgtggctggactggtggtcctcggcgctgtagtaacaggggcagtcgtcgccgcagttatgtggagaaagaagagtagtgatcgaaacaggggcagctactcacaagccgctgtgtag

SEQ ID NO: 200591 - DNA, 1041 bp, Artificial Sequence
  derived and/or modified sequence
atggccccacgttctttgttgctgctcctgtcaggagcattggccttaaccgacacgtgggcgggaagtcattccctgaggtactttagcaccgctgtctcacggccaggcaggggcgagcctaggtacatcgcagtggaatacgtcgatgatactcagttccttagatttgacagtgatgccgctatcccgagaatggagccccgagagccttgggtggaacaggagggtccccagtactgggaatggacaaccggatacgccaaagccaatgcccagacagaccgagtggcccttaggaacctgcttaggaggtataatcagtcagaggccggatctcataccctgcagggcatgaacgggtgtgatatggggccagacggtcgcttgctccgcggatatcaccagcatgcatatgatggtaaggattacatcagcctcaatgaggatttgcggtcctggacagctgctgatactgttgcccaaatcactcagcggttttacgaagctgaggagtatgccgaggaatttagaacttacctggaaggagagtgtctggaacttttaagacggtacctggagaacgggaaggagacattgcagagagcggacccaccgaaggcgcatgtcgcacatcatcccattagcgatcatgaagctaccctgagatgctgggccctgggtttctatccagctgagataacactgacctggcagcgggatggagaagaacaaactcaggataccgagctcgtggagacgaggccagcaggcgatggcacgtttcagaagtgggcagcagtcgtagtaccaagtggcgaggaacaacggtacacatgtcatgtacagcacgaaggtctcccgcagcccctgatcttgcgctgggaacaatcccctcagcccacaataccaatagtaggtatcgtcgcaggcctagtagtgctgggcgctgtagttaccggtgctgtcgtcgcagcagtaatgtggcggaagaagagctctgatcggaatcggggaagctactcccaggccgcagtgtag

SEQ ID NO: 200592 - DNA, 678 bp, Artificial Sequence
  derived and/or modified sequence
tgaccagatcctcccccaggcagagtgccaggggctttcacagaacacgcctacgatgggaaggattacatttcactcaacgaggacctgcgatcatggacagccgcagatacggtcgcccagataacccagcgcttttacgaggctgaagagtacgccgaagagttccggacttatcttgaaggcgaatgccttgagctgctgagacgctatctggaaaacggcaaggaaaccctacaaagggctgatccgcctaaggctcatgtcgcgcatcaccctattagcgaccacgaggctactctgcgatgctgggccttggggttttacccagcagagattaccctgacatggcaaagagacggagaagaacagactcaggacaccgaactcgtagagacacggcctgcaggtgacgggacattccagaagtgggctgccgtggtcgttccgtcaggggaagaacagaggtatacatgtcatgtgcagcatgaaggcctcccccagccactcatattaaggtgggagcaaagtcctcagccgactatccccattgtcggtatcgttgctgggctggtggtactgggggcagtagttacaggtgctgtcgtagctgcggtgatgtggcggaagaaaagttccgatcgaaatcggggttcttatagccaagcagccgtttag

SEQ ID NO: 200593 - DNA, 678 bp, Artificial Sequence
  derived and/or modified sequence
taacctgacccgccacctggaagagttccgggagccttcacccagcatgcttacgacggtaaagactatattagcttaaatgaggatttacgctcttggactgcagcggacactgtcgctcagattacgcagcgcttctacgaggccgaggagtacgctgaggagtttaggacatacctggagggagaatgtcttgagctgctccgaagatacctcgagaacggtaaggagacactccagcgagccgaccccccaaaggcacacgtggcgcaccatcccatcagcgaccacgaggccaccctgagatgctgggctttggggttctacccagccgagattaccttgacatggcagagagatggcgaagagcaaactcaggacaccgagctggtggaaactaggcctgccggagatggcacctttcagaaatgggcagctgttgtcgtccccccaggcgaagaacagcgctacacatgtcatgtgcagcacgagggtctgccacaacccctgatcttacgttgggaacagtcccctcagcccacgattcctatagtagggattgtagccggtctcgtagtgttaggtgcagtggtcacaggagcagtggttgccgcagtgatgtggagaaagaaatccagtgaccgcaacagggggtcctattcccaagccgctgtttag

SEQ ID NO: 200594 - DNA, 678 bp, Artificial Sequence
  derived and/or modified sequence
taaccagaccccccacccggaagagttcccggagcctttaccgagcatgcatacgacggcaaagactatatatccttgaatgaagatttacggtcctggacggcagcggatacggtcgctcagatcactcagcgattttacgaggcggaagagtacgccgaagagtttagaacttacctagaaggagagtgcctagagttgctccggaggtacctcgagaacggtaaggaaaccctccaacgggctgacccacctaaagcgcacgtcgcccatcaccctatttcggaccatgaggccaccctccgctgctgggctcttgggttttatccagccgaaattaccctcacctggcaacgggatggtgaggagcaaacccaagatactgagttggtggaaacgagaccagctggggatggcacctttcagaaatgggcggcagtcgtggtaccttccggggaggaacagaggtacacctgccatgttcagcacgagggcttgccgcagcccctgattctgcgctgggaacagagcccacagcctaccatcccaattgtgggaatcgtggcaggactggtcgtgctgggggctgttgtgaccggcgctgttgtagccgctgtcatgtggaggaaaaagagctctgacagaaatcgcggatcatatagccaagcagcagtgtag

SEQ ID NO: 200595 - DNA, 1041 bp, Artificial Sequence
  derived and/or modified sequence
atggcccctcggagcctgctcctgctgttatcaggcgctttggctctgaccgacacttgggcgggatcacacagtctcagatacttttcaacggctgtcagcaggcccggtagaggcgaaccacggtatatcgcggtggagtacgtggacgacactcagtttctgaggttcgattccgacgccgcaatccctcgaatggaacctcgcgagccctgggtggagcaggaaggacctcagtattgggagtggacaacaggatacgctaaagccaacgcccagactgaccgggtagccctgcgcaatcttcttcgcagatataatcagtcagaggccggttctcacactctgcagggaatgaatggctgtgacatggggccagacgggcgtctgctgcggggatatcatcagcacgcttatgacggtaaagactacatctcactcaatgaagatctgaggagttggactgccgcagacacagttgcccagattactcaacggttctacgaggccgaggaatacgcagaggagttcagaacttacctggaaggcgaatgcctggagctccttaggcggtaccttgagaacgggaaagaaacactgcaaagggctgatccacccaaagcccatgtggcccatcatcctatttcagaccacgaggccaccttgcgctgctgggctctaggcttctatcctgccgaaattactctgacgtggcagcgcgacggcgaagagcagacacaggatacggagctagtggagacccggcctgcaggcgatggtactttccagaagtgggctgctgttgtggtaccttctggtgaggaacagagatacacttgccatgttcagcacgaaggcttaccgcagccccttatattaagatgggaacagtctccacagccaacaattccgatcgttgggatcgtggctggactggtggtgttaggcgctgtggtcactggagccgtcgtcgcagctgtgatgtggcggaagaagtcaagtgatcgcaatcggggatcctactcacaggccgctgtatag

SEQ ID NO: 200596 - DNA, 1041 bp, Artificial Sequence
  derived and/or modified sequence
atggccccacggtccctgcttttgcttttgagtggcgctctggctctaaccgatacctgggcaggctcccacagtttaagatatttctctacagctgtgagcagaccaggtaggggagagccgagatatattgcagtggaatacgtggatgatacccaattccttcgttttgacagtgatgcggctatacccagaatggaaccccgagagccatgggtagagcaagaggggcctcagtattgggagtggaccaccgggtacgcaaaggctaacgcacagacggatagggtggccctgagaaacctactccgcagatacaaccagagcgaggcaggaagccacacactgcagggcatgaatgggtgcgatatgggcccagatggcagactcttgcgcggttaccaccagcacgcttacgacgggaaggactacatttccttaaatgaagatctgcggtcatggaccgctgcagatacagttgctcaaatcacccaacggttttacgaagctgaggaatacgccgaggaatttcggacctatctagaaggcgagtgcttagagctgctccgcaggtatctggagaatggcaaggagactctgcagagagccgatccacctaaagcccacgtcgcccaccaccccatcagcgatcacgaagcaacactgcgctgctgggcactggggttctatccagctgagatcactttgacttggcagagagatggcgaagagcaaacacaggacaccgagctggtggaaactcgtccagccggtgatggaaccttccagaagtgggctgcagttgtcgtgccttctggtgaagagcaaagatacacctgtcatgtgcagcacgaaggtctgccccaacccctcatcctacgctgggaacagagccctcagcccacaattcccatcgtgggaattgttgcagggttggtggtcctcggagccgtggtgaccggggcagtggtggccgctgtgatgtggcgtaaaaagtcctccgatcggaacagaggttcatattctcaggccgcagtgtag

SEQ ID NO: 200597 - DNA, 678 bp, Artificial Sequence
  derived and/or modified sequence
tagccagacccacctcccggacgggtcccaggcgcttttacacagcacgcttacgatggcaaggactatatttctctgaatgaagatttgcggagttggacagcggctgacacggtggcacagatcacccagagattctatgaggccgaagaatatgccgaagaattccgcacctacctggagggcgagtgtttagagctgctgcggagatacctggaaaacggcaaggaaacactgcagcgagccgatccacctaaggcacacgttgctcatcatcccattagcgaccatgaggccacattgcggtgctgggcactgggattttatcctgcagaaataactctaacctggcagagggacggtgaagaacagacccaggacactgagttggttgagactcgtcctgcaggcgacggtaccttccagaaatgggccgctgtggtggtcccatctggggaggagcaaagatacacttgtcatgtgcaacacgaagggcttcctcagcctctgatactgcgatgggaacaaagccctcagccgactataccaatagtcggcatcgttgccggactggtagtgctgggcgctgtcgtaacaggtgctgtggtggctgcagtcatgtggagaaagaagagctcagacaggaataggggctcttattcccaggccgctgtgtag

SEQ ID NO: 200598 - DNA, 678 bp, Artificial Sequence
  derived and/or modified sequence
tgacctgatcccccaccagggcgagtgcctggagcatttactcagcatgcatatgacgggaaggactacatttctctgaatgaggacctgcggtcatggacagcagcagacacggtagcccagataacccagaggttctatgaggccgaagagtatgccgaagagttcagaacctatctggaaggcgagtgtctggagctgttgcggcgatacctcgagaacggaaaagagacactgcagcgcgcagaccccccaaaagcacacgtcgctcaccatcctattagcgaccatgaagccactcttagatgctgggcgctcggattctatcccgcagagatcaccttgacttggcaaagggacggcgaggagcagacccaggacacagaattggtcgagacccgcccagcgggagacggaaccttccagaagtgggccgctgtcgtagtcccatccggtgaagaacaacggtacacctgtcatgtccagcatgaaggtttgccccagcctctcattctcaggtgggagcagagcccccagcccaccatcccaatcgtgggcatagtcgccggactggtcgttcttggcgcagtagtgacgggggctgtcgtcgcagctgtgatgtggaggaagaaaagcagcgatcgcaatagaggctcttatagtcaggctgcagtctag

SEQ ID NO: 200599 - DNA, 1041 bp, Artificial Sequence
  derived and/or modified sequence
atggcccctagatcactgctgctgcttttgtcaggcgctttggccctcactgacacttgggccggaagtcatagcctgcggtattttagcacggctgttagccgcccaggacgcggagagcctaggtatatcgccgtggagtatgtcgatgatacacagttcttgcggttcgacagcgatgccgctatccctagaatggagcccagggagccttgggtagagcaggaaggtcctcagtactgggagtggaccacaggttatgcgaaagcaaacgcccaaacagaccgagtcgccctcaggaatctgctcagaaggtataaccagtccgaggcaggctcacatacactgcagggaatgaatggctgtgatatgggcccagacggtagattgctgcgtggataccatcaacacgcatacgatgggaaggactacatcagtctcaatgaagacttaagaagctggaccgccgctgacacagtggcacagattacacagcgcttctacgaagccgaggagtacgctgaggagttcagaacctatctggagggtgagtgtttagaacttcttagacgttacctggaaaatggcaaggaaaccctgcagcgtgctgatccacccaaggcacatgtggcgcaccatccaatcagtgatcacgaagcaactctgcgttgttgggctcttgggttttacccagcagagataaccctcacatggcagcgcgatggggaagaacagactcaggacactgaactggtggagactcgccctgcaggagacggcacctttcagaagtgggcggcagtcgttgtaccttccggtgaggagcagcgctatacttgtcacgttcagcatgagggactgccccaacccttgatactgcgctgggaacaaagcccacagccgaccatccccatcgtgggaatcgtggcgggtctggtggttctcggtgccgtagtgaccggggctgtggtggctgcagtgatgtggcggaagaaaagttccgataggaatcgcggaagctactcccaggcagccgtctag

SEQ ID NO: 200600 - DNA, 1041 bp, Artificial Sequence
  derived and/or modified sequence
atggcccctcgctccttgcttctgttactgtccggggctctcgcattgactgatacctgggccggttcccacagtctcagatatttctcgacagccgtgtcacgcccaggccgaggcgagccccgatacattgcagtagaatacgttgatgacactcaatttctgaggttcgattcagacgctgccatcccacgcatggaacctagggagccctgggtcgaacaggaggggccacaatattgggaatggacaactggttatgcaaaagcaaacgctcagacagaccgagttgctctcaggaatttgcttaggaggtataatcaatcagaagcagggagccacactctgcaaggcatgaacgggtgcgatatgggccctgatggacgactgctccgtggttatcaccagcacgcctacgacggaaaagattacatttcactcaatgaggatttacgcagttggaccgccgctgacacggtcgctcaaataacccagcggttttacgaggcagaagagtacgcagaagaattccggacctacttggaaggagagtgtttggaattgctgagacgttacctggagaacggaaaggaaactcttcagcgggcagatccgccaaaggcccacgtcgcgcatcatcccatcagtgatcacgaggctaccctgcggtgttgggccctgggcttctacccagcagagatcactctcacatggcagcgagatggtgaagagcagacgcaagacacggaattggtggaaacaagacccgcaggcgatgggacgttccagaagtgggccgcagtcgtggtaccttccggagaggagcagaggtacacgtgccatgtccagcatgaaggcctacctcagccactgatcttgcgatgggagcagtcgccccagcctacaattccaatagtaggcatcgtggcaggactggtagtgttgggtgccgtcgtgactggcgctgttgtcgccgctgtgatgtggagaaagaagtcctctgaccgaaatcgtggctcttactctcaggccgctgtgtag

SEQ ID NO: 200601 - DNA, 1041 bp, Artificial Sequence
  derived and/or modified sequence
atggcacccaggtctttactcctgctcctctcaggtgccctggcgttaaccgatacttgggccggttcccacagtttgagatacttctccacggccgttagtcgccctgggagaggtgagccgagatacatcgctgtagagtatgttgatgatacccaatttctacggttcgacagcgacgccgctatacccagaatggaacctcgggaaccatgggtggagcaggagggcccacagtactgggagtggactacgggctatgcgaaggctaatgctcaaaccgaccgggttgcgttaagaaacttgttgcgcagatataaccagtccgaggccggatcgcacacgctgcaaggaatgaatggctgcgacatgggaccagacgggagactcctgcggggataccatcagcatgcctacgatggaaaggattatattagcttgaatgaagacctccgttcgtggaccgccgcagatacggtcgctcaaatcacacagcggttttacgaggccgaggaatacgccgaggaattccgcacttacctggagggtgaatgcctggagctgctccgccgatatcttgagaacggaaaggaaaccctccaacgtgccgaccctcccaaggctcacgttgctcaccacccgataagtgaccatgaggcaactttgcggtgttgggctctcggcttttacccggctgaaataacattgacgtggcagcgcgatggcgaagaacagacacaagacactgaattagtggaaaccaggcctgctggagacggcactttccagaagtgggctgcagtcgttgttccttcaggcgaagaacagagatatacctgccacgtacagcacgaggggctgccacagcccttgattctcaggtgggaacagagcccccagccgacgattcccattgttgggattgtcgcaggcctggttgtactcggcgcagtagtgaccggcgcagtggtcgctgccgtcatgtggcggaagaaatcatctgacagaaatagagggagttattcacaggctgccgtttag

SEQ ID NO: 200602 - DNA, 1041 bp, Artificial Sequence
  derived and/or modified sequence
atggcgccaaggtctctgctcctgctcctgtccggtgcattggccctcacggacacatgggcgggttcgcactccctgcgctactttagcacagccgtgtcacgccctggtagaggcgagccccgttatattgccgtggaatatgtcgacgacactcagtttttacggtttgatagtgatgctgccattccccgaatggaaccacgggagccttgggtcgagcaggaaggccctcagtattgggagtggaccacaggatacgcgaaagccaacgctcagacagaccgagtggccctgaggaatctactgcggcgttataatcagtccgaggccggttctcatactctacaaggcatgaacggctgtgacatgggacctgacgggaggctgctgcgcggataccatcagcatgcttatgacggcaaggactatatatctctgaatgaggatctgcgatcttggaccgccgctgacactgttgcacaaatcacacagcggttttacgaggccgaggagtacgcagaagagttcagaacctaccttgagggcgagtgtctcgaactgctgagaagatatctagagaacggcaaagagactctacagcgtgctgacccgcctaaggcccacgtggcccatcaccccatctccgatcacgaagccaccctccgttgctgggccctcgggttctacccagcagaaatcaccctcacctggcaaagagatggggaagagcagactcaagacacggaactggtagaaacccggcctgctggagatggcacgttccaaaagtgggccgcagttgtggtgccaagtggtgaggagcagaggtatacatgccacgtccaacacgaagggctcccacagcctcttatccttcggtgggagcagtccccccaaccaaccatccccatcgtcggcattgtggcaggattggttgtgctgggggcagtcgtcactggcgcagtggtcgccgctgtcatgtggcgcaagaaaagcagcgaccgcaatagagggagttacagccaagcagccgtttag

SEQ ID NO: 200603 - DNA, 1041 bp, Artificial Sequence
  derived and/or modified sequence
atggcccctcgatccctgttgttactattgagcggcgccctcgcattaaccgatacatgggcaggtagtcactcacttcgatattttagcacagctgtgtccagaccgggacgaggagaacctcgttacattgcggtggaatacgtcgacgacacccaatttttgaggtttgacagcgacgccgccattccacgcatggaacctcgagagccttgggtggagcaggagggtccacaatactgggaatggactacagggtatgcaaaagccaatgcacaaactgacagagtcgccctccgcaacctcctcaggaggtataaccagtcggaagctggttcccataccctgcaaggaatgaacgggtgcgatatggggcccgatggccggctgctgagaggctaccaccagcatgcttacgacggtaaagattacatatctctgaacgaggacctgcgctcatggaccgcagccgacaccgtggcacagatcacccaacggttctacgaggcagaagagtatgccgaggagttcaggacatatctggagggagagtgcctggaactcctacggagatatttggagaatggcaaggaaacattacaacgcgcagacccacctaaggctcatgtggcccatcacccaatttcagaccatgaggccaccctgaggtgctgggcccttgggttttatcccgctgaaattacactcacatggcagcgggatggtgaagagcagactcaagacaccgaacttgtggaaacacgccccgcaggagatggcactttccagaagtgggccgctgtggtggtgcccagtggagaagagcagaggtatacctgccacgtgcagcatgaaggactgccacagcccctgatcctccgatgggagcaatcacctcagccaacaatacctatcgttggcatagtggccggtttggtggtgctgggggcagtagtgactggggccgttgtggctgccgtcatgtggagaaagaaaagttcagaccggaatcggggctcatatagccaagccgctgtgtag

SEQ ID NO: 200604 - DNA, 1041 bp, Artificial Sequence
  derived and/or modified sequence
atggccccccggagcctgctgctgctgctgagcggcgccctggccctcaccgatacctgggccgggtctcattcgttaaggtacttttccaccgccgtgagtaggccagggaggggtgagccgaggtatatcgcagtggaatacgtagatgacactcagtttttaagattcgatagcgacgctgcaatcccaaggatggaaccaagagagccatgggtagaacaggaaggtccgcagtactgggagtggaccacaggatacgccaaggctaatgctcagaccgaccgggtcgcgctccggaacctcttgcggcgatataatcagagcgaagccgggagccacacattgcagggcatgaacggctgtgacatggggccggatggcagactactgcgaggttatcaccagcatgcgtacgatggaaaggactacatcagcctcaacgaagatctccggtcttggactgctgcggataccgtcgcccagatcacccagaggttctatgaggccgaggaatacgccgaggagttcaggacctacctcgaaggtgagtgtctcgagctgcttcgcagatatttggagaatggcaaagagacgctgcagcgcgctgacccgccaaaagcacacgtcgcgcatcatcccatatcggaccacgaggccactttgcggtgttgggccctgggcttttatccagccgagataaccctcacttggcagcgtgacggggaagaacagacccaggacaccgaactggttgagacgcgacccgccggggacggcaccttccaaaagtgggccgctgtcgtcgtgccttccggagaagagcaacgatacacatgccacgttcagcatgaaggattaccccaaccactgattttgagatgggagcagtctccccagccgaccatacccattgtgggcattgtggcaggattagtggtactgggcgcagttgtgacgggagcggtagttgcagccgttatgtggcggaagaaaagctccgaccggaaccgcggatcttattctcaggccgccgtgtag

SEQ ID NO: 200605 - DNA, 1041 bp, Artificial Sequence
  derived and/or modified sequence
atggctccacgatctctgctgttgctgctaagtggcgctctggctctcacggatacatgggcaggttcccatagtttgcgctacttttctaccgccgtgtccaggccgggtaggggcgaaccacgctacatagccgtggagtatgtcgacgacacccaatttctgcgattcgactccgatgcagcgatccctcgcatggaaccaagagaaccctgggtcgagcaagagggccctcagtattgggaatggaccaccggatatgcaaaggccaacgcacagacagatcgtgtagctttgcgaaacctccttcgtagatacaatcagagtgaggccggatcccacactcttcaaggaatgaatggctgcgacatgggcccagacggacgcttactgagggggtatcaccagcacgcttatgatggcaaagattacatatctctgaatgaggacctgcgaagctggacagccgctgatactgtcgctcaaataactcagagattttacgaggctgaagagtacgctgaagaatttaggacttatctcgaaggggaatgcttggagctgctgcggcgatatttggagaacgggaaagagactctgcagagagccgacccaccaaaagcccacgtagctcatcaccctatttccgaccatgaggccacactgaggtgctgggctcttggtttctatcccgctgaaatcacattgacgtggcagcgggatggcgaggagcagacccaggatactgagctcgtcgagacccggccagctggcgacggtacttttcaaaaatgggccgctgtcgtggtgcccagtggtgaggaacagcgatacacttgtcatgtccaacatgaagggcttccacagcccttaatcctgcgatgggaacaaagcccccagcccaccattccgatcgtagggatcgtcgccggtctggtagtgcttggcgctgtggtgaccggcgctgtggtggctgctgtcatgtggcgaaaaaaatcaagcgacagaaacagaggcagttactcccaagctgcagtctag

SEQ ID NO: 200606 - DNA, 1301 bp, Artificial Sequence
  derived and/or modified sequence
tttctcactcccattgggcgtcgcgtttctagagaagccaatcagtgtcgccgcagttcccaggttctaaagtcccacgcaccccgcgggactcatatttttcccagacgcggaggttggggtcatggcgccccgaagcctcctcctgctgctctcaggggccctggccctgaccgatacttgggcgggctcccactccttgaggtatttcagcaccgctgtgtcgcggcccggccgcggggagccccgctacatcgccgtggagtacgtagacgacacgcaattcctgcggttcgacagcgacgccgcgattccgaggatggagccgcgggagccgtgggtggagcaagaggggccgcagtattgggagtggaccacagggtacgccaaggccaacgcacagactgaccgagtggccctgaggaacctgctccgccgctacaaccagagcgaggctgggtctcacaccctccagggaatgaatggctgcgacatggggcccgacggacgcctcctccgcgggtatcaccagcacgcgtacgacggcaaggattacatctccctgaacgaggacctgcgctcctggaccgcggcggacaccgtggctcagatcacccagcgcttctatgaggcagaggaatatgcagaggagttcaggacctacctggagggcgagtgcctggagttgctccgcagatacttggagaatgggaaggagacgctacagcgcgcagatcctccaaaggcacacgttgcccaccaccccatctctgaccatgaggccaccctgaggtgctgggccctgggcttctaccctgcggagatcacgctgacctggcagcgggatggggaggaacagacccaggacacagagcttgtggagaccaggcctgcaggggatggaaccttccagaagtgggccgctgtggtggtgcctcctggagaggaacagagatacacatgccatgtgcagcacgaggggctgccccagcccctcatcctgagatgggagcagtctccccagcccaccatccccatcgtgggcatcgttgctggccttgttgtccttggagctgtggtcactggagctgtggtcgctgctgtgatgtggaggaagaagagctcagatagaaacagagggagctactctcaggctgcagtgtgagacagcttccttgtgtgggactgagaagcaagatatcaatgtagcagaattgcacttgtgcctcacgaacatacataaattttaaaaataaagaataaaaatatatctttttatagataaaaaaaaaaaaaaaaaa

SEQ ID NO: 200607 - protein, 410 aa, Artificial Sequence
  derived and/or modified sequence
MSARKGYLLPSPNYPTTMSCSESPAANSFLVDSLISSGRGEAGGGGGGAGGGGGGGYYAHGGVYLPPAADLPYGLQSCGLFPTLGGKRNEAASPGSGGGGGGLGPGAHGYGPSPIDLWLDAPRSCRMEPPDGPPPPPQQQPPPPPQPPQPAPQATSCSFAQNIKEESSYCLYDSADKCPKVSATAAELAPFPRGPPPDGCALGTSSGVPVPGYFRLSQAYGTAKGYGSGGGGAQQLGAGPFPAQPPGRGFDLPPALASGSADAARKERALDSPPPPTLACGSGGGSQGDEEAHASSSAAEELSPAPSESSKASPEKDSLGNSKGENAANWLTAKSGRKKRCPYTKHQTLELEKEFLFNMYLTRERRLEISRSVHLTDRQVKIWFQNRRMKLKKMNRENRIRELTANFNFS

SEQ ID NO: 200608 - protein, 202 aa, Artificial Sequence
  derived and/or modified sequence
MSCSESPAANSFLVDSLISSGRGEAGGGGGGAGGGGGGGYYAHGGVYLPPAADLPYGLQSCGLFPTLGGKRNEAASPGSGGGGGGLGPGAHGYGPSPIDLWLDAPRSCRRRAATRGWPVPRAAPGARFRSPARASLRLGRCGPEGASPRFAAAPHAGLRQRRGLAGRRGGARVVLGRGGALPGPFREQQSLAGEGFPGQFQR

SEQ ID NO: 200609 - protein, 94 aa, Artificial Sequence
  derived and/or modified sequence
MCQGNSKGENAANWLTAKSGRKKRCPYTKHQTLELEKEFLFNMYLTRERRLEISRSVHLTDRQVKIWFQNRRMKLKKMNRENRIRELTANFNFS

SEQ ID NO: 200610 - DNA, 2648 bp, Artificial Sequence
  derived and/or modified sequence
taatcgtattcagcatgttttgcacaagaaatgtcagccagaaagggctatctgctcccttcgccaaattatcccacaacaatgtcatgctcggagagccccgccgcgaactcttttttggtcgactcgctcatcagctcgggcagaggcgaggcaggcggcggtggtggtggcgcggggggcggcggcggtggcggttactacgcccacggcggggtctacctgccgcccgccgccgacctgccctacgggctgcagagctgcgggctcttccccacgctgggcggcaagcgcaatgaggcagcgtcgccgggcagcggtggcggtggcgggggtctaggtcccggggcgcacggctacgggccctcgcccatagacctgtggctagacgcgccccggtcttgccggatggagccgcctgacgggccgccgccgccgccccagcagcagccgccgcccccgccgcaaccaccccagccagcgccgcaggccacctcgtgctctttcgcgcagaacatcaaagaagagagctcctactgcctctacgactcggcggacaaatgccccaaagtctcggccaccgccgccgaactggctcccttcccgcggggcccgccgcccgacggctgcgccctgggcacctccagcggggtgccagtgcctggctacttccgcctttctcaggcctacggcaccgccaagggctatggcagcggcggcggcggcgcgcagcaactcggggctggcccgttccccgcgcagcccccggggcgcggtttcgatctcccgcccgcgctagcctccggctcggccgatgcggcccggaaggagcgagccctcgattcgccgccgccccccacgctggcttgcggcagcggcgggggctcgcagggcgacgaggaggcgcacgcgtcgtcctcggccgcggaggagctctccccggccccttccgagagcagcaaagcctcgccggagaaggattccctgggcaattccaaaggtgaaaacgcagccaactggctcacggcaaagagtggtcggaagaagcgctgcccctacacgaagcaccagacactggagctggagaaggagtttctgttcaatatgtaccttactcgagagcggcgcctagagattagccgcagcgtccacctcacggacagacaagtgaaaatctggtttcagaaccgcaggatgaaactgaagaaaatgaatcgagaaaaccggatccgggagctcacagccaactttaatttttcctgatgaatctccaggcgacgcggttttttcacttcccgagcgctggtcccctccctctgtcttcaggctctgcccaggaactcgcacctgtgctggagccctgttcctccctcccacactcgccatctcctgggccgttacatctgtgcagggctggtttgttctgactttttgtttctttgtgtttgcttggtgctggtttatttgttgttttctgggggaaaaagccatatcatgctaaaattctatagagatagatattgtcctaagtgtcaagtcctgactgggctgggtttgctgtcttggggtcccactgctcgaaatggcccctgtcttcggccgagctggtttcctgcccagcctggggcaaacctagccggaaggccgaggtcccattgttggcgctgaggtgtctggcctgaggtcaatggtgcaaaggagccgccaccgggcatgtctgcctggagtgctgtgctgtgtttaatcaggggatacaggcccctgggtttcttttttctttcttcctttcttccttggccaagagaagggcttacaggcatggacatgcaggttggcaaacgggcttgactttggctgatttaaaaagtgagaaagaaagtaaaaaaggttaatttttccttcctctgtaagatatcccagctttaaaaagaaaaaaaaagaattaccaagagaaggggacttctcttccagtttctgtaaggtcttacattgcctgactaaaatgtttcatttacctctaaatttccatatccttctggctgtagataaataatgtagttttgtttatgcatttggaattagtggatttttttgtcattaaaattgttaccactggtaacatgtgacaagcacaccacaattctccctatcttgtgaagttgtttttttaaatcgccttgaacaaaaagttttttttttgtttgtttttgctttctgaaattcacagaagcctaggaggactggggtaagcggaataaactagagaagggagacattgtttggatttcctttatactgtgaagttacatgcataaaagggtcaaacctgtagatgcagaaaaagaaaaaaactataaatacaaatctgtataaatgtctattattatgaagaattgccaatcttgttttaagcaaatgcattctatcgttattataaatgttagttctagctctatttacttctaatcttaaatcagaataaattaatattgtattgctgctgtgcgtggaaaaagacgatgtttatgttcttatagaataaaagctgtggaatgaagctttttaattttaaaaaaaaaaaaaaaaaaaaaaaaaaaaaaaaaaaaaaaaaaaaaaaaaaaaaaaaaaaaaaaaaaaaaaaaaaaaaa

SEQ ID NO: 200611 - DNA, 429 bp, Artificial Sequence
  derived and/or modified sequence
atgaatataaatccctgtctcgttttgtgcgagtgcagcctgtccatttcgctggatgctgacccacttgtgtctcctttcgcaaccggtccctgtccaggagcacccagggaagtggtcgccatgcagtccgatgtggggcagggtttccccatgcagtcaaactggcgcgcaccagtgcacgcatgtactagcggggctgtccgtaaaggctggcctgggtgcggacgcaggagacataaaatgggcggagggcctgtgtcctgggagcagcgacagaaagaggttgaagctgcccaagggtcagaagaaaggggccctggcagtttggctgtctctctgttgtccctggctgtggggatccatcgtatatctcccatccttgggtttcacatttgttgtatgcaggtgttgatggtgctcaagtag

SEQ ID NO: 200612 - DNA, 1233 bp, Artificial Sequence
  derived and/or modified sequence
atgagtgctcggaaaggctacctgctccctagtcctaactatcccactacaatgtcatgtagcgagtcccctgcggctaactctttccttgtagattctctgattagcagcggacggggggaagctggtggggggggtggcggggcaggaggcggtggtggcggtggatattatgcacacggaggcgtatatctcccaccggcagccgacctcccttatggtttacaatcatgcggactatttcccactctcggaggcaaacggaatgaggccgcttcacctggcagcggcggtggcggtgggggcctggggcccggtgcccatggctatggtccaagtccaatagatctgtggcttgacgccccaaggagttgtcggatggagccacccgacgggccacctccacccccgcaacaacaaccacccccaccccctcagcccccacaacccgctcctcaggccactagttgctccttcgcccagaacatcaaggaagaatcatcctattgtttgtatgactcggccgataagtgcccaaaggtttcagccacagctgccgagttagcaccatttcctcggggtccaccacctgatggctgtgcgctaggcacatctagtggtgtgcccgtgcccggatatttccgactctctcaagcgtatggaaccgctaaaggctatggatccgggggagggggcgcgcagcaattgggagctgggcccttccccgctcaacctcctggccgtggtttcgacctcccacctgcccttgcttccggcagtgctgacgctgctcgcaaggagcgagcacttgactcccccccccctccaactttagcctgcggtagcggtggaggtagccagggggacgaggaggctcatgccagctctagcgcggctgaggaactctcccctgccccatccgagtcttccaaggccagccccgaaaaggattccctgggcaacagtaagggggagaacgcagccaactggctaacggcaaagtcgggcaggaaaaagcggtgtccttacacaaagcaccagactcttgagctggagaaagagtttctgtttaacatgtacttgaccagagagagacgactcgagatttccagatctgtacacctgacagatcggcaggtgaagatctggttccaaaatcgccgtatgaaactcaagaaaatgaatagggaaaatcgcattagagagctgaccgcaaattttaacttcagctag

SEQ ID NO: 200613 - DNA, 609 bp, Artificial Sequence
  derived and/or modified sequence
atgtcgtgcagcgagagcccggccgctaatagctttctggtggactcccttattagctctgggcggggggaagcaggagggggaggcggtggagcagggggggggggcgggggagggtactacgcacatggaggggtttacctgcctccagccgcagatctgccgtacggtctgcagtcatgcggccttttccccactctcggtggcaaacggaatgaggcggccagtcctggaagcggcgggggtggaggaggcctcgggccgggtgctcacggctacggacctagcccgatagatctgtggctggatgccccacgatcatgtagacgacgcgccgcaacgagaggttggcccgtgcctagggctgctcccggagcaagatttaggagcccagccagggccagcttaagacttgggcgctgtggccccgagggggcatcgccaaggttcgccgcggccccacacgccgggctccggcaacgccgtggcctagcaggcagaaggggcggcgccagagtcgtgttgggaagagggggggccttgcctggcccatttagagagcaacagagccttgccggagagggtttcccaggccagtttcagcgatag

SEQ ID NO: 200614 - DNA, 285 bp, Artificial Sequence
  derived and/or modified sequence
atgtgccaggggaatagcaaaggcgaaaatgcggccaactggctgaccgccaaatcagggcgtaagaagcgttgcccctacacaaagcatcagacactggagctcgagaaggagtttttgtttaatatgtacttaacgcgcgagcgccgtctcgagatctcaagaagcgtgcatctgactgacagacaggtcaaaatctggttccaaaaccgaaggatgaaactgaaaaagatgaaccgtgagaataggatcagggagctgaccgccaatttcaactttagttag

SEQ ID NO: 200615 - DNA, 2541 bp, Artificial Sequence
  derived and/or modified sequence
atgtcagccagaaagggctatctgctcccttcgccaaattatcccacaacaatgtcatgctcggagagccccgccgcgaactcttttttggtcgactcgctcatcagctcgggcagaggcgaggcaggcggcggtggtggtggcgcggggggcggcggcggtggcggttactacgcccacggcggggtctacctgccgcccgccgccgacctgccctacgggctgcagagctgcgggctcttccccacgctgggcggcaagcgcaatgaggcagcgtcgccgggcagcggtggcggtggcgggggtctaggtcccggggcgcacggctacgggccctcgcccatagacctgtggctagacgcgccccggtcttgccggatggagccgcctgacgggccgccgccgccgccccagcagcagccgccgcccccgccgcaaccaccccagccagcgccgcaggccacctcgtgctctttcgcgcagaacatcaaagaagagagctcctactgcctctacgactcggcggacaaatgccccaaagtctcggccaccgccgccgaactggctcccttcccgcggggcccgccgcccgacggctgcgccctgggcacctccagcggggtgccagtgcctggctacttccgcctttctcaggcctacggcaccgccaagggctatggcagcggcggcggcggcgcgcagcaactcggggctggcccgttccccgcgcagcccccggggcgcggtttcgatctcccgcccgcgctagcctccggctcggccgatgcggcccggaaggagcgagccctcgattcgccgccgccccccacgctggcttgcggcagcggcgggggctcgcagggcgacgaggaggcgcacgcgtcgtcctcggccgcggaggagctctccccggccccttccgagagcagcaaagcctcgccggagaaggattccctgggcaattccaaaggtgaaaacgcagccaactggctcacggcaaagagtggtcggaagaagcgctgcccctacacgaagcaccagacactggagctggagaaggagtttctgttcaatatgtaccttactcgagagcggcgcctagagattagccgcagcgtccacctcacggacagacaagtgaaaatctggtttcagaaccgcaggatgaaactgaagaaaatgaatcgagaaaaccggatccgggagctcacagccaactttaatttttcctgatgaatctccaggcgacgcggttttttcacttcccgagcgctggtcccctccctctgtcttcaggctctgcccaggaactcgcacctgtgctggagccctgttcctccctcccacactcgccatctcctgggccgttacatctgtgcagggctggtttgttctgactttttgtttctttgtgtttgcttggtgctggtttatttgttgttttctgggggaaaaagccatatcatgctaaaattctatagagatagatattgtcctaagtgtcaagtcctgactgggctgggtttgctgtcttggggtcccactgctcgaaatggcccctgtcttcggccgagctggtttcctgcccagcctggggcaaacctagccggaaggccgaggtcccattgttggcgctgaggtgtctggcctgaggtcaatggtgcaaaggagccgccaccgggcatgtctgcctggagtgctgtgctgtgtttaatcaggggatacaggcccctgggtttcttttttctttcttcctttcttccttggccaagagaagggcttacaggcatggacatgcaggttggcaaacgggcttgactttggctgatttaaaaagtgagaaagaaagtaaaaaaggttaatttttccttcctctgtaagatatcccagctttaaaaagaaaaaaaaagaattaccaagagaaggggacttctcttccagtttctgtaaggtcttacattgcctgactaaaatgtttcatttacctctaaatttccatatccttctggctgtagataaataatgtagttttgtttatgcatttggaattagtggatttttttgtcattaaaattgttaccactggtaacatgtgacaagcacaccacaattctccctatcttgtgaagttgtttttttaaatcgccttgaacaaaaagttttttttttgtttgtttttgctttctgaaattcacagaagcctaggaggactggggtaagcggaataaactagagaagggagacattgtttggatttcctttatactgtgaagttacatgcataaaagggtcaaacctgtagatgcagaaaaagaaaaaaactataaatacaaatctgtataaatgtctattattatgaagaattgccaatcttgttttaagcaaatgcattctatcgttattataaatgttagttctagctctatttacttctaatcttaaatcagaataaattaatattgtattgctgctgtgcgtggaaaaagacgatgtttatgttcttatagaataaaagctgtggaatgaagctttttaatttta

SEQ ID NO: 200616 - DNA, 1569 bp, Artificial Sequence
  derived and/or modified sequence
aaagggctatctgctcccttcgccaaattatcccacaacaatgtcatgctcggagagccccgccgcgaactcttttttggtcgactcgctcatcagctcgggcagaggcgaggcaggcggcggtggtggtggcgcggggggcggcggcggtggcggttactacgcccacggcggggtctacctgccgcccgccgccgacctgccctacgggctgcagagctgcgggctcttccccacgctgggcggcaagcgcaatgaggcagcgtcgccgggcagcggtggcggtggcgggggtctaggtcccggggcgcacggctacgggccctcgcccatagacctgtggctagacgcgccccggtcttgccggcggcgcgcagcaactcggggctggcccgttccccgcgcagcccccggggcgcggtttcgatctcccgcccgcgctagcctccggctcggccgatgcggcccggaaggagcgagccctcgattcgccgccgccccccacgctggcttgcggcagcggcgggggctcgcagggcgacgaggaggcgcacgcgtcgtcctcggccgcggaggagctctccccggccccttccgagagcagcaaagcctcgccggagaaggattccctgggcaattccaaaggtgaaaacgcagccaactggctcacggcaaagagtggtcggaagaagcgctgcccctacacgaagcaccagacactggagctggagaaggagtttctgttcaatatgtaccttactcgagagcggcgcctagagattagccgcagcgtccacctcacggacagacaagtgaaaatctggtttcagaaccgcaggatgaaactgaagaaaatgaatcgagaaaaccggatccgggagctcacagccaactttaatttttcctgatgaatctccaggcgacgcggttttttcacttcccgagcgctggtcccctccctctgtcttcaggctctgcccaggaactcgcacctgtgctggagccctgttcctccctcccacactcgccatctcctgggccgttacatctgtgcagggctggtttgttctgactttttgtttctttgtgtttgcttggtgctggtttatttgttgttttctgggggaaaaagccatatcatgctaaaattctatagagatagatattgtcctaagtgtcaagtcctgactgggctgggtttgctgtcttggggtcccactgctcgaaatggcccctgtcttcggccgagctggtttcctgcccagcctggggcaaacctagccggaaggccgaggtcccattgttggcgctgaggtgtctggcctgaggtcaatggtgcaaaggagccgccaccgggcatgtctgcctggagtgctgtgctgtgtttaatcaggggatacaggcccctgggtttcttttttctttcttcctttcttccttggccaagagaagggcttacaggcatggacatgcaggttggcaaacgggcttgactttggctgatttaaaaagtgagaaagaaagtaaaaaaggttaatttttccttcctctgtaagatatcccagcttt

SEQ ID NO: 200617 - DNA, 1570 bp, Artificial Sequence
  derived and/or modified sequence
aaccaaagtctctcaagttgctagagagagtctagccaggaggactgctcgcgggcgggcggcgggcgggcgcgggtttgatttctgagccctataaaagcccatcctccgatggctgtgacaatgtggtcgtaaacccgtccggggccggccaatttgcatatttggaatgcgccgctataaacccggctggggttttgcagcgatttcttagatgtaaaaatgagatctcaatagcagcgggctgggcacatcctctcctctctccttctctctctgcccggagctggtttccgtctctcggctcggggctggaactccggcccaacctaggcgcgcagccgccacgagatggcgcacttccgatcaatgtcaaagccgccggggagccgggaaccccagcatgattcttggcctttgttcgcttctgatactaagagcagcacggtacattatttcacttgtcccgctccccttcataacagaaaaaggggactcaccctcaagaagtgattggtatggtaatttaaagcaacgcgcattcgctaggcctcgcgagcgtcgccgcgcggagaagccagctgtcccttggcagtgatttcggaaatgtgtcaaggcaattccaaaggtgaaaacgcagccaactggctcacggcaaagagtggtcggaagaagcgctgcccctacacgaagcaccagacactggagctggagaaggagtttctgttcaatatgtaccttactcgagagcggcgcctagagattagccgcagcgtccacctcacggacagacaagtgaaaatctggtttcagaaccgcaggatgaaactgaagaaaatgaatcgagaaaaccggatccgggagctcacagccaactttaatttttcctgatgaatctccaggcgacgcggttttttcacttcccgagcgctggtcccctccctctgtcttcaggctctgcccaggaactcgcacctgtgctggagccctgttcctccctcccacactcgccatctcctgggccgttacatctgtgcagggctggtttgttctgactttttgtttctttgtgtttgcttggtgctggtttatttgttgttttctgggggaaaaagccatatcatgctaaaattctatagagatagatattgtcctaagtgtcaagtcctgactgggctgggtttgctgtcttggggtcccactgctcgaaatggcccctgtcttcggccgagctggtttcctgcccagcctggggcaaacctagccggaaggccgaggtcccattgttggcgctgaggtgtctggcctgaggtcaatggtgcaaaggagccgccaccgggcatgtctgcctggagtgctgtgctgtgtttaatcaggggatacaggcccctgggtttcttttttctttcttcctttcttccttggccaagagaagggcttacaggcatggacatgcaggttggcaaacgggcttgactttggctgatttaaaaagtgagaaagaaagtaaaaaaggttaatttttccttcctctgtaagatatcccagctttaaaaagaaaaaaaaagaa

SEQ ID NO: 200618 - DNA, 1233 bp, Artificial Sequence
  derived and/or modified sequence
atgtctgccaggaagggctacctgctgcccagccccaactaccccaccaccatgagctgcagcgagagccctgctgccaacagcttcctggtggacagcctcatcagcagcggccgcggggaggccggcggcggcggcggcggggccggcggcggcggcggcggcggctactatgcccacggcggcgtgtacctgcccccagctgctgacctgccctacggcctgcagagctgtggcctcttccccaccctgggcggcaagagaaatgaagctgccagccctggcagcggcggcggcggcggcggcctgggccctggggcccacggctacggccccagccccatcgacctgtggctggatgcccccaggagctgcaggatggagcccccagatggccccccacctccaccccagcagcagcccccacctccaccccagcccccccagcctgccccccaggccaccagctgcagctttgcccagaacatcaaggaggagagcagctactgcctgtatgacagcgctgacaagtgccccaaggtgtctgccacagctgctgagctggcccccttcccccggggccccccaccagatggctgtgccctgggcaccagcagcggcgtgcctgtgcccggctacttccggctgagccaggcctacggcacagccaagggctacggcagcggcggcggcggggcccagcagctgggcgccggccccttccctgcccagcccccaggccggggctttgacctgcccccagccctggccagcggcagcgcagatgctgccaggaaggagcgggccctggacagccccccaccacccaccctggcctgtggcagcggcggcggcagccagggagatgaggaggcccacgccagcagcagcgctgctgaggagctgagccctgcccccagcgagagcagcaaggccagccctgagaaggacagcctgggcaacagcaaaggagaaaatgctgccaactggctgacagccaagagcggcaggaagaagcgctgcccctacaccaagcaccagaccctggagctggagaaggagttcctgttcaacatgtacctgacccgggagcggcggctggagatcagccgctctgtgcacctgacagaccggcaggtgaagatctggttccagaacagaaggatgaagctgaagaagatgaacagagaaaatcgcatccgggagctgacagccaacttcaacttctcctag

SEQ ID NO: 200619 - DNA, 609 bp, Artificial Sequence
  derived and/or modified sequence
atgagctgcagcgagagccctgctgccaacagcttcctggtggacagcctcatcagcagcggccgcggggaggccggcggcggcggcggcggggccggcggcggcggcggcggcggctactatgcccatggaggagtgtacctgcccccagctgctgacctgccctacggcctgcagagctgtggcctcttccccaccctgggcggcaagagaaatgaggccgccagccctggcagcggcggcggcggcggcggcctgggccctggggcccacggctacggccccagccccatcgacctgtggctggatgcccccaggagctgcagaagaagagctgccacccggggctggcctgtgccccgggccgcccctggggcccgcttccgcagccctgcccgggccagcctgcggctgggccgctgtggccctgagggcgccagccccaggtttgctgctgcccctcatgctggcctgcggcagaggcggggcctggccggcagaagaggaggagcccgggtggtgctgggccggggcggggccctgcccggccccttccgggagcagcagagcctggccggggagggcttccctggccagttccagaggtag

SEQ ID NO: 200620 - DNA, 285 bp, Artificial Sequence
  derived and/or modified sequence
atgtgccagggcaacagcaaaggagaaaatgctgccaactggctgacagccaagagcggcaggaagaagcgctgcccctacaccaagcaccagaccctggagctggagaaggagttcctgttcaacatgtacctgacccgggagcggcggctggagatcagccgctctgtgcacctgacagaccggcaggtgaagatctggttccagaacagaaggatgaagctgaagaagatgaacagagaaaatcgcatccgggagctgacagccaacttcaacttctcctag

SEQ ID NO: 200621 - DNA, 1233 bp, Artificial Sequence
  derived and/or modified sequence
atgagcgcccggaagggctacctgctgcccagccccaactaccccactacaatgtcctgctccgaatctccagctgcgaatagcttcctggtcgacagcctgatctcttcaggcagaggagaggctggcggaggcggcggcggcgcgggcgggggaggaggcggcggctattacgctcacggaggtgtctatcttcccccggctgcagaccttccgtacggcctgcagtcttgtggtctgtttccaacacttggtggaaagcggaacgaagccgccagccccggcagcgggggcggtggggggggactaggtcccggcgcccacggatacggtccaagtcccatcgacttgtggctagacgcccctcgctcgtgcaggatggaaccccctgacgggcctccgcccccaccccagcagcagccacctccccccccccagcccccccagccagcaccccaggccacttcttgctcttttgctcagaacattaaggaggagtcaagttactgtctgtacgatagcgccgacaagtgccccaaggtcagcgccactgcagcagagctcgctcccttcccacggggccccccccctgacgggtgcgccttgggaactagctccggcgttcccgtgcctggatattttaggctgtcccaggcatacggcactgcaaaaggttatggatccggcgggggtggcgctcaacagctgggggccggaccttttccggcccagccacccggccgcggctttgatctcccaccagcacttgcaagcggatccgctgacgctgcccggaaagaaagagctttagattccccgcctcccccaacactcgcttgcggatcgggtggaggttcccagggggatgaggaggcacacgcttcttctagcgcagccgaagagctgtcccctgccccttcagaatccagtaaagcatccccagagaaggactctctgggaaattcgaagggtgagaacgctgctaactggctcaccgcgaaaagtggtcgcaaaaagaggtgcccctataccaagcaccaaaccctggaattggagaaggaattcctgtttaatatgtatctgacccgcgaacggcggctggaaattagcaggagcgtccacctcaccgatcgacaagtgaaaatctggttccagaatcgccgcatgaagcttaagaaaatgaatagggaaaacaggattagagaactgaccgctaacttcaacttctcttag

SEQ ID NO: 200622 - DNA, 609 bp, Artificial Sequence
  derived and/or modified sequence
atgagctgcagcgagagccccgccgccaacagcttcctggtggactcactcatatctagcggtcgtggggaggccggaggggggggcgggggcgccgggggaggcggaggtggggggtactatgctcatggaggtgtgtatctgcccccggcggccgaccttccatatggcctgcaaagctgcggcctgtttcccacattaggcggcaaaaggaacgaggcagcttcccccggaagcgggggaggtgggggcggtctaggaccaggcgcacacggctacggaccaagcccaatcgacctgtggttggatgccccccgaagctgccgaaggagagccgcaacaaggggctggccggtacccagagctgcacctggggcccgctttagaagtccagctagggcctccctgcggcttgggcggtgtggacccgagggcgcgtcacctcggtttgctgcggctccccatgccgggttacggcagagacgcggacttgctggcagacgcggcggcgctagggttgtgttaggccgtgggggtgctctgcccggaccatttagagagcagcagtccctcgccggagaaggctttccaggccagttccagcggtag

SEQ ID NO: 200623 - DNA, 285 bp, Artificial Sequence
  derived and/or modified sequence
atgtgccagggcaacagcaagggcgagaacgccgccaactggctgactgcaaagtccggaagaaaaaaaagatgtccctatactaagcaccagactttggaactcgaaaaggaattcctgttcaacatgtacttgactcgggaacggagactagagatctcgcggagtgtccacctgacagaccggcaagtcaagatttggttccagaatcggcgtatgaaactgaaaaaaatgaacagggaaaacaggatcagggagctcacagccaattttaatttttcgtag

SEQ ID NO: 200624 - DNA, 1233 bp, Artificial Sequence
  derived and/or modified sequence
atgtctgccaggaaaggctatttactcccatccccaaattatccgacgacgatgagctgcagcgagtcgcctgctgcgaattcatttttagtggactctctgatttcgagtggcaggggggaagccggaggaggcggaggaggtgctggaggcggtggtggagggggttattacgctcacgggggagtgtatttacccccagcagccgatttaccgtatgggctgcaatcttgcggcttattcccgacattgggaggcaaacggaatgaggcagcctctcctggatctgggggagggggaggcggactgggtcccggagctcacggttatgggccatcacctatagatctatggctcgatgccccaagaagctgtcgtatggagccacccgacggccctccgccacctccccagcagcaaccccctcccccacctcagccgcctcagcccgctccacaggctactagctgcagctttgcccaaaatatcaaggaggagtcctcctattgtttgtacgattcagccgacaaatgccctaaggtgtcagcaaccgcagccgagttagcccctttccctagagggccaccacctgatggctgtgctttgggcacgtctagtggagtgcctgttcctgggtatttccggctgagccaggcatatggcacggcaaagggatacggtagtggaggtggtggagcccaacagttgggggctggcccatttcctgcacagccacccggacgcggttttgatctgcccccagccctggcgagcggatccgccgacgccgctagaaaagagagggcacttgacagccctcccccacctaccttagcctgtggatccggaggagggagtcagggagacgaagaggctcatgcatcatctagcgctgcagaggagttgtcacctgctccctctgaaagttctaaagcaagcccagagaaggattctttgggaaattccaagggagaaaacgccgcaaactggctcaccgcgaaaagtggtcgtaaaaagagatgcccgtacactaaacatcagacactggaattggagaaggaattcctcttcaatatgtatttgacacgggaacgacgtctcgaaatatctcgctccgtgcacctgactgaccgccaggtgaaaatctggttccagaaccgccgtatgaagctcaaaaagatgaatagagagaatcgaatcagggagctgacagctaatttcaatttcagctag

SEQ ID NO: 200625 - DNA, 609 bp, Artificial Sequence
  derived and/or modified sequence
atgtcttgtagcgaatcccctgccgcaaactcatttctggtagattcactgatctcaagcggcagaggtgaggctggtgggggagggggaggtgccggaggcggaggaggcggtggatattacgcccacggtggggtctacctgcctcccgctgccgatctgccttacggtctgcagagctgtgggcttttccctacgcttggtggtaagcgtaacgaagcagcctctccaggttccggaggcggagggggtggcctcggtcctggtgctcatggctatgggccaagtccaatagatctctggctagacgctccacgatcatgccggcgtagggctgctactcggggatggcctgtgcctagagccgctcctggcgctcgcttccggtcacctgcacgggcaagcctgcgcctcggacggtgtggtcctgagggggcatcccctcggttcgccgctgctccacatgcaggcctgaggcagcgaaggggcttagccggaagaagaggaggcgcaagggtggtcttaggccgaggtggggcactcccaggtcctttccgcgagcagcagtctctcgctggagaggggttccctggccaattccaacggtag

SEQ ID NO: 200626 - DNA, 285 bp, Artificial Sequence
  derived and/or modified sequence
atgtgtcagggaaactccaaaggcgaaaatgcagcgaattggctcacagcaaaatctggcagaaaaaagcggtgtccatatactaaacaccaaactctagagctggagaaggaatttcttttcaacatgtacctgaccagggagcggagacttgagatcagccggagtgtccacctgactgatcgtcaggtcaaaatctggttccaaaatagacggatgaagctgaagaagatgaaccgcgaaaaccggatcagggaattaacggcaaattttaatttttcttag

SEQ ID NO: 200627 - DNA, 1233 bp, Artificial Sequence
  derived and/or modified sequence
atgagcgccagaaagggctacctgctgcccagccccaactaccccaccaccatgagctgcagcgagagccccgccgccaacagcttcctggtggacagcctgatcagcagcggcagaggcgaggccggcggcggcggcggcggcgccggcggcggcggcggcggcggctactacgcccacggcggcgtgtacctgccccccgccgccgacctgccctacggcctgcagagctgcggcctgttccccaccctgggcggcaagagaaacgaggccgccagccccggcagcggcggcggcggcggcggcctgggccccggcgcccacggctacggccccagccccatcgacctgtggctggacgcccccagaagctgcagaatggagccccccgacggcccccccccccccccccagcagcagccccccccccccccccagcccccccagcccgccccccaggccaccagctgcagcttcgcccagaacatcaaggaggagagcagctactgcctgtacgacagcgccgacaagtgccccaaggtgagcgccaccgccgccgagctggcccccttccccagaggccccccccccgacggctgcgccctgggcaccagcagcggcgtgcccgtgcccggctacttcagactgagccaggcctacggcaccgccaagggctacggcagcggcggcggcggcgcccagcagctgggcgccggccccttccccgcccagccccccggcagaggcttcgacctgccccccgccctggccagcggcagcgccgacgccgccagaaaggagagagccctggacagcccccccccccccaccctggcctgcggcagcggcggcggcagccagggcgacgaggaggcccacgccagcagcagcgccgccgaggagctgagccccgcccccagcgagagcagcaaggccagccccgagaaggacagcctgggcaacagcaagggcgagaacgccgccaactggctgaccgccaagagcggcagaaagaagagatgcccctacaccaagcaccagaccctggagctggagaaggagttcctgttcaacatgtacctgaccagagagagaagactggagatcagcagaagcgtgcacctgaccgacagacaggtgaagatctggttccagaacagaagaatgaagctgaagaagatgaacagagagaacagaatcagagagctgaccgccaacttcaacttcagctag

SEQ ID NO: 200628 - DNA, 609 bp, Artificial Sequence
  derived and/or modified sequence
atgagctgcagcgagagccccgccgccaacagcttcctggtggacagcctgatcagcagcggcagaggcgaggccggcggcggcggcggcggcgccggcggcggcggcggcggcggctactacgcccacggcggcgtgtacctgccccccgccgccgacctgccctacggcctgcagagctgcggcctgttccccaccctgggcggcaagagaaacgaggccgccagccccggcagcggcggcggcggcggcggcctgggccccggcgcccacggctacggccccagccccatcgacctgtggctggacgcccccagaagctgcagaagaagagccgccaccagaggctggcccgtgcccagagccgcccccggcgccagattcagaagccccgccagagccagcctgagactgggcagatgcggccccgagggcgccagccccagattcgccgccgccccccacgccggcctgagacagagaagaggcctggccggcagaagaggcggcgccagagtggtgctgggcagaggcggcgccctgcccggccccttcagagagcagcagagcctggccggcgagggcttccccggccagttccagagatag

SEQ ID NO: 200629 - DNA, 285 bp, Artificial Sequence
  derived and/or modified sequence
atgtgccagggcaacagcaagggcgagaacgccgccaactggctgaccgccaagagcggcagaaagaagagatgcccctacaccaagcaccagaccctggagctggagaaggagttcctgttcaacatgtacctgaccagagagagaagactggagatcagcagaagcgtgcacctgaccgacagacaggtgaagatctggttccagaacagaagaatgaagctgaagaagatgaacagagagaacagaatcagagagctgaccgccaacttcaacttcagctag

SEQ ID NO: 200630 - protein, 222 aa, Artificial Sequence
  derived and/or modified sequence
MSSYVANSFYKQSPNIPAYNMQTCGNYGSASEVQASRYCYGGLDLSITFPPPAPSNSLHGVDMAANPRAHPDRPACSAAAAPGHAPGRDEAAPLNPGMYSQKAARPALEERAKSSGEIKEEQAQTGQPAGLSQPPAPPQIYPWMTKLHMSHETDGKRSRTSYTRYQTLELEKEFHFNRYLTRRRRIEIANNLCLNERQIKIWFQNRRMKWKKDSKMKSKEAL

SEQ ID NO: 200631 - DNA, 1613 bp, Artificial Sequence
  derived and/or modified sequence
acccctcaacttcaaagagtcacaaatcacccttaatcaaaaagggtgcagaaatttttttgggccctccccgccatgagctcctacgtagccaattcattctataagcagagccccaatatccctgcctataacatgcaaacttgtgggaactatggatcggcctcagaggtgcaggcatccaggtactgctacggcggattggacttaagcatcactttcccaccgcctgcgccttccaactctctccacggggtagacatggctgccaacccccgggctcaccccgaccgccccgcctgcagcgccgcggccgctccgggacacgctccgggcagagacgaagcggctcctctgaaccccgggatgtacagtcagaaggcggctcgcccggcgctggaggagcgagctaagagcagtggggagatcaaagaggagcaggcgcagacagggcagcccgccggactgagccagccaccggccccgccacagatttacccgtggatgaccaaactgcacatgagccacgagacggacggcaagcggtcccgaaccagttacacgcgctaccagactctggaactcgagaaagaattccactttaaccgctacctcactcgccgcaggcgcatagagatcgccaacaacttgtgtctcaatgagagacagatcaagatctggttccagaaccgcaggatgaagtggaagaaagattccaaaatgaaaagcaaagaggctctttagaggcagcgggggaggcccgcagagcgcgcccctagccggttcctgtccctgcgcctttccttttcgcctttcctctctatatttcgggtcgggggcaggtgctggagcactgggctcccgggccccacagacaaaagcgcttttccttggcattccgcatccctaccgacccagggttcccgcggggctgtcggcgctgccccatctcccctcagctcggctcagctcggtacccggggcccagggcaagctccgcaggacttccccggagggctgcggcgtacaggctggcgcagaacgaaccttggcctgggccgtatctccggctcccagcctcagcgcggccctcccgagttaaggtgggcccggcccgcgccacaggaccctcgccggaccctctaacctcgccctctcctttgttcccggctggacgggttagacagccaaaggctggcgagagtctggccctagactcggggtgcttccttgtagcgactaaactagattttcacttatgaatgatttgcatatgaaaggagagcatcggcctagggcccccacagttgctctatgctttccaaaccttatctccacaacctcttccccccaaaacccgggaacctccccagcctgcgcctgctgcatgccctctcaggccggcagccccagcctgctagctagctcaactagtggggtttcctggcactggaccccagcaagtggtcctagaggccctttgctgtcccatagtccctgccacgaatttctgtgccctcctgacccattgctgttgtccaactatttattgactctgggtccttcctgaaactatattttgtcatatcaaataaagagagaacaggactaaa

SEQ ID NO: 200632 - DNA, 669 bp, Artificial Sequence
  derived and/or modified sequence
atgagttcttatgtcgcgaatagtttctacaagcagtctcctaacattccagcgtataacatgcagacttgcggcaattacgggagtgctagcgaggttcaggcaagcaggtactgttatggtggattagatctatcaattacctttcccccccctgcgccctcaaattcattacacggcgtagacatggccgcaaatccgcgtgcgcacccagaccgtccggcctgcagcgctgcagcggcacctgggcacgctcccgggcgtgatgaagccgcacccttaaaccccggcatgtattcccagaaagctgcccggcctgcactggaagagagggccaagagctccggggaaatcaaagaggaacaagcccaaaccggtcaacccgctgggctgtcgcagccgccagcacctccacagatctatccatggatgactaagctccacatgtcgcacgagaccgatgggaagcggtctagaaccagttacactcggtaccagactcttgagctggagaaagaattccatttcaaccgatatctcactagacgccgccgcatagagatcgcaaacaatctgtgcttgaacgagcgccagataaagatctggtttcagaaccggcgcatgaaatggaagaaagactccaagatgaaaagtaaggaggccctatag

SEQ ID NO: 200633 - DNA, 1805 bp, Artificial Sequence
  derived and/or modified sequence
ggttgggctttgccaacatatcgagatgcttttcgccggcttccatcactaacctcccggaggtcatcaagccaaatttatgagtggccgctcgagtcacgtgactctatttaaggctcccttatttgggaagagcgcataggataaagaaagagatatctccacctataaattgtccactttggagaacaaaaaacccctcaacttcaaagagtcacaaatcacccttaatcaaaaagggtgcagaaatttttttgggccctccccgccatgagctcctacgtagccaattcattctataagcagagccccaatatccctgcctataacatgcaaacttgtgggaactatggatcggcctcagaggtgcaggcatccaggtactgctacggcggattggacttaagcatcactttcccaccgcctgcgccttccaactctctccacggggtagacatggctgccaacccccgggctcaccccgaccgccccgcctgcagcgccgcggccgctccgggacacgctccgggcagagacgaagcggctcctctgaaccccgggatgtacagtcagaaggcggctcgcccggcgctggaggagcgagctaagagcagtggggagatcaaagaggagcaggcgcagacagggcagcccgccggactgagccagccaccggccccgccacagatttacccgtggatgaccaaactgcacatgagccacgagacggacggcaagcggtcccgaaccagttacacgcgctaccagactctggaactcgagaaagaattccactttaaccgctacctcactcgccgcaggcgcatagagatcgccaacaacttgtgtctcaatgagagacagatcaagatctggttccagaaccgcaggatgaagtggaagaaagattccaaaatgaaaagcaaagaggctctttagaggcagcgggggaggcccgcagagcgcgcccctagccggttcctgtccctgcgcctttccttttcgcctttcctctctatatttcgggtcgggggcaggtgctggagcactgggctcccgggccccacagacaaaagcgcttttccttggcattccgcatccctaccgacccagggttcccgcggggctgtcggcgctgccccatctcccctcagctcggctcagctcggtacccggggcccagggcaagctccgcaggacttccccggagggctgcggcgtacaggctggcgcagaacgaaccttggcctgggccgtatctccggctcccagcctcagcgcggccctcccgagttaaggtgggcccggcccgcgccacaggaccctcgccggaccctctaacctcgccctctcctttgttcccggctggacgggttagacagccaaaggctggcgagagtctggccctagactcggggtgcttccttgtagcgactaaactagattttcacttatgaatgatttgcatatgaaaggagagcatcggcctagggcccccacagttgctctatgctttccaaaccttatctccacaacctcttccccccaaaacccgggaacctccccagcctgcgcctgctgcatgccctctcaggccggcagccccagcctgctagctagctcaactagtggggtttcctggcactggaccccagcaagtggtcctagaggccctttgctgtcccatagtccctgccacgaatttctgtgccctcctgacccattgctgttgtccaactatttattgactctgggtccttcctgaaactatattttgtcatatcaaataaagagagaacaggact

SEQ ID NO: 200634 - DNA, 669 bp, Artificial Sequence
  derived and/or modified sequence
atgagcagctatgtggccaacagcttctacaagcagagccccaacatcccagcctacaacatgcagacctgtggcaactacggcagcgccagcgaggtgcaggccagccgctactgctacggcggcctggacctgagcatcaccttccccccaccagcccccagcaacagcctgcatggagtggacatggccgccaacccccgggcccacccagacaggcctgcctgcagcgctgctgctgcccctggccacgcccctggaagagatgaagctgcccccctgaaccctggcatgtacagccagaaggccgcccggcctgccctggaggagcgggccaagagcagtggagagatcaaggaggagcaggcccagacaggccagcctgctggcctgagccagcccccagccccaccccagatctacccctggatgaccaagctgcacatgagccatgaaacagatggcaagaggagcaggaccagctacacccgctaccagaccctggagctggagaaggagttccacttcaaccgctacctgaccaggagaagacgcatcgagatcgccaacaacctgtgcctgaatgaaaggcagatcaagatctggttccagaacagaaggatgaagtggaagaaggacagcaagatgaagagcaaggaggccctgtag

SEQ ID NO: 200635 - DNA, 669 bp, Artificial Sequence
  derived and/or modified sequence
atgagcagctacgtggccaacagcttctacaagcagagccccaacatacctgcctataatatgcagacttgcggaaactacggttcggcctctgaggtccaagcttctcggtattgttacggcgggctagatctctcaattacgttcccgcctccagccccatctaattcgctgcatggcgtggacatggccgccaatccccgcgcccatccagaccgccctgcatgcagtgcagcggctgcaccgggtcacgcccccggtagggatgaggccgccccactgaacccgggaatgtactctcaaaaggctgcacggccagcactagaggagcgggcaaagagttcaggagaaattaaggaggaacaagcacaaacaggacagccagcaggtctctcccaaccaccggccccccctcagatctacccatggatgactaagctgcacatgtctcatgagacagatggcaagcgctcacgcactagttacacccggtaccaaaccctggagcttgaaaaggagttccacttcaatagatatctcacgagacggagaagaatagaaatcgccaacaacctgtgcctcaacgaacggcagataaagatttggttccagaaccgccgcatgaagtggaaaaaagacagcaagatgaagtcaaaagaagccttgtag

SEQ ID NO: 200636 - DNA, 669 bp, Artificial Sequence
  derived and/or modified sequence
atgtctagctatgttgccaactctttttacaaacagtcccctaatattcctgcatacaatatgcagacgtgcggaaactacggatctgcgtccgaagttcaggcctctaggtactgttatgggggtctcgatctgtcaattaccttcccaccacctgcccctagcaactccttacatggtgttgatatggccgcaaacccacgcgctcaccccgatcggcctgcatgttccgcagccgctgccccaggacacgcccctgggagggacgaggccgcacccctcaatcccggtatgtattcacagaaagcggctcggccagcgctggaggagcgtgccaaatcttctggagagattaaagaagaacaggcacagaccgggcaacccgctgggttgagtcaacccccagcaccaccacaaatctacccatggatgacaaaactacatatgagccatgagaccgacggcaaacggagccgcaccagttacacaagataccagacactggagctggaaaaagagtttcatttcaatcgctacctgactaggcgccgaagaattgaaatcgccaacaatttgtgtctaaacgagcgtcaaatcaagatttggttccaaaatagaagaatgaagtggaaaaaagatagcaaaatgaagagcaaggaagccctgtag

SEQ ID NO: 200637 - DNA, 669 bp, Artificial Sequence
  derived and/or modified sequence
atgagcagctacgtggccaacagcttctacaagcagagccccaacatccccgcctacaacatgcagacctgcggcaactacggcagcgccagcgaggtgcaggccagcagatactgctacggcggcctggacctgagcatcaccttccccccccccgcccccagcaacagcctgcacggcgtggacatggccgccaaccccagagcccaccccgacagacccgcctgcagcgccgccgccgcccccggccacgcccccggcagagacgaggccgcccccctgaaccccggcatgtacagccagaaggccgccagacccgccctggaggagagagccaagagcagcggcgagatcaaggaggagcaggcccagaccggccagcccgccggcctgagccagccccccgcccccccccagatctacccctggatgaccaagctgcacatgagccacgagaccgacggcaagagaagcagaaccagctacaccagataccagaccctggagctggagaaggagttccacttcaacagatacctgaccagaagaagaagaatcgagatcgccaacaacctgtgcctgaacgagagacagatcaagatctggttccagaacagaagaatgaagtggaagaaggacagcaagatgaagagcaaggaggccctgtag

SEQ ID NO: 200638 - protein, 168 aa, Artificial Sequence
  derived and/or modified sequence
MNEVKESLRSIEQKYKLFQQQQLTFTAALEHCRENAHDKIRPISSIGQVQSYMEHYCNSSTDRRVLLMFLDICSELNKLCQHFEAVHSGTPVTNNLLEKCKTLVSQSNDLSSLRAKYPHDVVNHLSCDEARNHYGGVVSLIPLILDLMKEWIAHSEKLPRKVLQHGTT

SEQ ID NO: 200639 - DNA, 507 bp, Artificial Sequence
  derived and/or modified sequence
atgaacgaggtgaaggagagcctgagaagcatcgagcagaagtacaagctgttccagcagcagcagctgaccttcaccgccgccctggagcactgcagagagaacgcccacgacaagatcagacccatcagcagcatcggccaggtgcagagctacatggagcactactgcaacagcagcaccgacagaagagtgctgctgatgttcctggacatctgcagcgagctgaacaagctgtgccagcacttcgaggccgtgcacagcggcacccccgtgaccaacaacctgctggagaagtgcaagaccctggtgagccagagcaacgacctgagcagcctgagagccaagtacccccacgacgtggtgaaccacctgagctgcgacgaggccagaaaccactacggcggcgtggtgagcctgatccccctgatcctggacctgatgaaggagtggatcgcccacagcgagaagctgcccagaaaggtgctgcagcacggcaccacctag

SEQ ID NO: 200640 - DNA, 894 bp, Artificial Sequence
  derived and/or modified sequence
ctcgcctcccaagtcctggaacgggcctccccaccctccggggcaccgacactcacggagtcactccaacttctctgggtgctccgtggagcgaagagcgctctaggacaagcaaggattcctcttctcctgtaaatgaccacagaggaagacaatgaatgaggtgaaagaatcccttcgcagcatcgagcagaagtacaagctcttccagcagcagcagctcaccttcaccgccgctctggagcactgcagggagaacgcccacgacaagatccggcccatctccagcattggacaggtgcagagctacatggaacactactgcaacagctccacagaccggcgggttctgctcatgttcctggacatctgttcagagctgaataagctctgccagcactttgaggccgtgcactctggcaccccagtcaccaacaacctcctggagaaatgcaaaaccctcgttagccaaagcaacgacttaagcagcctcagagcaaaataccctcatgatgtggtgaaccacctcagctgtgacgaggcccggaaccactacggcggcgtggtcagcctcatccccctcatcctagacttaatgaaagaatggatcgcccactccgagaagttgccgcgcaaggtgctgcagcacgggacgacttagcttctgtattattgttgcttcctcagggggagacagtcaagaataaaaagtattctaccacctctctgcctgacttggtttcctgggatttatccctgaaagaaaacctacatctcccctaagacatcaaaggacactgggcagtaagcctcagcagacagcagagagagaggccaccctaggcaagggggcatgcctgtctcaagtcggcttctaagaggctcatgcccaag

SEQ ID NO: 200641 - DNA, 507 bp, Artificial Sequence
  derived and/or modified sequence
atgaacgaggttaaagagagtctgagatctatcgagcaaaagtacaaacttttccagcagcagcagcttacctttactgcagccctggaacactgccgtgaaaatgctcatgataagattagacctatcagtagcatcggtcaggtacagtcatatatggaacactactgtaattcttcaacggacagacgcgtcctccttatgtttctggacatctgtagtgagttaaacaaactgtgccagcatttcgaagctgtgcacagtgggacacctgtgacaaataacctgctggaaaagtgcaaaacactcgtcagccaatctaacgatctgagctccctccgggccaaatatccccatgacgtggtcaaccatctctcatgcgacgaggccagaaatcactatggaggtgttgtgagcctcatacctcttatattggatctcatgaaggagtggatagcccacagtgagaaattgcccagaaaggtgctacagcacggaacaacctag

SEQ ID NO: 200642 - DNA, 507 bp, Artificial Sequence
  derived and/or modified sequence
atgaatgaggtgaaggagagcctgcggagcattgagcagaagtacaagctgttccagcagcagcagctgaccttcaccgctgccctggagcactgccgggagaatgcccatgacaagatccggcccatcagcagcatcggccaggtgcagagctacatggagcactactgcaacagcagcacagacagaagagtgctgctgatgttcctggacatctgcagcgagctgaacaagctgtgccagcactttgaagctgtgcacagcggcacccctgtgaccaacaacctgctggagaagtgcaagaccctggtgtcccagagcaatgacctgagcagcctgcgggccaagtacccccatgatgtggtgaaccacctgagctgtgatgaggccaggaaccactacggcggcgtggtgtccctcatccccctcatcctggacctgatgaaggagtggatcgcccacagcgagaagctgcccaggaaggtgctgcagcacggcaccacctag

SEQ ID NO: 200643 - DNA, 507 bp, Artificial Sequence
  derived and/or modified sequence
atgaacgaggtgaaggagagcctgcggagcatcgagcagaagtacaagcttttccagcaacagcagctaaccttcaccgccgctctagagcactgccgagaaaatgctcatgataagatacggcccatttctagcatagggcaggttcagagctatatggaacactactgcaattcttccactgatcgaagggtgcttctcatgttccttgacatatgctctgagctcaataagttgtgccaacattttgaagccgttcattccgggacacctgtaacaaataacctgctggagaaatgtaaaactctggtcagtcagtcaaacgatctgagctccctgagagcgaaatacccccacgacgtagttaaccatctaagctgtgacgaagctagaaaccattatggaggtgtggtctctttgatccccttgatcctcgatctgatgaaagaatggatagctcattcagagaagttaccccggaaggtgctgcagcacgggaccacatag

SEQ ID NO: 200644 - DNA, 507 bp, Artificial Sequence
  derived and/or modified sequence
atgaatgaggtgaaggagagtctcagaagtatcgagcagaagtataaattgtttcagcagcaacagttgactttcaccgcggcactggaacactgtcgcgagaatgctcacgacaagatcaggccaatctcatctattgggcaggtccagagttatatggaacattactgtaatagcagcaccgacaggcgggtgttgctgatgttccttgacatctgctcagagttgaataagctctgtcagcacttcgaggctgtgcactcagggacgcctgtcaccaataatcttttggaaaagtgcaagactcttgtgtcccagagcaatgaccttagttccctacgtgctaaatatccccacgatgttgtgaaccatctttcctgcgatgaagccagaaaccattacggtggcgtggtttcgctcattcctttaattctcgatctgatgaaagagtggattgcgcatagcgagaaactccctcgaaaggttctgcagcacggaacaacttag

SEQ ID NO: 200645 - protein, 452 aa, Artificial Sequence
  derived and/or modified sequence
MMKRQLHRMRQLAQTGSLGRTPETAEFLGEDLLQVEQRLEPAKRAAHNIHKRLQACLQGQSGADMDKRVKKLPLMALSTTMAESFKELDPDSSMGKALEMSCAIQNQLARILAEFEMTLERDVLQPLSRLSEEELPAILKHKKSLQKLVSDWNTLKSRLSQATKNSGSSQGLGGSPGSHSHTTMANKVETLKEEEEELKRKVEQCRDEYLADLYHFVTKEDSYANYFIRLLEIQADYHRRSLSSLDTALAELRENHGQADHSPSMTATHFPRVYGVSLATHLQELGREIALPIEACVMMLLSEGMKEEGLFRLAAGASVLKRLKQTMASDPHSLEEFCSDPHAVAGALKSYLRELPEPLMTFDLYDDWMRAASLKEPGARLQALQEVCSRLPPENLSNLRYLMKFLARLAEEQEVNKMTPSNIAIVLGPNLLWPPEKEGTEPARELGSQTLC

SEQ ID NO: 200646 - protein, 701 aa, Artificial Sequence
  derived and/or modified sequence
MMKRQLHRMRQLAQTGSLGRTPETAEFLGEDLLQVEQRLEPAKRAAHNIHKRLQACLQGQSGADMDKRVKKLPLMALSTTMAESFKELDPDSSMGKALEMSCAIQNQLARILAEFEMTLERDVLQPLSRLSEEELPAILKHKKSLQKLVSDWNTLKSRLSQATKNSGSSQGLGGSPGSHSHTTMANKVETLKEEEEELKRKVEQCRDEYLADLYHFVTKEDSYANYFIRLLEIQADYHRRSLSSLDTALAELRENHGQADHSPSMTATHFPRVYGVSLATHLQELGREIALPIEACVMMLLSEGMKEEGLFRLAAGASVLKRLKQTMASDPHSLEEFCSDPHAVAGALKSYLRELPEPLMTFDLYDDWMRAASLKEPGARLQALQEVCSRLPPENLSNLRYLMKFLARLAEEQEVNKMTPSNIAIVLGPNLLWPPEKEGDQAQLDAASVSSIQVVGVVEALIQSADTLFPGDINFNVSGLFSAVTLQDTVSDRLASEELPSTAVPTPATTPAPAPAPAPAPAPALASAATKERTESEVPPRPASPKVTRSPPETAAPVEDMARRTKRPAPARPTMPPPQVSGSRSSPPAPPLPPGSGSPGTPQALPRRLVGSSLRAPTVPPPLPPTPPQPARRQSRRSPASPSPASPGPASPSPVSLSNPAQVDLGAATAEGGAPEAISGVPTPPAIPPQPRPRSLASETN

SEQ ID NO: 200647 - protein, 517 aa, Artificial Sequence
  derived and/or modified sequence
MTRLGTVPRKALEMSCAIQNQLARILAEFEMTLERDVLQPLSRLSEEELPAILKHKKSLQKLVSDWNTLKSRLSQATKNSGSSQGLGGSPGSHSHTTMANKVETLKEEEEELKRKVEQCRDEYLADLYHFVTKEDSYANYFIRLLEIQADYHRRSLSSLDTALAELRENHGQADHSPSMTATHFPRVYGVSLATHLQELGREIALPIEACVMMLLSEGMKEEGLFRLAAGASVLKRLKQTMASDPHSLEEFCSDPHAVAGALKSYLRELPEPLMTFDLYDDWMRAASLKEPGARLQALQEVCSRLPPENLSNLRYLMKFLARLAEEQEVNKMTPSNIAIVLGPNLLWPPEKEGDQAQLDAASVSSIQVVGVVEALIQSADTLFPGDINFNVSGLFSAVTLQDTVSDRLASEELPSTAVPTPATTPAPAPAPAPAPAPALASAATKERTESEVPPRPASPKVTRSPPETAAPVEDMARRSPRGATGRKERFACSYGTDSSLADMFFVRLVNKLFWTKL

SEQ ID NO: 200648 - protein, 493 aa, Artificial Sequence
  derived and/or modified sequence
MMKRQLHRMRQLAQTGSLGRTPETAEFLGEDLLQVEQRLEPAKRAAHNIHKRLQACLQGQSGADMDKRVKKLPLMALSTTMAESFKELDPDSSMGKALEMSCAIQNQLARILAEFEMTLERDVLQPLSRLSEEELPAILKHKKSLQKLVSDWNTLKSRLSQATKNSGSSQGLGGSPGSHSHTTMANKVETLKEEEEELKRKVEQCRDEYLADLYHFVTKEDSYANYFIRLLEIQADYHRRSLSSLDTALAELRENHGQADHSPSMTATHFPRVYGVSLATHLQELGREIALPIEACVMMLLSEGMKEEGLFRLAAGASVLKRLKQTMASDPHSLEEFCSDPHAVAGALKSYLRELPEPLMTFDLYDDWMRAASLKEPGARLQALQEVCSRLPPENLSNLRYLMKFLARLAEEQEVNKMTPSNIAIVLGPNLLWPPEKEGLEYSGAISAHCNLRLPGSSDSSASACQVAGTTGTRPSWMQPPCLPSRWWASSRR

SEQ ID NO: 200649 - DNA, 1359 bp, Artificial Sequence
  derived and/or modified sequence
atgatgaagagacagctgcacagaatgagacagctggcccagaccggcagcctgggcagaacccccgagaccgccgagttcctgggcgaggacctgctgcaggtggagcagagactggagcccgccaagagagccgcccacaacatccacaagagactgcaggcctgcctgcagggccagagcggcgccgacatggacaagagagtgaagaagctgcccctgatggccctgagcaccaccatggccgagagcttcaaggagctggaccccgacagcagcatgggcaaggccctggagatgagctgcgccatccagaaccagctggccagaatcctggccgagttcgagatgaccctggagagagacgtgctgcagcccctgagcagactgagcgaggaggagctgcccgccatcctgaagcacaagaagagcctgcagaagctggtgagcgactggaacaccctgaagagcagactgagccaggccaccaagaacagcggcagcagccagggcctgggcggcagccccggcagccacagccacaccaccatggccaacaaggtggagaccctgaaggaggaggaggaggagctgaagagaaaggtggagcagtgcagagacgagtacctggccgacctgtaccacttcgtgaccaaggaggacagctacgccaactacttcatcagactgctggagatccaggccgactaccacagaagaagcctgagcagcctggacaccgccctggccgagctgagagagaaccacggccaggccgaccacagccccagcatgaccgccacccacttccccagagtgtacggcgtgagcctggccacccacctgcaggagctgggcagagagatcgccctgcccatcgaggcctgcgtgatgatgctgctgagcgagggcatgaaggaggagggcctgttcagactggccgccggcgccagcgtgctgaagagactgaagcagaccatggccagcgacccccacagcctggaggagttctgcagcgacccccacgccgtggccggcgccctgaagagctacctgagagagctgcccgagcccctgatgaccttcgacctgtacgacgactggatgagagccgccagcctgaaggagcccggcgccagactgcaggccctgcaggaggtgtgcagcagactgccccccgagaacctgagcaacctgagatacctgatgaagttcctggccagactggccgaggagcaggaggtgaacaagatgacccccagcaacatcgccatcgtgctgggccccaacctgctgtggccccccgagaaggagggcaccgagcccgccagagagctgggcagccagaccctgtgctag

SEQ ID NO: 200650 - DNA, 2106 bp, Artificial Sequence
  derived and/or modified sequence
atgatgaagagacagctgcacagaatgagacagctggcccagaccggcagcctgggcagaacccccgagaccgccgagttcctgggcgaggacctgctgcaggtggagcagagactggagcccgccaagagagccgcccacaacatccacaagagactgcaggcctgcctgcagggccagagcggcgccgacatggacaagagagtgaagaagctgcccctgatggccctgagcaccaccatggccgagagcttcaaggagctggaccccgacagcagcatgggcaaggccctggagatgagctgcgccatccagaaccagctggccagaatcctggccgagttcgagatgaccctggagagagacgtgctgcagcccctgagcagactgagcgaggaggagctgcccgccatcctgaagcacaagaagagcctgcagaagctggtgagcgactggaacaccctgaagagcagactgagccaggccaccaagaacagcggcagcagccagggcctgggcggcagccccggcagccacagccacaccaccatggccaacaaggtggagaccctgaaggaggaggaggaggagctgaagagaaaggtggagcagtgcagagacgagtacctggccgacctgtaccacttcgtgaccaaggaggacagctacgccaactacttcatcagactgctggagatccaggccgactaccacagaagaagcctgagcagcctggacaccgccctggccgagctgagagagaaccacggccaggccgaccacagccccagcatgaccgccacccacttccccagagtgtacggcgtgagcctggccacccacctgcaggagctgggcagagagatcgccctgcccatcgaggcctgcgtgatgatgctgctgagcgagggcatgaaggaggagggcctgttcagactggccgccggcgccagcgtgctgaagagactgaagcagaccatggccagcgacccccacagcctggaggagttctgcagcgacccccacgccgtggccggcgccctgaagagctacctgagagagctgcccgagcccctgatgaccttcgacctgtacgacgactggatgagagccgccagcctgaaggagcccggcgccagactgcaggccctgcaggaggtgtgcagcagactgccccccgagaacctgagcaacctgagatacctgatgaagttcctggccagactggccgaggagcaggaggtgaacaagatgacccccagcaacatcgccatcgtgctgggccccaacctgctgtggccccccgagaaggagggcgaccaggcccagctggacgccgccagcgtgagcagcatccaggtggtgggcgtggtggaggccctgatccagagcgccgacaccctgttccccggcgacatcaacttcaacgtgagcggcctgttcagcgccgtgaccctgcaggacaccgtgagcgacagactggccagcgaggagctgcccagcaccgccgtgcccacccccgccaccacccccgcccccgcccccgcccccgcccccgcccccgcccccgccctggccagcgccgccaccaaggagagaaccgagagcgaggtgccccccagacccgccagccccaaggtgaccagaagcccccccgagaccgccgcccccgtggaggacatggccagaagaaccaagagacccgcccccgccagacccaccatgccccccccccaggtgagcggcagcagaagcagcccccccgccccccccctgccccccggcagcggcagccccggcaccccccaggccctgcccagaagactggtgggcagcagcctgagagcccccaccgtgcccccccccctgccccccacccccccccagcccgccagaagacagagcagaagaagccccgccagccccagccccgccagccccggccccgccagccccagccccgtgagcctgagcaaccccgcccaggtggacctgggcgccgccaccgccgagggcggcgcccccgaggccatcagcggcgtgcccaccccccccgccatccccccccagcccagacccagaagcctggccagcgagaccaactag

SEQ ID NO: 200651 - DNA, 1470 bp, Artificial Sequence
  derived and/or modified sequence
cgcccacccatccggggcaagagccgcgccgcaggagaggcaggctggaccgggggctccccgggcccgcgacccccgccgtgaccccgcagcccccagctcgcccccaagatgatgaagaggcagctgcaccgcatgcggcagctggcccagacgggcagcttgggacgcaccccggagaccgctgagttcctgggtgaggacctgctgcaggtagaacagcggctggagccggccaagcgggcagcccacaacatccacaagcggctgcaggcctgtctgcagggccagagcggggcagacatggacaagcgggtgaagaagcttcccctcatggctctgtccaccacgatggctgagagcttcaaggagctggaccctgattccagcatggggaaggccttggagatgagctgtgccatccagaatcagctggcccgcatcctggccgagtttgagatgaccctggagagggacgtcctgcagccactcagcaggctgagtgaggaggagctgccagccatcctcaaacacaagaaaagcctccagaagctcgtgtccgactggaacacactcaagagcaggctcagtcaggcaaccaagaattcaggcagcagtcaaggcctaggaggcagcccgggtagtcacagccatacgaccatggccaacaaggtggagacgctgaaggaggaggaggaggagctgaagaggaaagtggagcaatgcagggacgagtacttggctgacctgtaccactttgttaccaaggaggactcctatgccaactacttcattcgtctcctggagattcaggccgattaccatcgcaggtcactgagctcgctggacacagccctggctgagctgagggagaaccacggccaagcagaccactccccttcgatgacagccacccacttccccagggtgtatggggtgtcgctggcaacccacctgcaagagctgggccgggagattgccctgcccatcgaggcctgcgtcatgatgctgctttctgagggcatgaaggaagagggtctcttccgtctggctgctggggcctcggtgctgaagcgtctcaagcagacaatggcctcggacccccacagcctggaggagttctgctccgacccgcacgctgtggcaggtgccctcaagtcctatctgcgggagctgccagagcctctgatgaccttcgacctctatgatgactggatgagggcagccagcctgaaggagccaggggcccggctgcaggccctccaagaggtgtgcagccgcctaccccccgagaacctcagcaacctcaggtacctgatgaagttcctggcacggctggccgaggagcaggaggtgaacaagatgacacccagcaacatcgccatagtcctgggacccaacttgctgtggccacctgagaaagaaggcacagagccagccagagagttggggtcacaaaccctttgctga

SEQ ID NO: 200652 - DNA, 1554 bp, Artificial Sequence
  derived and/or modified sequence
atgaccagactgggcaccgtgcccagaaaggccctggagatgagctgcgccatccagaaccagctggccagaatcctggccgagttcgagatgaccctggagagagacgtgctgcagcccctgagcagactgagcgaggaggagctgcccgccatcctgaagcacaagaagagcctgcagaagctggtgagcgactggaacaccctgaagagcagactgagccaggccaccaagaacagcggcagcagccagggcctgggcggcagccccggcagccacagccacaccaccatggccaacaaggtggagaccctgaaggaggaggaggaggagctgaagagaaaggtggagcagtgcagagacgagtacctggccgacctgtaccacttcgtgaccaaggaggacagctacgccaactacttcatcagactgctggagatccaggccgactaccacagaagaagcctgagcagcctggacaccgccctggccgagctgagagagaaccacggccaggccgaccacagccccagcatgaccgccacccacttccccagagtgtacggcgtgagcctggccacccacctgcaggagctgggcagagagatcgccctgcccatcgaggcctgcgtgatgatgctgctgagcgagggcatgaaggaggagggcctgttcagactggccgccggcgccagcgtgctgaagagactgaagcagaccatggccagcgacccccacagcctggaggagttctgcagcgacccccacgccgtggccggcgccctgaagagctacctgagagagctgcccgagcccctgatgaccttcgacctgtacgacgactggatgagagccgccagcctgaaggagcccggcgccagactgcaggccctgcaggaggtgtgcagcagactgccccccgagaacctgagcaacctgagatacctgatgaagttcctggccagactggccgaggagcaggaggtgaacaagatgacccccagcaacatcgccatcgtgctgggccccaacctgctgtggccccccgagaaggagggcgaccaggcccagctggacgccgccagcgtgagcagcatccaggtggtgggcgtggtggaggccctgatccagagcgccgacaccctgttccccggcgacatcaacttcaacgtgagcggcctgttcagcgccgtgaccctgcaggacaccgtgagcgacagactggccagcgaggagctgcccagcaccgccgtgcccacccccgccaccacccccgcccccgcccccgcccccgcccccgcccccgcccccgccctggccagcgccgccaccaaggagagaaccgagagcgaggtgccccccagacccgccagccccaaggtgaccagaagcccccccgagaccgccgcccccgtggaggacatggccagaagaagccccagaggcgccaccggcagaaaggagagattcgcctgcagctacggcaccgacagcagcctggccgacatgttcttcgtgagactggtgaacaagctgttctggaccaagctgtag

SEQ ID NO: 200653 - DNA, 1482 bp, Artificial Sequence
  derived and/or modified sequence
atgatgaagagacagctgcacagaatgagacagctggcccagaccggcagcctgggcagaacccccgagaccgccgagttcctgggcgaggacctgctgcaggtggagcagagactggagcccgccaagagagccgcccacaacatccacaagagactgcaggcctgcctgcagggccagagcggcgccgacatggacaagagagtgaagaagctgcccctgatggccctgagcaccaccatggccgagagcttcaaggagctggaccccgacagcagcatgggcaaggccctggagatgagctgcgccatccagaaccagctggccagaatcctggccgagttcgagatgaccctggagagagacgtgctgcagcccctgagcagactgagcgaggaggagctgcccgccatcctgaagcacaagaagagcctgcagaagctggtgagcgactggaacaccctgaagagcagactgagccaggccaccaagaacagcggcagcagccagggcctgggcggcagccccggcagccacagccacaccaccatggccaacaaggtggagaccctgaaggaggaggaggaggagctgaagagaaaggtggagcagtgcagagacgagtacctggccgacctgtaccacttcgtgaccaaggaggacagctacgccaactacttcatcagactgctggagatccaggccgactaccacagaagaagcctgagcagcctggacaccgccctggccgagctgagagagaaccacggccaggccgaccacagccccagcatgaccgccacccacttccccagagtgtacggcgtgagcctggccacccacctgcaggagctgggcagagagatcgccctgcccatcgaggcctgcgtgatgatgctgctgagcgagggcatgaaggaggagggcctgttcagactggccgccggcgccagcgtgctgaagagactgaagcagaccatggccagcgacccccacagcctggaggagttctgcagcgacccccacgccgtggccggcgccctgaagagctacctgagagagctgcccgagcccctgatgaccttcgacctgtacgacgactggatgagagccgccagcctgaaggagcccggcgccagactgcaggccctgcaggaggtgtgcagcagactgccccccgagaacctgagcaacctgagatacctgatgaagttcctggccagactggccgaggagcaggaggtgaacaagatgacccccagcaacatcgccatcgtgctgggccccaacctgctgtggccccccgagaaggagggcctggagtacagcggcgccatcagcgcccactgcaacctgagactgcccggcagcagcgacagcagcgccagcgcctgccaggtggccggcaccaccggcaccagacccagctggatgcagcccccctgcctgcccagcagatggtgggccagcagcagaagatag

SEQ ID NO: 200654 - DNA, 2852 bp, Artificial Sequence
  derived and/or modified sequence
aacctgtggacggccgcggccggcggacacacagcagcgggggcccggccgggggtcgcccgggggcccggaagccggggaagagcgaggaaaccaacttggagagaggagtgacctgggggccgggggcggagtcgtgagcgggggaggagagagccggccgccagcaagagccgcgcggcggcccaggaagcgagagcgccgcccacccatccggggcaagagccgcgccgcaggagaggcaggctggaccgggggctccccgggcccgcgacccccgccgtgaccccgcagcccccagctcgcccccaagatgatgaagaggcagctgcaccgcatgcggcagctggcccagacgggcagcttgggacgcaccccggagaccgctgagttcctgggtgaggacctgctgcaggtagaacagcggctggagccggccaagcgggcagcccacaacatccacaagcggctgcaggcctgtctgcagggccagagcggggcagacatggacaagcgggtgaagaagcttcccctcatggctctgtccaccacgatggctgagagcttcaaggagctggaccctgattccagcatggggaaggccttggagatgagctgtgccatccagaatcagctggcccgcatcctggccgagtttgagatgaccctggagagggacgtcctgcagccactcagcaggctgagtgaggaggagctgccagccatcctcaaacacaagaaaagcctccagaagctcgtgtccgactggaacacactcaagagcaggctcagtcaggcaaccaagaattcaggcagcagtcaaggcctaggaggcagcccgggtagtcacagccatacgaccatggccaacaaggtggagacgctgaaggaggaggaggaggagctgaagaggaaagtggagcaatgcagggacgagtacttggctgacctgtaccactttgttaccaaggaggactcctatgccaactacttcattcgtctcctggagattcaggccgattaccatcgcaggtcactgagctcgctggacacagccctggctgagctgagggagaaccacggccaagcagaccactccccttcgatgacagccacccacttccccagggtgtatggggtgtcgctggcaacccacctgcaagagctgggccgggagattgccctgcccatcgaggcctgcgtcatgatgctgctttctgagggcatgaaggaagagggtctcttccgtctggctgctggggcctcggtgctgaagcgtctcaagcagacaatggcctcggacccccacagcctggaggagttctgctccgacccgcacgctgtggcaggtgccctcaagtcctatctgcgggagctgccagagcctctgatgaccttcgacctctatgatgactggatgagggcagccagcctgaaggagccaggggcccggctgcaggccctccaagaggtgtgcagccgcctaccccccgagaacctcagcaacctcaggtacctgatgaagttcctggcacggctggccgaggagcaggaggtgaacaagatgacacccagcaacatcgccatagtcctgggacccaacttgctgtggccacctgagaaagaaggggaccaggcccagctggatgcagcctccgtgtcttccatccaggtggtgggcgtcgtcgaggcgctgatccagagcgcagacaccctcttccctggagacatcaacttcaacgtgtcaggcctcttctcagctgttaccctccaggacacagtcagtgacaggctggcctctgaggaacttccgtccactgccgtgcccaccccagccaccaccccggctccggctccggctccagctccagctccggccccagccttggcttcagcagctaccaaggaaaggacagagtctgaggtgcctcccagaccagcctcccccaaggtcaccaggagtcccccggagacagctgccccagtggaggacatggctcggaggaccaagcgcccggcgccagcccggcccaccatgccgcccccccaggtctccggctcccgctcctcccctccagccccgcccttgccccctggctctggcagccctgggaccccccaagccctgccccgacgtctggttggcagcagcctccgagcccccacagtgccacccccgttaccccccacaccccctcagcctgcccggcgccaaagccggcgttcaccagcctcccccagcccggcctccccaggtccagcctcccccagcccagtctctttgagtaaccctgcacaggtggacctgggggctgccacagcagagggaggagcccctgaggctatcagtggggtccccactcccccagctatcccccctcagccccgccccaggagccttgcctcagagaccaactgagtggctggtttctccctaagcagccctcagcaccccctccctccccacctggccctcccaggacagctctcgccccccacaaaggggcatgggcctccagcctttgcccacaagtgcctcagtgcccactgggtcggcccccatggccaggagggctcaggacaatcctctatttcctgaccttttcctcgtccaccctgggcttggggacccccccaccggactctccactctccggcaggtcctaggggagccaccggaaggaaggagaggtttgcctgctcctacgggactgattcttctcttgccgacatgttttttgtaaggctggtaaataaattattttggacaaaactggagcagctgcccaaatgatagttttattttctgtccttgaaataaagaagccaattttataaaggggaaaacaata

SEQ ID NO: 200655 - DNA, 1359 bp, Artificial Sequence
  derived and/or modified sequence
atgatgaaaaggcaactacaccggatgagacagctcgctcagacaggatccctgggacggacccctgagactgcggaattcctgggggaggatctgctacaagtggaacaacggctggagcctgcgaagcgggccgctcataatatccacaagagactgcaggcttgcctacagggacaatctggtgcggatatggacaaacgagtaaagaagttgcctttgatggccctgtcaacgacaatggccgagtctttcaaggagcttgacccagacagttctatgggcaaggctctcgaaatgtcctgcgctatccagaaccagctagcacgcatcttagcagaattcgagatgactctggagagggatgtgttgcaaccattgtcaagactgtctgaggaggaattgcctgccattcttaaacataagaagtctttacaaaagctggtctccgactggaatacactcaaatcgaggctctctcaggctacaaagaacagcggttcatctcaggggctcggtgggagccctggctcacacagccacactactatggctaacaaagtcgagaccctcaaggaggaggaggaagaattgaaacgaaaagttgaacagtgccgcgacgagtacttggccgatttgtatcacttcgttaccaaagaggattcatacgcaaattacttcattcgcctgctcgagatacaggcagattaccatagacggagcctttctagcctagatactgcccttgcagaacttcgggagaaccacggtcaggcggaccattctcctagcatgactgcaactcacttcccacgtgtgtatggagtttccctcgccacccatctgcaggagctgggcagagaaattgccctccccatcgaggcctgcgtcatgatgctattatccgaagggatgaaagaggaaggtttgttcaggttagcagcaggcgcgtctgttttaaaacgcctcaagcagaccatggcttccgatccccactcccttgaggaattctgctccgacccacatgcagtagctggcgctttgaagtcctacttacgcgaactacccgaacccttgatgacctttgacctgtacgacgactggatgagagcggcctccctgaaagaacctggcgcaagacttcaggctctgcaagaggtctgcagtagactgccccccgagaacctgtccaacttgcggtatctgatgaaatttttagcgcggctggctgaggaacaagaggtgaataagatgactccttctaacatagctatagtactgggcccaaatttactttggcccccagagaaggaaggtactgagccagcaagggaacttggaagccagaccctgtgttag

SEQ ID NO: 200656 - DNA, 2106 bp, Artificial Sequence
  derived and/or modified sequence
atgatgaagcgccagctccatcgcatgcgacagttagcccagacgggtagcctggggcggacgcctgagactgccgagttcctcggggaggacctcttacaggtggagcagcgactcgaacccgcgaagagagcggcccataatatccacaaacgtctgcaggcttgcctgcagggccagagcggggcagatatggataagcgcgtcaaaaagctgcctctgatggccctctcaacaactatggcggaatccttcaaggaactggacccagattcttccatgggcaaagccttagagatgagttgcgctattcaaaatcaattggccagaatcctagcagagttcgagatgaccttggagcgggacgtcctccaacccctatctcgcctctctgaggaggagctgcctgccattctgaaacacaagaagtctttacagaagttagtgagcgattggaatacccttaaatcgcggctgtcgcaagccacaaagaattcaggctcatcccagggattaggtgggagccccggctcacacagtcacacaaccatggcgaataaggttgagaccctgaaggaggaagaagaggagctgaagaggaaggtagagcagtgccgggatgaatatttagccgacttatatcattttgtcacaaaggaagattcgtacgccaattacttcattagattgctggaaatccaggctgactaccataggaggagtctcagcagtctcgacactgccttagccgaattgagagagaatcacggccaggccgaccatagtccgtctatgacagctacacatttcccccgggtgtatggagtgagtctggcaacacatttgcaagagttggggagggagattgcgttacccattgaggcctgtgtaatgatgcttctctcagaagggatgaaagaggagggcctgttcagactggcagctggagcttccgttcttaaacgtcttaagcagaccatggctagtgacccgcattccctggaggaattctgttctgaccctcatgctgtggccggggccctcaagtcctatcttagagaacttcccgagccactcatgaccttcgacctgtatgacgactggatgagagcagcctccttgaaggagcccggcgcccggctccaggctctgcaggaagtgtgttcacgtctcccgcccgagaatctgtcaaatctgcgctatctcatgaagtttctagcccgtctggctgaagagcaggaggtgaataagatgactccaagtaatatcgccattgtcctgggacctaatctgctgtggccaccagagaaggagggagatcaagctcagctggacgccgccagtgtctccagcatccaagtggtaggggtcgttgaggccctgatacagagcgcagacacactgtttcctggcgatatcaatttcaacgtgtctggccttttttccgctgtgaccctccaagatacagtctcagacagacttgcttccgaggagcttccctccactgccgtcccaacgccagcaactaccccggcaccggcccctgcccccgccccagccccggccccggctctggcctccgctgccacgaaggaacggaccgagagcgaggtgccaccaagacccgcatccccaaaggtgacacgatctcctccggaaaccgccgcccctgtggaggatatggcccgcagaaccaaaagacccgcgcctgcgcggcctacaatgccaccccctcaggtgtctggtagtcggtctagcccacccgccccgccactcccacccgggtctggctctcccggaacccctcaggccctgcccagaaggctagtggggtcttcactgcgcgcaccaactgtgccaccccccctgcctccaacccctccccagccggctagaagacagtcccggagaagccctgcatcgccgagccctgccagccctggcccggcctcccccagccccgtgtcattaagcaaccccgctcaggtggacctgggcgccgccacggcggaaggaggcgcaccagaggccatctctggagtccccaccccaccggcaattcctccccagccacgaccaagatctctggcttcggagactaactag

SEQ ID NO: 200657 - DNA, 1554 bp, Artificial Sequence
  derived and/or modified sequence
atgactcggcttggaacagtgcctcgaaaggccctcgagatgtcgtgcgctatccagaatcagctggctcggatcctcgcggagtttgaaatgacgcttgagcgggacgtgctgcagccattgtcccgcctgagcgaggaagagctacctgctattcttaagcataaaaaatccctacaaaagctggtctcagattggaacacattaaagtctcggctgagccaggccactaaaaactctgggtctagccaagggctgggcggtagccctgggtcacacagtcacacaacaatggccaacaaggttgaaacgctcaaggaagaagaagaggagctgaagagaaaagtcgagcagtgccgtgacgaatacctcgcagacctgtatcatttcgtgactaaggaagactcctacgccaactatttcatcaggctgctcgagatccaggctgactaccaccgcaggagtctgtcttcgctggatacagcgctggccgaactccgggagaatcacggtcaggcagatcactccccatcgatgaccgcaacgcattttccccgcgtgtacggagtgtctttagcgactcaccttcaggaactgggacgggagattgcgctcccaattgaggcgtgcgtcatgatgctcctatctgaggggatgaaagaagaaggcctgttcaggctcgcagctggggctagcgtactgaagcggcttaaacaaaccatggcaagtgaccctcattctctggaggagttttgttcagatccccatgcagtggccggcgcattaaagagttacctgagggaactgcccgagcctctcatgacatttgacctgtacgacgactggatgcgtgcggcctccctcaaggaacccggcgcccgcctccaggcgttacaagaggtgtgcagccgcctgccgcccgagaacctctccaaccttaggtacctaatgaagttcctggccaggctcgccgaagagcaggaagtgaacaagatgaccccatcgaatattgctattgtgctaggccctaatctcctttggccccctgagaaagagggcgatcaggctcaacttgatgctgcaagcgtctcaagtattcaggttgtcggcgtcgtggaagctcttattcagagtgcggacaccctgttcccaggtgacataaatttcaacgtcagtggtcttttctcagccgttactctgcaagacaccgttagcgataggttggctagtgaggaacttcctagtactgcagtgccgacacccgctaccactccagcaccggcccccgcccctgccccagccccagcgcctgcactcgccagcgccgcgacaaaggaaagaactgaaagtgaagtgccgccccggcctgcatcccccaaagtcactcgatcaccgcctgaaaccgccgctcccgtggaagatatggctcgtaggagccccaggggcgccactggcagaaaggagagattcgcctgtagttacggcactgactccagtcttgctgatatgttctttgtcagattagtcaacaagctcttctggacaaaactttag

SEQ ID NO: 200658 - DNA, 1482 bp, Artificial Sequence
  derived and/or modified sequence
atgatgaagaggcagttgcatagaatgagacagctagcccaaaccggatctctgggccggactcctgaaaccgcggaatttctgggtgaggacctgctacaggtggagcaacgcctcgaacccgcaaaaagagccgcacacaatatccacaaacgactgcaagcatgcttgcagggtcagtccggcgccgacatggacaagcgcgtgaagaagctacctctaatggctctgagcactactatggcagaaagcttcaaggagctcgatcctgatagcagtatgggcaaggctctggagatgagttgcgcaatacagaatcagctggccaggatcttggccgagtttgaaatgactctcgagagggatgtactgcagcccctgagccggctgagtgaagaagagctgccagccatattaaagcacaagaagagcctgcagaagctggtgtctgattggaatacactgaagagccgcctgagccaggcaaccaaaaacagcggttcctcccagggcctcggaggatcacctgggtcccatagccatacaaccatggccaacaaggtggagaccctgaaggaagaggaggaggaacttaagcgaaaagtggagcagtgcagagacgaatatctagctgacctataccattttgtaacaaaagaagacagttacgcaaactactttatcagactgctagagatccaggcagactaccacaggaggagtctgagctcactggataccgcccttgcggaacttagggagaaccatgggcaggccgatcatagcccctccatgacagcaactcacttccccagggtatacggcgtctctttagcaacacacctgcaggagcttggcagggagatcgcacttcccatcgaagcctgcgtaatgatgctcctgagtgaggggatgaaggaggaagggctgttccggctggcggctggcgcctcagtgctgaagcggttgaaacagactatggcatctgacccacattcattagaagaattctgctccgatcctcacgccgtcgccggtgctctgaaaagttacttaagagagttgccggaacctctgatgacgtttgacctctacgacgattggatgcgcgccgcgtcccttaaggagcctggtgctcgcctgcaggcgctccaggaggtgtgttcaagactccctcccgaaaacttgagtaatcttagataccttatgaagtttctggctcgactcgccgaagaacaggaggttaataagatgacaccatctaatattgccattgtgttgggtcccaacttgctatggccaccagaaaaagaggggctggagtattcaggagccatttctgcgcactgcaacctacggttacctggaagttccgatagctcagcctccgcttgtcaggtggccggaacgaccggtacaagaccttcttggatgcagcccccttgtctccctagccgctggtgggccagcagccgcagatag

SEQ ID NO: 200659 - DNA, 1359 bp, Artificial Sequence
  derived and/or modified sequence
atgatgaagaggcagctgcacaggatgaggcagctggcccagacaggcagcctgggccgcaccccagagacagctgagttcctgggggaggacctgctgcaggtggagcagaggctggagcccgccaagagagctgcccacaacatccacaagaggctgcaggcctgcctgcagggccagagcggggctgacatggacaagagggtgaagaagctgcccctgatggccctgagcaccaccatggccgagagcttcaaggagctggaccctgacagctccatgggcaaggccctggagatgagctgtgccatccagaaccagctggcccgcatcctggccgagtttgagatgaccctggagagagatgtgctgcagcccctgagccggctgtctgaggaggagctgcctgccatcctgaagcacaagaagagcctgcagaagctggtgtctgactggaacaccctgaagagccggctgagccaggccaccaagaacagcggcagcagccagggcctgggcggcagccctggcagccacagccacaccaccatggccaacaaggtggagaccctgaaggaggaggaggaggagctgaagaggaaggtggagcagtgcagagatgagtacctggccgacctgtaccactttgtgaccaaggaggacagctatgccaactacttcatccggctgctggagatccaggccgactaccacagaagaagcctgagcagcctggacacagccctggccgagctgcgggagaaccacggccaggccgaccacagccccagcatgacagccacccacttcccccgggtgtatggagtgtccctggccacccacctgcaggagctgggccgggagatcgccctgcccatcgaggcctgtgtgatgatgctgctgtctgagggcatgaaggaggagggcctcttccggctggccgccggggcctctgtgctgaagaggctgaagcagaccatggccagtgacccccacagcctggaggagttctgcagcgacccccatgctgtggccggggccctgaagagctacctgcgggagctgcctgagcccctgatgacctttgacctgtatgatgactggatgagagctgccagcctgaaggagcccggggcccggctgcaggccctgcaggaggtgtgcagccggctgcccccagagaacctgagcaacctgcgctacctgatgaagttcctggcccggctggccgaggagcaggaggtgaacaagatgacccccagcaacatcgccatcgtgctgggccccaacctgctgtggcccccagagaaggagggcacagagcccgcccgggagctgggcagccagaccctgtgctag

SEQ ID NO: 200660 - DNA, 2106 bp, Artificial Sequence
  derived and/or modified sequence
atgatgaagaggcagctgcacaggatgaggcagctggcccagacaggcagcctgggccgcaccccagagacagctgagttcctgggggaggacctgctgcaggtggagcagaggctggagcccgccaagagagctgcccacaacatccacaagaggctgcaggcctgcctgcagggccagagcggggctgacatggacaagagggtgaagaagctgcccctgatggccctgagcaccaccatggccgagagcttcaaggagctggaccctgacagctccatgggcaaggccctggagatgagctgtgccatccagaaccagctggcccgcatcctggccgagtttgagatgaccctggagagagatgtgctgcagcccctgagccggctgtctgaggaggagctgcctgccatcctgaagcacaagaagagcctgcagaagctggtgtctgactggaacaccctgaagagccggctgagccaggccaccaagaacagcggcagcagccagggcctgggcggcagccctggcagccacagccacaccaccatggccaacaaggtggagaccctgaaggaggaggaggaggagctgaagaggaaggtggagcagtgcagagatgagtacctggccgacctgtaccactttgtgaccaaggaggacagctatgccaactacttcatccggctgctggagatccaggccgactaccacagaagaagcctgagcagcctggacacagccctggccgagctgcgggagaaccacggccaggccgaccacagccccagcatgacagccacccacttcccccgggtgtatggagtgtccctggccacccacctgcaggagctgggccgggagatcgccctgcccatcgaggcctgtgtgatgatgctgctgtctgagggcatgaaggaggagggcctcttccggctggccgccggggcctctgtgctgaagaggctgaagcagaccatggccagtgacccccacagcctggaggagttctgcagcgacccccatgctgtggccggggccctgaagagctacctgcgggagctgcctgagcccctgatgacctttgacctgtatgatgactggatgagagctgccagcctgaaggagcccggggcccggctgcaggccctgcaggaggtgtgcagccggctgcccccagagaacctgagcaacctgcgctacctgatgaagttcctggcccggctggccgaggagcaggaggtgaacaagatgacccccagcaacatcgccatcgtgctgggccccaacctgctgtggcccccagagaaggagggggaccaggcccagctggatgctgcctctgtgagcagcatccaggtggtgggcgtggtggaggccctgatccagagcgctgacaccctcttccctggggacatcaacttcaacgtgtctggcctcttctctgctgtgaccctgcaggacacagtgtctgaccggctggccagcgaggagctgcccagcacagctgtgcccaccccagccaccaccccagccccagccccagccccagccccagccccagccccagccctggccagcgctgccaccaaggagaggacagagagcgaggtgccccccaggcctgccagccccaaggtgaccaggagccccccagagacagctgcccctgtggaggacatggcccggaggaccaagaggcctgccccagcccggcccaccatgcccccaccccaggtgtctggcagccgcagcagccccccagccccacccctgcccccaggcagcggcagccctggcaccccccaggccctgccccggcggctggtgggcagcagcctgcgggcccccaccgtgcccccacccctgccccccaccccaccccagcctgcccggcggcagagccgccgcagccctgccagccccagccctgccagccctggccctgccagccccagccctgtgtccctgagcaacccagcccaggtggacctgggcgccgccacagctgagggcggggcccctgaggccatctctggagtgcccaccccaccagccatccccccccagccccggcccaggagcctggccagcgagaccaactag

SEQ ID NO: 200661 - DNA, 1554 bp, Artificial Sequence
  derived and/or modified sequence
atgacccggctgggcaccgtgcccaggaaggccctggagatgagctgtgccatccagaaccagctggcccgcatcctggccgagtttgagatgaccctggagagagatgtgctgcagcccctgagccggctgtctgaggaggagctgcctgccatcctgaagcacaagaagagcctgcagaagctggtgtctgactggaacaccctgaagagccggctgagccaggccaccaagaacagcggcagcagccagggcctgggcggcagccctggcagccacagccacaccaccatggccaacaaggtggagaccctgaaggaggaggaggaggagctgaagaggaaggtggagcagtgcagagatgagtacctggccgacctgtaccactttgtgaccaaggaggacagctatgccaactacttcatccggctgctggagatccaggccgactaccacagaagaagcctgagcagcctggacacagccctggccgagctgcgggagaaccacggccaggccgaccacagccccagcatgacagccacccacttcccccgggtgtatggagtgtccctggccacccacctgcaggagctgggccgggagatcgccctgcccatcgaggcctgtgtgatgatgctgctgtctgagggcatgaaggaggagggcctcttccggctggccgccggggcctctgtgctgaagaggctgaagcagaccatggccagtgacccccacagcctggaggagttctgcagcgacccccatgctgtggccggggccctgaagagctacctgcgggagctgcctgagcccctgatgacctttgacctgtatgatgactggatgagagctgccagcctgaaggagcccggggcccggctgcaggccctgcaggaggtgtgcagccggctgcccccagagaacctgagcaacctgcgctacctgatgaagttcctggcccggctggccgaggagcaggaggtgaacaagatgacccccagcaacatcgccatcgtgctgggccccaacctgctgtggcccccagagaaggagggggaccaggcccagctggatgctgcctctgtgagcagcatccaggtggtgggcgtggtggaggccctgatccagagcgctgacaccctcttccctggggacatcaacttcaacgtgtctggcctcttctctgctgtgaccctgcaggacacagtgtctgaccggctggccagcgaggagctgcccagcacagctgtgcccaccccagccaccaccccagccccagccccagccccagccccagccccagccccagccctggccagcgctgccaccaaggagaggacagagagcgaggtgccccccaggcctgccagccccaaggtgaccaggagccccccagagacagctgcccctgtggaggacatggcccggcgcagccccaggggggccaccggcaggaaggagagatttgcctgcagctatggaacagacagcagcctggccgacatgttctttgtgcggctggtgaacaagctgttctggaccaagctgtag

SEQ ID NO: 200662 - DNA, 1482 bp, Artificial Sequence
  derived and/or modified sequence
atgatgaagaggcagctgcacaggatgaggcagctggcccagacaggcagcctgggccgcaccccagagacagctgagttcctgggggaggacctgctgcaggtggagcagaggctggagcccgccaagagagctgcccacaacatccacaagaggctgcaggcctgcctgcagggccagagcggggctgacatggacaagagggtgaagaagctgcccctgatggccctgagcaccaccatggccgagagcttcaaggagctggaccctgacagctccatgggcaaggccctggagatgagctgtgccatccagaaccagctggcccgcatcctggccgagtttgagatgaccctggagagagatgtgctgcagcccctgagccggctgtctgaggaggagctgcctgccatcctgaagcacaagaagagcctgcagaagctggtgtctgactggaacaccctgaagagccggctgagccaggccaccaagaacagcggcagcagccagggcctgggcggcagccctggcagccacagccacaccaccatggccaacaaggtggagaccctgaaggaggaggaggaggagctgaagaggaaggtggagcagtgcagagatgagtacctggccgacctgtaccactttgtgaccaaggaggacagctatgccaactacttcatccggctgctggagatccaggccgactaccacagaagaagcctgagcagcctggacacagccctggccgagctgcgggagaaccacggccaggccgaccacagccccagcatgacagccacccacttcccccgggtgtatggagtgtccctggccacccacctgcaggagctgggccgggagatcgccctgcccatcgaggcctgtgtgatgatgctgctgtctgagggcatgaaggaggagggcctcttccggctggccgccggggcctctgtgctgaagaggctgaagcagaccatggccagtgacccccacagcctggaggagttctgcagcgacccccatgctgtggccggggccctgaagagctacctgcgggagctgcctgagcccctgatgacctttgacctgtatgatgactggatgagagctgccagcctgaaggagcccggggcccggctgcaggccctgcaggaggtgtgcagccggctgcccccagagaacctgagcaacctgcgctacctgatgaagttcctggcccggctggccgaggagcaggaggtgaacaagatgacccccagcaacatcgccatcgtgctgggccccaacctgctgtggcccccagagaaggagggcctggagtacagcggggccatcagcgcccactgcaacctgcggctgcccggcagcagtgacagcagcgccagcgcctgccaggtggccggcaccaccggcacccggcccagctggatgcagcccccctgcctgcccagccgctggtgggccagcagcagaagatag

SEQ ID NO: 200663 - DNA, 1359 bp, Artificial Sequence
  derived and/or modified sequence
atgatgaagcggcagctgcaccggatgcggcagctggcccagaccggtagcttggggcgcacgcccgagaccgctgagtttctgggagaagatttactgcaggttgaacagcgcctagagccagcgaagagagccgcacacaatatccacaaaagactgcaggcctgcttgcagggacagagtggggcggatatggataaacgtgtgaagaaactacccctgatggccctgagcaccactatggcggagagctttaaagagctggacccggatagctcaatggggaaggcgctcgagatgagctgcgctatccagaaccagctggctagaatcctcgccgagtttgaaatgacattagagagagatgttttacagcctttatcacggcttagcgaggaggagcttccagcaatcctgaaacataagaagagtctgcaaaagctcgtgagtgattggaacaccctgaaatctaggctctcacaggccactaagaattctggctccagtcagggtcttgggggtagcccaggctctcacagccacactacaatggctaacaaagtggagacattgaaagaggaagaagaagagttaaagcgcaaggtagaacaatgtcgcgatgagtatctagcagatttgtatcacttcgttaccaaagaggattcttacgcaaattatttcataaggttgctggagatccaggctgactatcatcggaggtctctcagctcactcgataccgccctcgccgaactgcgggagaaccatggacaagccgaccattccccttcaatgaccgcaactcactttccaagagtgtacggggtgagcctggctacccacttgcaggagctgggccgtgagatcgcgcttcccattgaggcctgtgtcatgatgctcctgagtgaaggcatgaaagaagagggcctctttaggctggccgccggtgcgtccgtactcaagcgattaaagcagacaatggcatccgaccctcactcgctcgaggagttttgttcagatccccatgccgtcgctggagccctaaaatcataccttcgggaactgccagagcctctgatgaccttcgacttgtacgacgactggatgcgcgcagctagcctcaaagagccaggggctcggctacaggcgcttcaggaggtgtgcagccggttgccgccggaaaatctcagcaatcttaggtaccttatgaagtttcttgccagactagccgaggagcaggaggttaacaaaatgacaccttcaaacatcgccatcgtgctgggtcccaaccttctgtggcctcccgagaaagagggcactgagccagcgagggaattgggtagtcaaacactctgttag

SEQ ID NO: 200664 - DNA, 2106 bp, Artificial Sequence
  derived and/or modified sequence
atgatgaagcggcagctgcaccggatgcggcagctggcccagaccgggtcccttggtcgtacccctgagactgcagagtttctgggagaggatctgttacaagtcgagcagcggttggagccagccaagcgggccgctcacaacattcacaagcgcctccaggcttgcttgcaggggcagtctggagctgacatggacaagagagtgaagaaactgcccctaatggcactcagtaccacaatggcagagagtttcaaggaactggatcctgacagttcaatgggcaaggccctggagatgagttgtgcaatccagaatcagctcgcacgtattcttgccgagttcgagatgactctggaacgagacgtcctccaacctcttagccggctcagcgaggaagagctgccggcgatcctcaaacataagaagagcctacagaaactcgtttctgattggaacaccctgaaatccagattgtcccaggccaccaagaacagcggaagctcgcagggactgggcgggagcccaggcagtcattcacacacgactatggcaaacaaagttgagacgttgaaagaggaagaggaggaactcaagagaaaagtcgagcagtgtcgagatgagtacctagcagatctgtaccattttgtgacaaaagaagatagttacgccaactatttcattaggttgctagagattcaggcagactaccaccgacggagtctgtcatcccttgatacagcgttagctgaacttcgggagaaccatggtcaggccgaccactccccaagcatgaccgcaacccacttcccccgtgtgtatggcgtcagcctggccacacatctgcaggaactaggaagggagatcgccttacccatagaggcctgtgtgatgatgctgctgagcgaagggatgaaggaagagggacttttccgcctggccgcaggggcatcagtgctcaaacgcttgaaacaaaccatggcttcagatccacacagccttgaagagttctgctctgatccccacgccgttgctggcgcactgaagagctacttacgcgaacttcctgagcctctgatgacctttgatttatatgacgattggatgcgtgccgcctccctcaaggaacccggggcacgactgcaggcgctacaagaagtctgcagcaggttacccccggagaacctcagtaatttgaggtatctaatgaagttcttggccaggcttgcggaagaacaagaagttaataagatgactcccagcaacatcgccattgttctcgggcccaatctgctatggcctcccgaaaaagagggagatcaggcccagttagacgccgcgtccgtctcaagtatacaggtagtgggcgtggttgaagccctgattcaaagtgcagatacactttttcctggtgatattaacttcaatgtgtcaggactgtttagcgccgtcacactacaagatactgttagcgaccgtctggcttccgaggaattgccctccactgccgtgcccacacccgcgaccactcccgccccagcgccagctcccgcccctgcccccgccccagctctggcttctgcagccaccaaagaaagaaccgaaagcgaggtgcctcccaggccagcgagcccgaaggtaactagatcacctccagagacagctgccccggtagaggacatggcaaggagaaccaagaggccagctcctgccagaccaacaatgcccccaccgcaagtgagcggatctcggtcctcaccacccgctccaccgctacctcccggcagtggaagccccggaacccctcaggctctgccaaggcggctcgtgggctcctctttgagagcccctacggtgcctcctcctttaccaccaacacccccacagcccgctcgcaggcagagccgccgcagccccgcctctcctagtccagcctcacccgggcctgcttctcctagtccagtcagcctgtctaatcccgcacaggtggacctgggagccgccaccgccgaagggggggctcctgaggccatttccggcgtgcctacccctcctgccattccacctcaacctcggcctcgaagcctggctagtgaaaccaactag

SEQ ID NO: 200665 - DNA, 1552 bp, Artificial Sequence
  derived and/or modified sequence
atgaccaggctggggacagttcccaggaaggccttggagatgagctgtgccatccagaatcagctggcccgcatcctggccgagtttgagatgaccctggagagggacgtcctgcagccactcagcaggctgagtgaggaggagctgccagccatcctcaaacacaagaaaagcctccagaagctcgtgtccgactggaacacactcaagagcaggctcagtcaggcaaccaagaattcaggcagcagtcaaggcctaggaggcagcccgggtagtcacagccatacgaccatggccaacaaggtggagacgctgaaggaggaggaggaggagctgaagaggaaagtggagcaatgcagggacgagtacttggctgacctgtaccactttgttaccaaggaggactcctatgccaactacttcattcgtctcctggagattcaggccgattaccatcgcaggtcactgagctcgctggacacagccctggctgagctgagggagaaccacggccaagcagaccactccccttcgatgacagccacccacttccccagggtgtatggggtgtcgctggcaacccacctgcaagagctgggccgggagattgccctgcccatcgaggcctgcgtcatgatgctgctttctgagggcatgaaggaagagggtctcttccgtctggctgctggggcctcggtgctgaagcgtctcaagcagacaatggcctcggacccccacagcctggaggagttctgctccgacccgcacgctgtggcaggtgccctcaagtcctatctgcgggagctgccagagcctctgatgaccttcgacctctatgatgactggatgagggcagccagcctgaaggagccaggggcccggctgcaggccctccaagaggtgtgcagccgcctaccccccgagaacctcagcaacctcaggtacctgatgaagttcctggcacggctggccgaggagcaggaggtgaacaagatgacacccagcaacatcgccatagtcctgggacccaacttgctgtggccacctgagaaagaaggggaccaggcccagctggatgcagcctccgtgtcttccatccaggtggtgggcgtcgtcgaggcgctgatccagagcgcagacaccctcttccctggagacatcaacttcaacgtgtcaggcctcttctcagctgttaccctccaggacacagtcagtgacaggctggcctctgaggaacttccgtccactgccgtgcccaccccagccaccaccccggctccggctccggctccagctccagctccggccccagccttggcttcagcagctaccaaggaaaggacagagtctgaggtgcctcccagaccagcctcccccaaggtcaccaggagtcccccggagacagctgccccagtggaggacatggctcggaggagtcctaggggagccaccggaaggaaggagaggtttgcctgctcctacgggactgattcttctcttgccgacatgttttttgtaaggctggtaaataaattattttggacaaaactgg

SEQ ID NO: 200666 - DNA, 1554 bp, Artificial Sequence
  derived and/or modified sequence
atgacccggctgggcaccgtgccccggaaggccctggagatgagctgtgccatccagaatcagctggcacggatactcgccgagtttgagatgaccctggaaagagatgttctccagcccctcagcaggttgtccgaggaagaattacctgccatcctgaaacacaagaagagcctgcagaagctagtgtcagactggaataccctgaagagcagactcagtcaggctacgaagaacagcggcagcagccaggggctcggtggctcaccgggatcccacagtcatactacgatggcgaacaaggtggaaacgctgaaagaggaagaagaagaacttaaacggaaggtcgaacaatgccgagacgaatatctagccgacctgtaccactttgtcactaaggaggacagctatgcaaattattttattcgactcctggagatccaggcagattaccacagacgcagtctgagcagcctggataccgcacttgccgaactaagagagaatcatggccaggctgatcactctccttcgatgacagcaacccatttccccagagtgtacggagtgagcctggccacccatctgcaagagcttggcagggagatcgccctgcctattgaggcctgcgtgatgatgttgctgtctgaaggaatgaaagaagagggcttattcagactcgcagctggagcctccgtcctcaagaggctcaaacagacgatggctagcgaccctcattccctggaagaattttgttccgacccacacgccgtggcaggagcgctgaagagctacttgcgcgagctcccagagccattgatgaccttcgacctctacgatgattggatgagggctgccagtctgaaggagcctggtgcacgcctccaggcactacaagaggtctgcagcagactgccacccgagaatctcagcaatttacgttacctgatgaaatttttagcaagacttgccgaggagcaggaagttaacaagatgaccccatccaacattgcaatcgtgctcggacccaatctcttatggcctccagaaaaggagggcgaccaggcacagctggatgcggctagtgtttctagcatacaggtggtgggcgtcgttgaggctctgattcaatccgcagacactctgtttccaggtgatattaacttcaacgtgagcggcctttttagcgccgttaccttgcaggacactgttagcgatcgcctggcttctgaggaactgccgagcactgcagtccccactccagccaccacccccgcccccgctcctgcccccgctcccgcccccgcccccgccctcgctagcgccgcgaccaaggagcggactgagtcagaggtgcccccgaggccagcatccccaaaggttacccgctcaccccccgagacagccgcccctgtggaggatatggctcggaggagtccaaggggcgcaaccgggcgcaaagagcgctttgcttgctcctacggaactgactcttcactggctgatatgttctttgtccgactggtgaacaagttattttggactaaactgtag

SEQ ID NO: 200667 - DNA, 1482 bp, Artificial Sequence
  derived and/or modified sequence
atgatgaagcggcagctgcaccggatgcggcagctggcccagaccggtagtctgggtagaacccccgagactgcggaattcttgggggaggatctgctgcaggttgagcagcgcctggaacctgcaaaacgtgctgcgcacaacatacataaaaggctgcaggcttgcttacagggacaaagtggagccgacatggacaagcgggtcaagaagttgcctctgatggccttatcaactacaatggctgagagctttaaagagctggaccccgacagttctatgggcaaggccttggagatgtcctgcgccatccagaatcagctggccagaatcttagcagagtttgaaatgacattggagagagacgtgctacagcctctgtcgcgcctcagcgaagaggagcttcctgcaatcctgaaacacaagaagtcactccagaagctagtgtctgattggaataccctcaagtctcgcctgtcccaagctaccaagaattccggctcaagccagggcttaggcggttcacctggctctcactcacataccaccatggccaacaaggtggagacactaaaagaggaggaggaggaactcaagcggaaggtcgagcagtgtagagatgaatatctggctgacttgtaccattttgtgacaaaggaagattcctacgccaattatttcattcggctcctcgagatccaggccgattaccaccgcaggtcactgtcatctctggacacagctctggctgagttgagggagaaccatgggcaggcagaccacagcccatcaatgaccgccactcatttccctcgagtgtatggcgtctccctggcgacccacctccaagaattgggacgagaaattgccctcccaattgaggcatgtgtgatgatgctgctgagcgagggaatgaaggaggaaggcctgtttagactggctgctggagcttcagttctgaaaaggctgaagcagactatggcctctgacccgcactctctggaggagttttgttcagacccccatgccgtggctggggccctaaagagctacttacgcgagctcccagagccactgatgacctttgacctatatgacgattggatgagggctgcaagtcttaaagagcctggcgcccgacttcaggccctacaggaagtgtgcagcaggctgcctcctgaaaacctgagcaacctcaggtacctcatgaaatttctggcacgtctggctgaggagcaagaagtaaataagatgacaccttcaaacatagcaatagtgctaggccctaacttactgtggcctcctgagaaagaaggcctggaatacagcggggctatctccgcgcactgcaatctgcggctgccgggatcttcagattcctcggccagcgcatgccaggttgccggtacaacagggacacgcccatcctggatgcagcctccatgcctgccttcacggtggtgggcctcatcccgacgctag

SEQ ID NO: 200668 - DNA, 1359 bp, Artificial Sequence
  derived and/or modified sequence
atgatgaagcgccagctgcacagaatgcggcagctggcccagaccggctcactgggccgtactccagaaactgccgagttcctgggcgaagatctgctgcaggtggaacagaggcttgagcctgccaagagagccgcacataacatccacaagcgactgcaggcctgtctccagggtcagagtggtgctgacatggacaagcgggtgaaaaagctgccactgatggcgctctccacaaccatggcagaatccttcaaagaactggacccagatagctcgatggggaaggcactggagatgtcctgcgcaattcagaaccagctggctagaatcttagccgagttcgaaatgaccctggagagggacgtgttgcagccactgtcacggttatccgaggaagagttgcccgcaatcctgaagcacaagaaatctcttcagaaactggtgagtgattggaatacgctcaaatctaggcttagtcaggccactaagaactctggcagctcacaaggactgggaggcagcccagggtcacactcccacacaacgatggctaataaggttgagaccttgaaggaggaagaggaggagctgaaacggaaagttgagcagtgtcgtgatgaatacctggcagacctctaccatttcgtaaccaaagaagactcttatgccaattacttcattcgcctactggaaatacaggccgactaccataggagatccctgtcttccttagacactgccctcgctgaactaagggagaaccacggccaagcagaccatagccccagcatgacagccacacactttccacgtgtttacggggtctcactggctactcacctgcaggagctcggcagagagatagcgctccctatagaagcctgcgttatgatgctgctgagtgagggaatgaaggaggagggcctgtttagacttgctgctggtgcgtctgtgctgaagcggctgaagcagacaatggccagcgatcctcatagtcttgaggagttctgctctgatccccatgccgtcgcaggggcactgaagtcatatctgcgagagctgcccgaacccctcatgacttttgacctgtatgacgattggatgagggccgctagcctgaaggaaccgggtgccaggctgcaggccttgcaagaggtgtgttcgcgcctgccccctgaaaatctctccaacttgaggtaccttatgaagttcttggcacgtttggctgaagaacaagaggtcaacaagatgacacccagtaacatagctatcgtcctcggaccgaatttattatggccacctgagaaggagggtaccgaacccgctcgggaactgggctctcagactctatgctag

SEQ ID NO: 200669 - DNA, 2106 bp, Artificial Sequence
  derived and/or modified sequence
atgatgaaacggcagctccaccggatgcgacagctggcccaaaccggcagcctcggccgaacgcctgaaacagcggagtttctgggcgaggacctcctgcaggtggaacagaggctcgaaccagccaaaagggccgctcataacattcacaagcgactccaggcttgcctacaaggccagtccggggctgacatggataaaagagttaaaaagctgccccttatggctctatcgacaactatggccgagagctttaaggaactcgatcctgactccagcatgggtaaggccttggagatgtcctgtgccatccagaaccaactggctcgcattctggctgaattcgaaatgacgctagagcgggatgttctccagccattgagtaggctcagcgaggaggagctccccgctattcttaagcataagaaatcactgcagaaattggtctccgattggaataccctcaaatcccggctgtcccaggcaacaaaaaactccgggagctcacagggcctaggtgggtctcccggatcgcactcccatacgaccatggctaataaggttgagaccctcaaggaggaagaagaggaactgaaacgtaaggtcgagcagtgcagagacgaatacctggccgacctctaccatttcgtaacaaaggaagacagttatgcaaactattttatcaggctgttggagatccaggccgactaccacagacgttctttatcctctcttgataccgccctcgcagaactgagggagaaccatggacaggccgatcattcccctagcatgacagctacccatttccctagggtatacggagtctctctggccactcacttacaggagttgggccgtgagatcgctctacctattgaagcctgcgtcatgatgttgctctcggaggggatgaaggaggagggactgtttcggttagctgcaggagccagcgttctaaagaggctgaagcaaaccatggcctccgacccgcacagtttagaagagttttgttcggatccacacgctgtggctggcgcactgaagagctatctccgcgaactcccagagcctctgatgacctttgacctttatgatgactggatgcgcgctgccagccttaaagaacccggagcgagattgcaggctctgcaagaggtttgttccagattgccgccagaaaacctatctaacttgagataccttatgaaatttctggccagactggccgaggagcaagaagtgaataaaatgacccccagcaacattgcaatcgtcttggggccaaatcttttatggccccctgagaaggagggggaccaggcacaacttgacgcagcatccgtctctagtatccaggttgtaggcgtcgtcgaggctttgatccaaagcgcagacacccttttccccggtgacattaatttcaacgtctctggcctgttctccgctgtgactctccaggacaccgtcagtgatcggctcgcatctgaagagctgccgagcaccgccgtgcccacccctgcaaccactcctgccccagcacctgcccctgcgccagccccagcaccagcgctagcctccgcggcaactaaggagcgtactgagtctgaagtacctcctaggccagccagcccaaaagtgacgagatcaccccctgagactgcggcacccgtagaagacatggctaggagaaccaagagaccggctcccgctcgcccaacaatgccccctccccaggtcagcggaagtcggagctcacctcccgctcctccgttaccccctgggtccgggagcccaggcaccccccaggctcttcctcgcagattagtgggctcgtccctccgtgccccaacagttccaccccctctgccacccaccccgcctcagcccgcaaggcgccagagccgtaggtcacctgcatcccccagcccagcgtcaccagggcctgcaagcccctcccctgtgtctctgagcaatcctgcccaggttgatcttggagcggcaactgctgaaggcggtgctccggaggcaataagcggcgttccaacccctccagccattcctccacagcctagaccgaggagcctggctagtgagacgaactag

SEQ ID NO: 200670 - DNA, 1554 bp, Artificial Sequence
  derived and/or modified sequence
atgaccagactcgggaccgtaccaagaaaagctctggaaatgagttgtgccatacagaaccagttggcgaggatccttgccgagttcgaaatgaccctcgagcgtgacgtgctgcaacccctttctcgcctctctgaggaagaacttccagccatcttgaaacacaaaaagagcctgcagaagctggtttctgattggaatacccttaagtcccggctgtcgcaggccacaaagaattcaggttcgtcgcaagggctcggtggcagcccaggaagccacagccacacaactatggcgaataaagtggagacactgaaagaggaggaagaggaactaaaaaggaaagtcgaacaatgtagagacgagtatttggctgatctttatcactttgtaaccaaggaggactcctacgctaactactttatccggctgcttgaaatccaggccgattaccataggcgcagcctcagtagccttgatactgctctcgcagaattgagagaaaatcacgggcaagccgaccatagtccatcaatgactgcgacgcacttccccagggtgtacggtgtgagtttggcaactcacctccaggagctcggaagagagatcgccttgccgatcgaggcatgcgtgatgatgctactctcagaaggcatgaaagaggagggcctttttagacttgctgccggtgcctcggtgctgaagcgacttaagcagaccatggcgtctgaccctcattcactcgaagaattttgttcggacccccatgctgtcgccggtgcccttaaatcatacctgagggaactccccgagcctctgatgacattcgatctttacgatgattggatgagggcagctagcctaaaggaacccggagctagattacaggccttacaagaagtgtgtagtcgcttgccgcctgaaaatcttagtaacctgcggtacttgatgaagtttctggcgagactcgctgaagaacaggaagtgaacaaaatgaccccctcgaatatagcaatcgttctcggtcctaacttgctgtggccccctgagaaagagggcgaccaagcccaactggatgctgcctctgtgagctctatccaggtcgtcggggtggtcgaggcccttatccagtcagctgatacattgtttccaggtgatatcaatttcaatgtaagcggtctgtttagcgcggtgactctgcaagataccgtgtctgaccgtctagcttccgaggagctgccttcaaccgcagttcccacacccgctacaacaccagctccggcacctgctcccgcacctgcccctgcgccagccctcgcctctgcagccaccaaggagagaaccgaaagtgaagtaccacctagaccggctagcccgaaagtgactaggagtccaccagaaacggcagctcccgtagaggatatggcacgacggagtccacgcggtgctaccggcagaaaggagagatttgcttgctcatatggaacggatagtagtttggccgatatgttcttcgtgcgactcgtaaataaactgttttggacgaagctgtag

SEQ ID NO: 200671 - DNA, 1482 bp, Artificial Sequence
  derived and/or modified sequence
atgatgaaaagacagctgcataggatgaggcaactcgcacagacgggctcccttggccgtacacctgagactgccgagttcctgggggaagatctactccaagtggaacaacggttagagccggctaaaagagcagcccacaatatccataagcgactccaggcctgtctccagggtcagagcggagcggacatggacaaaagagtgaagaagctcccattgatggccctgtcaactactatggcggagtcattcaaggagctggacccggatagttccatgggcaaagcactggagatgtcctgtgctattcagaatcaattagcccgtatcctcgctgaatttgagatgaccctggaaagagatgtcctgcagcctctttcacggctctccgaggaagaactccctgctatcttaaagcacaagaagtctctccagaaacttgtatccgattggaacaccctcaagagcagactcagccaggcgacgaaaaatagcgggtcctctcaaggtctgggtggatcacctggatctcacagtcataccacaatggccaacaaagtggaaacgcttaaggaggaagaggaagaactgaaaaggaaagttgaacaatgccgagacgaatatcttgccgacctctaccatttcgtgaccaaggaagacagctatgccaactacttcatccgtctgcttgaaatccaggcggactatcaccgcagaagtctgagcagcttggataccgcccttgctgagctacgcgagaatcacgggcaggctgatcacagtccttcaatgactgcaacgcacttcccacgggtgtatggggtgtcactggcaacccatcttcaggaactgggtagagagattgcactgccaatcgaagcctgcgtgatgatgctgttgtctgaaggaatgaaggaggaaggtctattccgcctggcagccggagcatcagtcttaaaaagactgaagcagacgatggcgagtgacccccactccttagaggaattctgtagcgatccgcacgccgtggctggagcccttaaatcatatctccgggaactgccagagcccctgatgactttcgatctttatgatgattggatgcgggcagcctcgctgaaggaacctggtgccaggctgcaggctctccaggaagtgtgcagtcgtctgccgccagagaacctctctaatctgaggtatctgatgaagttcttagccaggctcgcagaggaacaggaagtaaacaaaatgactccatctaacatcgcgatcgtactgggtccaaacctgctctggccaccggagaaagagggtttggagtattccggtgccatcagtgcacactgcaacctacgactgcccggatcctctgacagctcagcttctgcatgccaagtggcagggactaccggaacccggccttcttggatgcagccgccatgcctcccaagtagatggtgggcttcttccaggaggtag

SEQ ID NO: 200672 - DNA, 1678 bp, Artificial Sequence
  derived and/or modified sequence
aagagccgcgccgcaggagaggcaggctggaccgggggctccccgggcccgcgacccccgccgtgaccccgcagcccccagctcgcccccaagatgatgaagaggcagctgcaccgcatgcggcagctggcccagacgggcagcttgggacgcaccccggagaccgctgagttcctgggtgaggacctgctgcaggtagaacagcggctggagccggccaagcgggcagcccacaacatccacaagcggctgcaggcctgtctgcagggccagagcggggcagacatggacaagcgggtgaagaagcttcccctcatggctctgtccaccacgatggctgagagcttcaaggagctggaccctgattccagcatggggaaggccttggagatgagctgtgccatccagaatcagctggcccgcatcctggccgagtttgagatgaccctggagagggacgtcctgcagccactcagcaggctgagtgaggaggagctgccagccatcctcaaacacaagaaaagcctccagaagctcgtgtccgactggaacacactcaagagcaggctcagtcaggcaaccaagaattcaggcagcagtcaaggcctaggaggcagcccgggtagtcacagccatacgaccatggccaacaaggtggagacgctgaaggaggaggaggaggagctgaagaggaaagtggagcaatgcagggacgagtacttggctgacctgtaccactttgttaccaaggaggactcctatgccaactacttcattcgtctcctggagattcaggccgattaccatcgcaggtcactgagctcgctggacacagccctggctgagctgagggagaaccacggccaagcagaccactccccttcgatgacagccacccacttccccagggtgtatggggtgtcgctggcaacccacctgcaagagctgggccgggagattgccctgcccatcgaggcctgcgtcatgatgctgctttctgagggcatgaaggaagagggtctcttccgtctggctgctggggcctcggtgctgaagcgtctcaagcagacaatggcctcggacccccacagcctggaggagttctgctccgacccgcacgctgtggcaggtgccctcaagtcctatctgcgggagctgccagagcctctgatgaccttcgacctctatgatgactggatgagggcagccagcctgaaggagccaggggcccggctgcaggccctccaagaggtgtgcagccgcctaccccccgagaacctcagcaacctcaggtacctgatgaagttcctggcacggctggccgaggagcaggaggtgaacaagatgacacccagcaacatcgccatagtcctgggacccaacttgctgtggccacctgagaaagaagggctggagtacagtggcgcaatctcggctcactgcaacctccgcctcccgggttcaagcgattcttctgcctcagcctgccaggtagctgggactacagggaccaggcccagctggatgcagcctccgtgtcttccatccaggtggtgggcgtcgtcgaggcgctgatccagagcgcagacaccctcttccctggagacatcaacttcaacgtgtcaggcctcttctcagctgttaccctccaggacacagtcagtgacaggctggcctc

SEQ ID NO: 200673 - protein, 1156 aa, Artificial Sequence
  derived and/or modified sequence
MGNLLSKFRPGCRRRPLPGPGRGAPAPLSRDASPPGRAHSVPTPRPFRGLFRRNARRRPSAASIFVAPKRPCPLPRAAAAPLGVLPAVGWGLAIRKTPMLPARNPPRFGHPSSVRIPPPSRMFTLLLPSPREPAVKARKPIPATLLEETEVWAQEGPRRVKKDEDPVQIEGEDDEKRTPLSSGEASSTSRSQGTQGDVASFRCSPGPLEGNVYHKFSENSMSEKAQASPASSCLEGPAMPSTHSQAGCARHLGKPDPDATAPPEPAVGCSLLQQKLAAEVLNEEPPPSSLGLPIPLMSGKRMPDEKPFCIPPRSAAPPRAARNRPCKRKMSIPLLLPLPPSLPLLWDRGELPPPAKLPCLSVEGDLHTLEKSPEYKRNSRILEDKTETMTNSSITQPAPSFSQPVQTTDSLPLTTYTSQVSAPLPIPDLADLATGPLILPIPPLSTTPKMDEKIAFTIPNSPLALPADLVPILGDQSNEKGGSYNSVVGAAPLTSDPPTPPSSTPSFKPPVTRESPISMCVDSPPPLSFLTLLPVPSTGTSVITSKPMNSTSVISTVTTNASAHLTSQTAVDPEVVNMDTTAPSQVVIFTSSLSSRVSSLPNSQIHCSAEQRHPGKTSVYTSPLPFIFHNTTPSFNQLFGKEATPQPKFEAPDGQPQKASLPSACVFLSLPIIPPPDTSTLVNSASTASSSKPPIETNAMHTTPPSKAVILQSASVSKKYLPFYLGLPGSGNTQPSGNTASVQGSTSLPAQSVRAPATASNHPLNPGATPQPKFGAPDGPQQKTSLPSAHDFLSLPIMVPPDTSTLVSSASAASLSKPAIDTSDMNTTPPSKTVILQSTFVSRKEEYIRFYMGLPGSGNTLHSDSIASAQVSTSFPAQADRRPTTTSSHPLNTGSISHSTLGATDGQQKSDSSFILGNPATPAPVIGLTSPSVQPLSGSIIPPGFAELTSPYTALGTPVNAEPVEGHNASAFPNGTAKTSGFRIATGMPGTGDSTLLVGNTIPGPQVIMGPGTPMDGGSIGFSMSAPGPSSTSGELNIGQGQSGTPSTTSVFPFGQAAWDPTGHSMAAAPQGASNIPVFGYTSAAAYIPGLDPPTQNSCSGMGGDGTRSIVGGPCVPAFQQCILQHTWTERKFYTSSTHYYGQETYVRRHVCFQLP

SEQ ID NO: 200674 - DNA, 87 bp, Artificial Sequence
  derived and/or modified sequence
atggacctggcatctgaaattacttccgccacccagacgtctagtctgtgcagctccggacggggacatgccggttatcctgcctag

SEQ ID NO: 200675 - DNA, 3471 bp, Artificial Sequence
  derived and/or modified sequence
atgggtaatcttcttagcaaatttagacctggctgtcggagaaggccgctgcctggccccggacgcggagcacccgcgcccttaagcagagatgctagtcctccgggaagggcacactccgttccaacccccaggccttttcgaggactattcaggaggaatgctcgccgcagaccatctgcggcgtccatttttgtcgcacctaaacggccttgccccctccctagagcagccgctgcaccactcggtgtcctgcccgccgtaggttgggggctggctattagaaagacccctatgctgccagctcgcaacccaccccgcttcggtcacccatcaagtgtccgcattcctcccccttccaggatgttcacgttactgctgccatccccaagagagcccgccgtgaaggcccggaagccaatacccgccaccctgctggaggaaactgaggtctgggcccaggagggtccccgaagagtgaagaaagacgaggaccccgtgcagattgaaggcgaagatgatgaaaagcggacaccactctcgtccggcgaagcctcaagcacgagtcggtctcagggcactcagggggacgtggcaagtttcaggtgctctccaggcccacttgagggaaacgtctatcacaaattctcggagaattctatgtccgagaaagcccaagccagcccggcctcctcgtgcctggaaggtccggcgatgccatcaactcactcccaggctgggtgtgctcgccacctgggaaaacccgatcccgacgctaccgcccctcctgagccggcggtgggctgctccctgctgcaacaaaagctggcggccgaagtcctgaatgaggagcctcccccctcctccctggggctccccataccactcatgtctggcaaacgcatgccagatgaaaaacctttctgtatcccaccccggtccgcagcaccacccagggctgctagaaaccgaccttgcaaaaggaagatgagtatcccgctgctgcttcccctacccccctctcttcctctgctgtgggaccggggcgagcttcctcctcctgcaaaactcccatgtctatccgtagagggagacctgcatacccttgagaagagtcccgagtataagcggaatagcaggattctagaggacaagacggagactatgaccaactcgagcattacccagcccgccccctcattctctcagcctgtacagaccaccgactctctccccctgactacctacacaagccaggtaagcgcaccgctcccgatccccgacctggcggacctcgccaccgggccgctgatcctgcctatcccccctctgtctaccactccgaagatggacgaaaagatcgccttcacaattcccaatagtcctctcgccctgccagctgatctcgtacctattcttggagatcaaagcaatgagaagggcggatcatacaacagcgtggtgggcgccgcaccgctgaccagtgatcccccgacccccccttcctctactccctcgttcaaacctccagtgacccgcgagtcccctatttctatgtgtgtggactccccgccgcccttgagctttttgacactcctccccgtaccaagtactggtacttcagtgatcacatcaaaacccatgaactctactagcgtcatttcgactgtcaccacaaatgcttcagcccatctgacgtcccagaccgccgttgatcccgaggtagtgaatatggatactacggctccgagccaggttgttatcttcacatccagcctctcatcccgcgtgtcttccctacctaactcccagatccactgttcagctgagcagcggcaccccgggaagactagcgtctatacttcccctcttccctttatttttcacaacaccactccttctttcaatcagttatttggcaaagaagccacgccccaaccaaagttcgaagctcctgatggacagccccagaaggcctccctgcccagcgcgtgcgtgtttctgtcactgcctattatcccgccaccagacacttccactctcgttaactccgcaagcaccgcatcctcttcaaagccaccgatcgagaccaacgccatgcatacaactcctcctagtaaggctgtgatattacagagtgctagcgtctctaagaaatatttgccattttatctggggctaccaggatcaggcaacactcagcccagcggaaatacagcctccgtgcaggggtcaacatcacttcccgcccagtccgtgcgcgcccccgccaccgccagtaaccacccccttaaccctggcgccactccacagcctaaattcggcgcgcctgacggcccccaacaaaagaccagcctacctagcgcgcacgattttttgtctctgcccataatggtccctccagatacatcaacgctggtatcttcagcctcggccgcatcactcagtaagccagcaatcgacacctcagacatgaacacaactcccccatctaaaacagttatactgcagtcaaccttcgtgtcccggaaggaggagtacattaggttctatatgggcttgccagggagcggcaacacactgcacagcgacagcattgcgtctgcacaggttagcaccagctttccagctcaggccgaccggaggcctacaaccactagctctcatcccctaaatacaggctcaatatcccatagcaccttaggcgctaccgacggacaacagaagtccgattcttctttcattctgggtaatcctgctacccctgccccagtgatcggactgacgagcccctcggttcagccactgtctggctctatcattccccctggcttcgcagagttgactagcccttacaccgctctggggacccccgtcaatgcagagcctgttgaaggtcataatgcatctgcttttcctaacggtactgccaagactagcgggtttcggattgctacaggaatgcccgggacgggcgattcaacgctgttagttgggaatactattcctgggccacaggtcatcatgggacctggcacccctatggatggaggcagtatcgggtttagcatgtctgcaccgggcccttcgtccaccagcggtgaactgaacatcggacaggggcagtccggaacaccaagtacgacttccgtatttccatttgggcaggcagcctgggaccctactgggcactcaatggcggccgcgccccagggcgccagcaacatccctgtttttggatacacctctgccgcggcctacataccaggcctggatccgcctactcagaatagctgctccggaatgggaggagacgggacccgctcaattgttgggggcccttgtgtgcccgcatttcaacagtgtatattacagcacacctggacggagagaaaattctacacatcctccacccattactacggtcaagaaacttatgtccggcgtcacgtatgttttcagctgccctag

SEQ ID NO: 200676 - DNA, 3471 bp, Artificial Sequence
  derived and/or modified sequence
atgggcaacctgctgagcaagttccggcccggctgcagaagaagacccctgcccggccctggccgcggggccccagcccccctgagcagagatgccagccccccaggccgggcccacagcgtgcccaccccccggcccttccggggcctcttcagaagaaatgccaggagaagacccagcgctgccagcatctttgtggcccccaagaggccctgccccctgcccagggctgctgctgcccccctgggcgtgctgcctgctgtgggctggggcctggccatcaggaagacccccatgctgcctgccagaaatccaccccgcttcggccaccccagctctgtgcgcatccccccacccagcaggatgttcaccctgctgctgcccagcccccgggagcctgctgtgaaggccaggaagcccatcccagccaccctgctggaggagacagaggtgtgggcccaggagggcccccggcgggtgaagaaggatgaggaccctgtgcagattgaaggagaagatgatgagaagaggacccccctgagcagcggggaggccagcagcaccagccgcagccagggcacccagggagatgtggccagcttccgctgcagccctggccccctggagggcaatgtgtaccacaagttcagcgagaacagcatgtctgagaaggcccaggccagccctgccagcagctgcctggagggccctgccatgcccagcacccacagccaggccggctgtgcccggcacctgggcaagccagaccctgatgccacagcccctcctgagcctgctgtgggctgcagcctgctgcagcagaagctggccgctgaggtgctgaatgaggagcccccacccagcagcctgggcctgcccatccccctgatgtctgggaagaggatgccagatgagaagcccttctgcatccccccaagatctgctgccccaccccgggccgccaggaaccggccctgcaagaggaagatgagcatccccctgctgctgcccctgccccccagcctgcccctgctgtgggacagaggagagctgcccccaccagccaagctgccctgcctgtctgtggagggggacctgcacaccctggagaagagccctgagtacaagaggaacagccgcatcctggaggacaagacagagaccatgaccaacagcagcatcacccagcctgcccccagcttcagccagcctgtgcagaccacagacagcctgcccctgaccacctacaccagccaggtgtctgcccccctgcccatcccagacctggccgacctggccaccggccccctcatcctgcccatcccccccctgagcaccacccccaagatggatgagaagatcgccttcaccatccccaacagccccctggccctgcctgctgacctggtgcccatcctgggggaccagagcaatgagaagggcggcagctacaacagcgtggtgggcgccgcccccctgaccagtgacccccccaccccacccagcagcacccccagcttcaagccccctgtgacccgggagagccccatctccatgtgtgtggacagccccccacccctgtccttcctgaccctgctgcctgtgcccagcacaggcaccagcgtcatcaccagcaagcccatgaacagcaccagcgtcatcagcacagtgaccaccaatgccagcgcccacctgaccagccagacagctgtggaccctgaggtggtgaacatggacaccacagcccccagccaggtggtgatcttcaccagcagcctgagcagccgggtgagcagcctgcccaacagccagatccactgcagcgctgagcagaggcaccctgggaagacctctgtgtacaccagccccctgcccttcatcttccacaacaccacccccagcttcaaccagctgtttgggaaggaggccaccccccagcccaagtttgaggccccagatggccagccccagaaggccagcctgcccagcgcctgtgtgttcctgagcctgcccatcatccccccaccagacaccagcaccctggtgaacagcgccagcacagccagcagcagcaagccacccatcgagaccaatgccatgcacaccaccccacccagcaaggccgtcatcctgcagagcgcctctgtgtccaagaagtacctgcccttctacctgggcctgcccggcagcggcaacacccagcccagcggcaacacagcctctgtgcagggcagcaccagcctgcctgcccagagcgtgcgggccccagccacagccagcaaccaccccctgaaccctggggccaccccccagcccaagtttggagccccagatggcccccagcagaagaccagcctgcccagcgcccatgacttcctgagcctgcccatcatggtgcccccagacaccagcaccctggtgtcctctgccagcgctgccagcctgagcaagccagccatcgacaccagtgacatgaacaccaccccacccagcaagacagtcatcctgcagagcacctttgtgtccaggaaggaggagtacatccgcttctacatgggcctgcccggcagcggcaacaccctgcacagcgacagcatcgccagcgcccaggtgtccaccagcttccctgcccaggccgacagaagacccaccaccaccagcagccaccccctgaacacaggcagcatcagccacagcaccctgggcgccacagatggccagcagaagagtgacagcagcttcatcctgggcaacccagccaccccagcccctgtgattggcctgaccagccccagcgtgcagcccctgagcggcagcatcatccccccaggctttgctgagctgaccagcccctacacagccctgggcacccctgtgaatgctgagcctgtggagggccacaatgccagcgccttccccaacggcacagccaagaccagcggcttccgcatcgccaccggcatgcctggcactggagacagcaccctgctggtgggcaacaccatccctggcccccaggtgatcatgggccctggcacccccatggatggcggcagcatcggcttctccatgtctgcccctggccccagcagcaccagcggggagctgaacatcggccagggccagagcggcacccccagcaccaccagcgtcttccccttcggccaggccgcctgggaccccaccggccacagcatggccgccgccccccagggcgccagcaacatccctgtgtttggctacaccagcgctgctgcctacatccctggcctggacccccccacccagaacagctgcagcggcatgggaggagatggcaccaggagcatcgtgggcggcccctgtgtgcctgccttccagcagtgcatcctgcagcacacctggacagagaggaagttctacaccagcagcacccactactacggccaggagacctacgtgcggcggcacgtgtgcttccagctgccctag

SEQ ID NO: 200677 - DNA, 3471 bp, Artificial Sequence
  derived and/or modified sequence
atgggcaacctgctgagcaagttccggcccggctgccggcggcggcccctgcccggccctggacgcggcgctccagcaccactttccagggacgcttccccacctgggagagcccacagtgtcccaaccccccgcccctttagaggtcttttcagacggaatgcccgccgccggcctagtgcagcctccatttttgttgctccgaagcgtccttgccccctcccacgtgccgcagctgcacctttaggcgtcctccctgctgtggggtggggtttagctattcgaaagaccccgatgctgccagcgagaaatccaccaagattcggtcatccttcgtctgtacggatcccacccccaagcaggatgttcacactcttgctgccctctccacgggaacctgctgttaaggcacgcaagccaatcccggcgaccctgctcgaggaaacggaggtctgggcccaggagggcccacgacgcgtgaagaaggatgaggatcccgtgcagattgagggagaggatgatgagaagcgcactcctctcagttcaggcgaggcctcttccacatctaggtcccaagggactcaaggagacgtagctagctttagatgttctcctggcccactggagggtaacgtgtaccataagtttagcgagaactcgatgtcagagaaagctcaggcttcgcctgccagctcatgcctggaaggtcctgctatgccatccacccacagccaagccggttgtgctcgccatctggggaagcccgacccagatgcaacagcgccgccggagccggctgtcggctgttctttactgcaacaaaaactagccgcagaagtgttgaacgaggagcctcctccttcaagcttgggtctccccatccctctgatgagcggcaagcgcatgcccgatgagaaaccattctgcatcccccctcggagtgcggctccccctcgggctgcgcgtaaccgcccttgcaaacgtaaaatgagtatccctttactgctgccattgcccccctcgttgccgctgctgtgggatagaggggagctgcctccccccgccaagctgccttgtctttccgtggaaggtgatttgcatactctcgaaaagtcccccgagtataagcggaacagcagaattttagaagataaaactgagacgatgaccaattcttctataactcaaccggccccatctttttcacaacctgtgcagactaccgatagcttaccgctcactacatacacgagccaggtcagtgcccccttgccgattcccgatctggccgacctcgccaccggcccacttattcttcccatcccgcccctttccacaacacccaaaatggatgaaaagatagcctttacgataccaaatagtcccctcgccctgcccgccgacctggtgccaattcttggagatcagagcaatgagaaaggaggctcctacaatagtgttgtcggagcagcccccctgacgtctgatcctcctacccctccctctagtacaccatcattcaaaccacccgtcacaagggaatcccccatttctatgtgtgtggactctcccccgcctctctcatttctgacactgctgcctgtaccttccaccggcacctctgtgattacatcgaagcctatgaactctacttcagtgatctcgactgtcaccacaaatgcgtctgcccatcttacgtcccagaccgccgtggatccggaggtcgttaatatggatacaactgcccccagccaagtggtgatctttacatcgtcactgagctcccgggtgtcatccctgcccaattcccagattcactgctccgctgagcagagacatccaggcaaaacaagcgtctatactagccctctacccttcattttccacaacactaccccgagcttcaaccagctgttcgggaaggaggccacccctcaaccaaagttcgaagcccctgacgggcagcctcagaaagccagcttgccctccgcctgtgtgttcctgtcacttcccatcattcctcctccagataccagcactcttgtaaactctgcatctacagcttccagttcgaaacctccgatcgaaaccaacgcaatgcacacgacgccaccttccaaggctgtaatactacagtctgcctctgtgtccaagaaatacttgccattttatctggggttgcccgggtctgggaacactcaaccctccggtaatacagccagcgtgcaaggatccacctcgctgcccgcacagtctgttcgggctccagccacagcatcaaatcaccctctgaacccgggagcaactccccagccaaaattcggagccccagacggaccgcagcagaagacttcgctcccaagtgcccatgactttctgagtttgcctattatggtccctcctgacacatccacattggtgtcatctgcctcagccgcttcactgagcaaaccagccatagatacaagcgacatgaacaccacccctccctcaaaaactgtgatcctgcagtctacattcgtgagccgaaaagaggagtacatccgcttttacatgggtctaccaggcagtggtaatacgcttcatagtgactctatagcctcagcccaagtatcaacgtcgtttcccgcccaggccgatcgccgtccaacgaccacatcctcccacccactgaataccggaagtatctcacacagtactctcggagccactgatggtcagcagaaatcagatagctcttttatcctgggcaaccccgccacacccgcccctgtcatcggactgacctctccatctgtccagcctctgtctggtagtataattccaccagggttcgcggaactcacctcaccttacacagcgctcggaactcctgtgaacgccgagcccgtggagggacacaatgccagcgcatttcctaatggtacggctaagacctccggctttcggattgctaccggcatgcccggtacgggggacagcactctgctggtaggcaacactattcctggaccccaagttatcatggggcctggtactcctatggatggaggatccatcggctttagcatgtctgcaccagggcccagtagtacttctggcgagttgaatataggacaaggccaaagcggtacgccctctactaccagcgttttcccgtttggacaagcggcctgggacccaacaggccacagcatggcagctgctccacagggcgcctctaatattcctgtcttcgggtacacctctgccgcggcctacattcccggtctggacccccctacacaaaactcatgctcgggaatgggcggggatggcacacgcagtatcgtggggggtccctgtgtgcctgctttccagcagtgcatactgcagcatacatggactgagcggaagttctacacttcaagtacccattactacggccaggagacgtatgtgcggcgtcatgtttgctttcaactcccatag

SEQ ID NO: 200678 - DNA, 3471 bp, Artificial Sequence
  derived and/or modified sequence
atggggaatctcctcagtaagttccggccagggtgtagacggaggcccctccccggacctggaaggggagcacccgctccgttgtcacgggatgccagtcctcctggccgagcccatagtgtgcccacacctagaccgtttcggggactgttcagacggaacgccaggaggcgacccagcgctgcctctatctttgttgccccaaagcgcccttgtccattacctcgcgcagcagccgcaccactcggggttttgcctgccgtggggtggggccttgccatcaggaagacaccgatgttgccagcaagaaaccctcctcgctttggccacccatcatccgtccggatcccgccaccatccaggatgttcaccctgcttctgccctcccctcgggagccagccgtcaaggctcgcaagcctatccccgctacacttctggaagaaaccgaagtgtgggcgcaggaaggacccaggcgggtgaagaaagatgaggaccccgtccagatcgagggcgaggatgacgaaaaacggacacccctgtcctcaggcgaagcctcctccacatcaaggagtcagggcactcagggcgatgtggccagttttcgttgctcgccgggtccgctggaaggaaacgtgtaccacaagttttctgagaactccatgtccgaaaaggcccaggccagtcctgcttcttcctgccttgaaggcccagccatgccatcgacccactcgcaagccggttgcgctcgccatctgggaaagcctgatcctgacgccactgctcctccggagccagccgtgggttgctccctgctgcagcagaagcttgccgctgaggttctcaacgaagaaccccctccctcaagcttaggcctcccgatcccacttatgtctggcaagagaatgcctgacgaaaaacctttctgcatcccaccccgttccgctgctcctcccagggctgccaggaaccgcccttgcaagcgaaagatgtccatacctctactgctgccacttcccccaagtctgcctctattgtgggataggggggaactgccaccacccgctaagttaccttgtctgagtgtcgaaggagacctgcataccctagagaagtcccctgaatataaacgcaactctcgcatattggaagacaagactgagaccatgactaactcttctatcacgcaacctgcaccgagtttctctcaaccagtccagaccaccgacagcttaccgcttaccacctacaccagccaggtctccgcccctctacccattcccgatctagcagaccttgcaaccggaccgctgattttgcctatcccccctctgtcaaccacaccaaaaatggatgagaagatcgcattcaccatcccaaattcacctctggcactgccagccgatcttgtgccgatcctcggagaccaatcgaatgagaaggggggaagttataattctgtggtcggagcggctcctttgacctccgaccctcctactcccccaagtagcacgccatccttcaagccccctgtgacaagagagagccctatctctatgtgcgtggatagccctcctcccctcagtttccttaccctgttgcccgtccctagtaccgggacctcggtgatcacctcaaagcccatgaactctactagcgttatttccacggtcaccactaacgcgtccgcgcaccttacgtctcaaactgcggtcgatcctgaagtggtgaatatggacacaaccgccccatcccaggtggttattttcaccagtagtctgtcctccagggtttcatccctccccaactcccagattcactgctctgctgaacagcggcaccctggaaaaacaagcgtctacacctctccattgccatttatctttcacaacaccactccatccttcaatcagctcttcggcaaggaagctacacctcaacccaagtttgaagcgcctgatggtcaaccacagaaggcctccctgccatcagcctgtgtttttcttagtctacccataatccccccacccgacacaagtacacttgtcaattcagccagcactgcgtcctccagcaaaccacctatcgaaacaaacgccatgcacaccactccccctagcaaggcagtcattctgcagtctgctagcgtgtcaaaaaagtacctacccttttaccttggcttgcccggatctggcaacacccagccgagcggaaatacggccagcgtccagggaagcacaagcctacctgcccagagcgtgagagcacctgctacagcaagtaatcatccactgaaccctggagccacccctcagccgaagttcggcgcacccgatggtccccaacagaagaccagtctgccaagtgcgcatgattttcttagcttgcctatcatggtgcccccagacacatctaccctggtgtcatccgccagcgcggcttcgctgtcaaagcctgctatcgacactagcgatatgaataccacccctccatctaagactgtaatcctgcagtctacttttgtttctcggaaagaggagtacataagattctatatgggacttccaggtagcgggaatactcttcacagtgatagcatagcaagcgcccaggtgtccacatctttcccggcacaggctgaccggagaccaacaactacatcgtcccaccctctgaataccggctcaatatcccatagtaccctgggcgcaactgatggtcagcagaaaagcgatagctcctttatcttggggaacccggcaaccccagctcctgttattgggctgactagtcccagcgtgcagcccctgagcggctcaataataccacccggtttcgcagagctaacatccccctatacggccctgggcacgcccgtgaatgctgagcccgtggaggggcacaacgccagcgcattccccaatgggactgctaagacctccggtttccggattgctacagggatgccaggtacaggcgactccaccctcttggtgggcaatacaattccaggccctcaggtcataatgggcccaggcacgccaatggatgggggatccatcgggttctctatgagcgcccctggcccttcctctacatccggggagttgaatataggacagggccaatctggaacacccagtacgactagcgtgttccccttcgggcaggccgcttgggacccgactgggcattccatggctgccgcaccacaaggagcttcaaacattccagtatttggatatactagcgctgccgcatacataccgggtctggacccgcctacccagaacagctgcagtggtatggggggagatggaacccgaagtatagtcggaggcccttgtgtccccgctttccagcagtgtattctccagcatacatggacagaacggaagttttacaccagctcaacacactactacggccaggaaacatacgtccgaaggcacgtgtgtttccaactgccctag

SEQ ID NO: 200679 - DNA, 8053 bp, Artificial Sequence
  derived and/or modified sequence
aaggtcctagaggaggctggcaggatataggttgtcctgtgcttaacttgaagcagatgtgccctctgtgaaccggggaatggggacggccgacacagggccactgcgtgcaacagcgccgggccagggctaaggaacaggcagagccggcgcccaggtgacaagagctctggcgatgggcccgcaggccccagcagttccctcatagaggccacgcggtgcaacacctgccaccggcagcggggcttccgggggtcctggggcagctggggccgacggggcgtcgccctttgccctctgacccctgccttttgcgcccccgctggcgctccctggttctgtgaggaacctcgcggcggcgtcgcaggcgtagagccagtcagtttgtgcttggtcgccagaggaggcggtggctgaggagagttgagtccactgctgaccctgttttacggtaggaggcacggctagctctaaatgggcaatttacttagtaaatttagacccgggtgccgccgccggcccctgccagggccagggcgtggcgcccccgctcccctgtcccgggacgcctccccgcccggtcgggctcactctgtacccaccccgcgccctttccgcggcctgttccgccggaacgcccgtcgcaggccttcagcagccagcatcttcgtcgcccctaagaggccgtgtcctctccctcgggctgcggccgcccctctgggggtcctgccggctgtgggttgggggctggccatcaggaagacacccatgctgcctgctcggaaccccccgaggtttggacaccccagttccgtaaggatccctcctcccagccgcatgttcactctcctgctgccttcaccacgtgagccggcggtcaaggccaggaagcccatcccagccactctcctggaggagaccgaggtgtgggcccaagaagggcccagaagagtgaagaaggatgaggatccggtgcagatcgaaggggaggatgacgagaaaaggaccccccttagcagcggagaagcatcgtccacatccaggtcccagggcacccagggagacgtggcctccttcagatgcagccctgggcctctggagggaaatgtctaccacaagttctcagaaaacagcatgagtgagaaggcccaggcgtctccagcgagctcctgcttggaaggccctgccatgcccagcacacacagccaggccggatgtgcccggcatcttggaaagcctgatccggatgcaacagcgccccctgagccagccgttggctgctccctgctgcagcagaagttggctgcggaagtgctgaatgaagagccaccgcccagctccctaggcttgccgattccgctgatgtccggaaagaggatgcctgatgagaagcctttctgtattcctccaaggagcgctgctcctcccagagctgcccgcaacaggccctgcaaaaggaaaatgtcgattccattgctgctgccgctgcccccttcactgccattgctgtgggatcgaggtgagcttcccccacctgctaagctcccctgcctgtctgttgagggagacctacacaccttggagaagagccctgagtataaaaggaatagcagaatcttggaggataaaacagagaccatgacaaacagcagcatcacccagcctgccccttctttctcccaacctgtgcagaccacagactccctgcccctgaccacttacacttcccaggtctcagctcctttgcccatccctgacttggctgacctggctactggacccctcatcctgcctatccctccactttccaccacaccaaaaatggatgagaaaatagcattcacaatccctaactctcctctggctcttcctgctgaccttgttcccattttgggtgatcagtctaatgagaaaggaggctcttataattcagtcgtaggagcagcgcctctcacttctgaccccccaacacctcctagctccacaccctccttcaagcctcccgtcacaagggagtccccaatatctatgtgtgtggattcccctcctcctctttccttcctgactcttcttccagtcccttccaccgggacctcagttatcaccagcaagcctatgaattccacgtcagtcatttccactgtcacaacaaacgcatctgcccacctaacctcacagactgcggtagaccctgaagtagttaatatggatactactgccccatctcaggttgttattttcacatcttccctaagctccagagtgagctctctcccaaattcccaaatacattgcagtgcagagcagaggcacccgggaaagacatcagtctacacatccccacttccatttatattccacaataccaccccaagttttaaccaactctttggaaaagaagccacccctcagcccaaatttgaggctcctgatgggcagccgcagaaagcttctctccccagtgcctgtgttttcctgagccttcccatcattcctcctccagacacctccactttagtgaacagtgcctctacagcatcatcatccaaacctcccattgaaaccaatgctatgcataccactcctccttccaaggctgtcatcttgcagtctgcctctgtctccaagaagtacctcccattttacctggggcttcctggttctgggaacacacaacccagcggcaacactgcctcagtccaaggctccaccagtttgcctgcacagtcagtcagggcaccagctacagcttccaaccatcctttaaatccaggagccacccctcaacccaaatttggggcccctgatgggccgcagcagaaaacctctctccccagtgcccatgatttcctgagccttcctatcatggttcctccagacacctccactttagtgagcagtgcctctgcagcatcgttatccaagcctgccattgacaccagtgacatgaataccacccctccttccaaaactgtcatcttgcagtctacctttgtctccaggaaggaggagtacatccgattttatatggggcttcctggttctgggaacacactacacagtgacagcattgcctcagcccaagtctccaccagttttcctgcacaggcagataggagaccaaccacaacttccagccatcctttaaatacaggatccatctctcattccacacttggggccactgatgggcagcagaagtctgacagttcttttattctggggaatccagcaaccccagcaccagttataggcttaacatctccttcagtccagccactgagtggcagcataattccaccaggttttgcagagttaacatcaccatatactgcattgggcacacctgttaatgctgagccagtcgagggtcacaatgcaagtgctttccccaatggcacagcaaagacttctggatttagaattgccactgggatgcctggcactggagacagtaccttactggttggaaatactattccaggcccacaagtgattatgggacctggaacccctatggatggtgggagcattgggttcagcatgtctgccccaggccccagttccacatcaggagaactcaacattggacaaggacagagtgggacacccagcaccacttctgttttcccatttggtcaggcagcctgggacccaactggccacagcatggctgctgcaccacaaggggctagcaacattcctgtatttggatatacttctgctgccgcctacattcctggtttagacccacctacccagaattcatgcagtggtatgggaggggatggcaccagatccatagttggaggcccttgtgttcctgcttttcaacagtgcatcctgcagcacacatggacagagagaaaattctacacttcaagcacccactactatggacaagaaacatatgttaggagacatgtctgtttccaacttccgtaagagcacctgtggttcacctgatcacaccacatcagttgtggttgtaaataccagcattatccttttgtatggtcatgcttctagtttcatcttcatgccaagcacctgccatgtacctctccagaactcaggttgtgcaccaggaggggacaacaacatccctgtgctccctttctctgtcagtacacatgggtcccacctggacaaaacacaggtggtgcatctgcagtgaatggcaacatatctttaattagaggcccttgtgtatccacctaccaacaaagtacctagggcccacctggacaaaacacagatggtacctcttccaggagtgtcaacattcatttgatagaaggccctcatgtgcccatgtatcagcaaagcacctggggcccacctggacaaagcacaaaccatgcaatgagggacagcaacacaacggctgtgactggttgtacttttggtcccccatttacacaaagcacctgaggcccacctggctaaatgcaggtggtgcaataggagatagccccagatatttgtagggagaaacctctagtctccctttcagtaaaaatactatggacctgcccaaccaaggtgctccttttgactttagaggaaccagcattgtttttgttttggtttgtttgtttgtttgtttgtttgtttgtttgtttttgagacggagccttagcccaggctggagtgtagtagcacaatctcggctcactgcaacctccacctcctgggttcaagcaattctcctgtcttagcctcctgagtagctgggactacaggcatatgccaccacacctggctattttttataattttagcagagacagagttccaccttattggccaggctggtctcaaactcctgacctcaggtgatccacccacctcggcctcccaaagtgctaggatgacaggtgtgagccaccatgcccagcctagaggagccagcattgttagttaaatacttgtgtttggatggtcctggtcagagcacctgtgcctgtgatggaaagcagccactagtgacacttgtacctgccaaggccttcataggagccaccaactcattttttactcctatcaatggtcttaagaaataagcactctccctgcacatacagttctcataaattgacattgttccaggaggaatgggctcagttccctcaaggttaaacttaacctgctctcttcctacagaagctggaggcccaaaaccacagacagagagagagagagtgtgtgtgtttgtgtgtgtgtgtgtgtgtttattggtgagtgtggagcagatgagcccagtcagaaccgcactgtattttagtggtcttctgcactgtggagggtagaggaaacctggcttgactgttaacttggctgaccctacctctgggccagttctctctagtcatggacagaaaggcaaaattcccgactttgtggaccctatattctagttgaaggggagaaaagaagcaaaaacatggaaattatctggtaaattagccagtaacgaatgctatgaaaaataaagaagtacatggaggattgagattgtagatagaagcaggtgtttcagtttacactgtgaacaagcctcactgggaaggtaaatttaaacgaagcctagagagaagcagttgagccagatatatgagcaaagacctttccagataataggagtggtcattgcagaggctcaaaggaaggatccctggtgtcctcatggagcagttagtaaggaaatgtggctggaatggagtcagcaagtgggagggagggatagagaagaggacagaggagagatgtgagtggaattccttcctccactttttactaattgtgtaataacagttgactcaaacttcaaaagtctcaatgaaatcagtacttttactatggcctgtttatctcataagatttttgaaaggataaaatgaaataatatggagaaatgacttataagcttttgttgtaatttgttatatacatagggatggatagacggatggatagattagatgatagatagatagatagatagatgataacgttatggactgaatgtttgtgtacccccaaaaattgatattttgaagcctaacttccagtgtgatggtattaggaggtgaggctttggggaggtgattaggtttagatgaagtcatgaaaatgaaacccccatgatgggatttgcgcctttatgagaagaaataccagtgctttctctaattgccatgtgaaggtataccaacaaggtaacagtctgtaagccaggaaaagagtcctcacaagaaacagaatttgtctttatcttggacttcctaacctttagaattgtagaaaataattgaatgttgtttaagctaccagtctgtggcattttttgtagcaatcagaactgactaataaagatagatagatgatagatagatacatagatagatgatagagatagatgatagatagatagatagatagatagataatatacatatatatgtatggtcaatgactgagttccttaggcaatggtgccctgattgcctttattaggcaattcaaatagaagaatagaagaacccccttttttttttgagatggagtcttgctctgtcacccaggctggagtgcagtggcgtgatcttggctcactgcacgctccacctctcggaagaacccctttttattagcataaaagcacttacttttatgaagcaaacacatgtaaaaatatgataacagagactaaaacatttatgagattaggcctgaaagaaaacaatcacagagaaattactgaattcctcttggcaccctggggcctgattcattcgctctaaattgtttagtacagttccagaggatcaaagctcctgtttcctggccagataatcacctaacttttgtaatcagaactgcctttcagaagtagagtggaaatccagttttcttctaatagccctatacccttgcagtattaccagggacaaattttttaaaattcatacttcttgacattttttaaaaggcttcaagctaaatattatgatcctggtaagacaaactttgaataaatgtgtgagagatacaaagataatttttgttttcatgttttgatgcacttacacaactgaaactatttctaaatattcttttattttttattaagataaaaagcaaacataatatcaatttaaataatactgaaagtcaaccttcctaccacagttccctcctccagagatagtgtttagctactttgatgtcactcccatagttctgagtttgcttttttacttcaactattatgttatcttacagatgtcattgtttttcctaaaacttgaagtgccttcctttttttctccttgaactcttttcccataaaaaaaaaatgtttttggtttctagaattttcaaatagtattgtttacttgactgaatcccttccttttccagaaaccttgagcctcctccactggtttgggagtggtaagaccaaagtaaatgtaaaaagtaaagtagaggttcctcttcaaagactttcctccctatctaattagaaataagtagtaacttcttttagaagcaaaatgtattcacagacctgtactaacattcttaaatatctgctagtcataataaagaaatcaatgtactttatgttcttagctcccacaatttagcctaagtatttgccctggcatgcttatactggtccaagcattaggtcatagcctgttcctcttccttatttagaagtgtttttacctttctcagcattccacaagttacttcctcattcctttgttctcctctacctttgcctcttttaaaagttctaaattgctagccaatcgggacaaatacagaatgtgaggtcctgttccagccaatggaaaccggacacagcagtagggtggacgcgtcaggttataaatgaccctgtctcctttgttcggtgtactcttgtggcaaaactgctggcaagtgtaccctttctgcaggaagtaaaaatggccttactaaataaatttatgttcaagtgctatttctttacgacaccgaggaacaagcatttcaaaca

SEQ ID NO: 200680 - DNA, 3471 bp, Artificial Sequence
  derived and/or modified sequence
atgggcaacctgctgagcaagttcagacccggctgcagaagaagacccctgcccggccccggcagaggcgcccccgcccccctgagcagagacgccagcccccccggcagagcccacagcgtgcccacccccagacccttcagaggcctgttcagaagaaacgccagaagaagacccagcgccgccagcatcttcgtggcccccaagagaccctgccccctgcccagagccgccgccgcccccctgggcgtgctgcccgccgtgggctggggcctggccatcagaaagacccccatgctgcccgccagaaacccccccagattcggccaccccagcagcgtgagaatccccccccccagcagaatgttcaccctgctgctgcccagccccagagagcccgccgtgaaggccagaaagcccatccccgccaccctgctggaggagaccgaggtgtgggcccaggagggccccagaagagtgaagaaggacgaggaccccgtgcagatcgagggcgaggacgacgagaagagaacccccctgagcagcggcgaggccagcagcaccagcagaagccagggcacccagggcgacgtggccagcttcagatgcagccccggccccctggagggcaacgtgtaccacaagttcagcgagaacagcatgagcgagaaggcccaggccagccccgccagcagctgcctggagggccccgccatgcccagcacccacagccaggccggctgcgccagacacctgggcaagcccgaccccgacgccaccgccccccccgagcccgccgtgggctgcagcctgctgcagcagaagctggccgccgaggtgctgaacgaggagcccccccccagcagcctgggcctgcccatccccctgatgagcggcaagagaatgcccgacgagaagcccttctgcatcccccccagaagcgccgccccccccagagccgccagaaacagaccctgcaagagaaagatgagcatccccctgctgctgcccctgccccccagcctgcccctgctgtgggacagaggcgagctgcccccccccgccaagctgccctgcctgagcgtggagggcgacctgcacaccctggagaagagccccgagtacaagagaaacagcagaatcctggaggacaagaccgagaccatgaccaacagcagcatcacccagcccgcccccagcttcagccagcccgtgcagaccaccgacagcctgcccctgaccacctacaccagccaggtgagcgcccccctgcccatccccgacctggccgacctggccaccggccccctgatcctgcccatcccccccctgagcaccacccccaagatggacgagaagatcgccttcaccatccccaacagccccctggccctgcccgccgacctggtgcccatcctgggcgaccagagcaacgagaagggcggcagctacaacagcgtggtgggcgccgcccccctgaccagcgacccccccaccccccccagcagcacccccagcttcaagccccccgtgaccagagagagccccatcagcatgtgcgtggacagccccccccccctgagcttcctgaccctgctgcccgtgcccagcaccggcaccagcgtgatcaccagcaagcccatgaacagcaccagcgtgatcagcaccgtgaccaccaacgccagcgcccacctgaccagccagaccgccgtggaccccgaggtggtgaacatggacaccaccgcccccagccaggtggtgatcttcaccagcagcctgagcagcagagtgagcagcctgcccaacagccagatccactgcagcgccgagcagagacaccccggcaagaccagcgtgtacaccagccccctgcccttcatcttccacaacaccacccccagcttcaaccagctgttcggcaaggaggccaccccccagcccaagttcgaggcccccgacggccagccccagaaggccagcctgcccagcgcctgcgtgttcctgagcctgcccatcatccccccccccgacaccagcaccctggtgaacagcgccagcaccgccagcagcagcaagccccccatcgagaccaacgccatgcacaccaccccccccagcaaggccgtgatcctgcagagcgccagcgtgagcaagaagtacctgcccttctacctgggcctgcccggcagcggcaacacccagcccagcggcaacaccgccagcgtgcagggcagcaccagcctgcccgcccagagcgtgagagcccccgccaccgccagcaaccaccccctgaaccccggcgccaccccccagcccaagttcggcgcccccgacggcccccagcagaagaccagcctgcccagcgcccacgacttcctgagcctgcccatcatggtgccccccgacaccagcaccctggtgagcagcgccagcgccgccagcctgagcaagcccgccatcgacaccagcgacatgaacaccaccccccccagcaagaccgtgatcctgcagagcaccttcgtgagcagaaaggaggagtacatcagattctacatgggcctgcccggcagcggcaacaccctgcacagcgacagcatcgccagcgcccaggtgagcaccagcttccccgcccaggccgacagaagacccaccaccaccagcagccaccccctgaacaccggcagcatcagccacagcaccctgggcgccaccgacggccagcagaagagcgacagcagcttcatcctgggcaaccccgccacccccgcccccgtgatcggcctgaccagccccagcgtgcagcccctgagcggcagcatcatcccccccggcttcgccgagctgaccagcccctacaccgccctgggcacccccgtgaacgccgagcccgtggagggccacaacgccagcgccttccccaacggcaccgccaagaccagcggcttcagaatcgccaccggcatgcccggcaccggcgacagcaccctgctggtgggcaacaccatccccggcccccaggtgatcatgggccccggcacccccatggacggcggcagcatcggcttcagcatgagcgcccccggccccagcagcaccagcggcgagctgaacatcggccagggccagagcggcacccccagcaccaccagcgtgttccccttcggccaggccgcctgggaccccaccggccacagcatggccgccgccccccagggcgccagcaacatccccgtgttcggctacaccagcgccgccgcctacatccccggcctggacccccccacccagaacagctgcagcggcatgggcggcgacggcaccagaagcatcgtgggcggcccctgcgtgcccgccttccagcagtgcatcctgcagcacacctggaccgagagaaagttctacaccagcagcacccactactacggccaggagacctacgtgagaagacacgtgtgcttccagctgccctag

SEQ ID NO: 200681 - protein, 407 aa, Artificial Sequence
  derived and/or modified sequence
MNNSGADEIGKLFVGGLDWSTTQETLRSYFSQYGEVVDCVIMKDKTTNQSRGFGFVKFKDPNCVGTVLASRPHTLDGRNIDPKPCTPRGMQPERTRPKEGWQKGPRSDNSKSNKIFVGGIPHNCGETELREYFKKFGVVTEVVMIYDAEKQRPRGFGFITFEDEQSVDQAVNMHFHDIMGKKVEVKRAEPRDSKSQAPGQPGASQWGSRVVPNAANGWAGQPPPTWQQGYGPQGMWVPAGQAIGGYGPPPAGRGAPPPPPPFTSYIVSTPPGGFPPPQGFPQGYGAPPQFSFGYGPPPPPPDQFAPPGVPPPPATPGAAPLAFPPPPSQAAPDMSKPPTAQPDFPYGQYAGYGQDLSGFGQGFSDPSQQPPSYGGPSVPGSGGPPAGGSGFGRGQNHNVQGFHPYRR

SEQ ID NO: 200682 - DNA, 2185 bp, Artificial Sequence
  derived and/or modified sequence
cgcgcggtgaccgttggcgccgaggggaggaggcagccgccgccgccgccgccgccgccgccgccgccgccgccgccgttgcgcagatccgggccgcggctgtggggagggcgacggagcgggtgaccttccggaggcgggagcgagcgaggaggcccgggagcgccgagcgtcgccgccgccgccgccatgaacaactcgggcgccgacgagatcgggaagctcttcgtgggcggtcttgactggagcacgacccaagagactctgcgcagctacttttcccaatatggagaagtcgtagattgtgttatcatgaaagataaaaccaccaaccagtctcgaggctttgggtttgtcaaatttaaagacccaaactgtgtggggacggtgctggccagcagaccgcacacgctagatggccgaaacatcgaccccaagccatgcacaccccgggggatgcagccggagagaacacggccgaaggaaggatggcagaaaggacccaggagcgataacagtaaatcaaataagatatttgtcggtggaattcctcacaattgtggtgagacagagctcagggaatacttcaagaagttcggagtggtcacggaggtagtcatgatctatgacgccgagaagcagaggccccgaggttttggatttattactttcgaggacgaacaatcagtggaccaggctgtcaacatgcattttcacgacatcatgggcaaaaaagtggaagttaaacgagctgagcctcgggacagcaagagccaagcgccgggacagccaggtgccagccagtgggggagccgggttgtgcccaacgctgccaatggctgggcaggccagcccccgcccacgtggcagcaaggatatggcccgcaaggaatgtgggtgccggcaggacaggcgattggtggctatggaccgccccctgcaggaagaggagcccccccgccacccccaccgttcacctcctacatcgtgtccacccctcctggaggctttccccctccccagggcttccctcagggctacggtgccccgccacagttcagttttggctacgggcctccacctccaccgccagatcagtttgcccctccgggggttcctcctccaccagccactcccggggcagcacctctggctttcccaccgcctccgtctcaggctgccccggacatgagcaagcccccgacagctcagccagacttcccctatggtcagtatgcaggttacgggcaggacttgagtggcttcggacagggcttctcagaccccagccagcagcctccttcctacgggggtccctccgtgccagggtcggggggcccccccgccggcggcagcggctttggacgagggcagaaccacaacgtgcaagggttccacccctaccgacgctagcccgcggcgccgcgacgtctgcacggcccagacccaggattccaaacttgtgaactcgtgacaatcacaaacttggcggcaaagtggcgactcaaccttgggggggggggcggggggagggcgcgaggcttttggagcggctgtgggtgtcgtctggactgaggtttttaaatatttctttctctaacccatcagcacaataaaaaaaagtcactggttcaacaacagggtttaaaaaaaatgtcttcagctttaattcaaaacttcaggtttctttttcttccttttttttggaaattattttcctgagccttttgttttacggtatattgtaaacttttatgttaaagaaaaaatatacatttacaaattgtgagatttttaagagaaattttctacgatgtatactggcttattttttaatttaaaacggggtttccgtcggcactggtggagggggtgcgctgttagtcccctcgctcctggctttgggggttgggacttggtggtccagaaactctgggagcttctagaagaaatctactgagtgtatttctgttttttgtttaattccttgcttttgtcgactgacctgcttggtagtgtctgaggtgaactgtgggggttgcgcacagccagccgcgtggatcccacgcagcgctgaaccgaaccgagtaggaagcctttctccccaggcacgtggcttcagggcgtttcccattgaccagtttgaccctggtttgaataaagagaagtgcgtttggattagaaa

SEQ ID NO: 200683 - DNA, 1224 bp, Artificial Sequence
  derived and/or modified sequence
atgaacaattcaggggcagatgagatcggcaagctgtttgtgggcgggctcgactggagcaccacacaggagacactgcgctcctatttctctcaatacggggaggtagtggactgtgtcatcatgaaggataagaccaccaaccagagtaggggttttggcttcgttaaattcaaggacccgaactgcgtaggcacagtgctcgcttctcgcccacacaccctggacgggcggaacatcgatcccaagccgtgcacgcccagaggcatgcagcccgagcggacacggcctaaggagggatggcagaagggtcctaggagcgacaacagtaagagtaacaaaatcttcgtaggtggcatcccacacaattgtggagaaacagaactgcgcgaatactttaaaaaatttggggtggtgacagaggtggtgatgatctatgacgccgagaagcaaaggcctcgaggcttcggctttatcacttttgaggacgagcaatctgtggatcaagcagtgaatatgcacttccacgatattatgggaaagaaagtcgaggtgaagagggccgaaccgcgcgattcgaaatcacaggcacctgggcagccgggggcctcacagtgggggagtcgcgtagtgcccaatgccgcaaacggctgggccgggcaaccgcctccaacttggcaacagggatacggcccccagggcatgtgggtgccagcaggtcaggcaatcggcgggtacggccccccccccgccggcagaggagctccaccccctcctccccctttcactagctatattgtctctaccccgccaggaggatttccacctcctcaggggttcccccaaggatacggtgctcccccccagttctcatttggatacgggcctccccccccaccccctgatcagtttgctcctcccggagtcccccctccaccagcaacacctggtgccgcacctctggctttcccaccccccccttcacaggctgcacccgatatgtcaaagcccccaaccgcgcagcctgacttcccttacggccagtacgcaggatatggtcaagacttgagtggcttcggtcaaggctttagcgatccctcacagcagccccctagctacggcggaccctctgtccccgggtccggtggccctccagctggcgggtcagggtttggaaggggccagaatcataatgtccaaggttttcacccatatcggaggtag

SEQ ID NO: 200684 - DNA, 1224 bp, Artificial Sequence
  derived and/or modified sequence
atgaacaacagcggggctgatgaaattggcaagctgtttgtgggcggcctggactggagcaccacccaggagaccctgcggagctacttcagccagtatggagaggtggtggactgtgtgatcatgaaggacaagaccaccaaccagagccggggctttggatttgtgaagttcaaggaccccaactgtgtgggcaccgtgctggccagccggccccacaccctggatggcaggaacatcgaccccaagccctgcaccccccggggcatgcagcctgagaggacccggcccaaggagggctggcagaagggccccaggagtgacaacagcaagagcaacaagatctttgtgggcggcatcccccacaactgtggggagacagagctgcgggagtacttcaagaagtttggagtggtgacagaggtggtgatgatctatgatgctgagaagcagaggccccggggcttcggcttcatcacctttgaagatgagcagagcgtggaccaggccgtgaacatgcacttccatgacatcatgggcaagaaggtggaggtgaagagagctgagccccgggacagcaagagccaggcccctggccagcccggggccagccagtggggcagccgggtggtgcccaatgctgccaacggctgggccggccagcccccacccacctggcagcagggctacggcccccagggcatgtgggtgcctgctggccaggccatcggcggctacggccccccacctgctggccgcggggcccctcctcctcctccacccttcaccagctacatcgtgtccaccccacctgggggcttccccccaccccagggcttcccccagggctacggggccccaccccagttctcctttggctacggccccccacctcctcctccagaccagtttgcccctcctggggtgcccccacctccagccacccctggggccgcccccctggccttccccccaccacccagccaggccgccccagacatgagcaagcccccaacagcccagcctgacttcccctacggccagtatgccggctacggccaggacctgagcggcttcggccagggcttcagtgaccccagccagcagccccccagctatggaggccccagcgtgcccggcagcggcggccccccagctgggggcagcggcttcggccggggccagaaccacaacgtgcagggcttccacccctacagaagatag

SEQ ID NO: 200685 - DNA, 1224 bp, Artificial Sequence
  derived and/or modified sequence
atgaacaacagcggcgccgacgagatcggcaagctgttcgtgggcggactggactggagcactacccaagagaccctgcgttcctacttcagccagtatggggaagtagtcgactgcgtaatcatgaaagataagacaacaaatcagtctaggggcttcggtttcgtaaagtttaaggatcctaactgcgtcggaacagtactagcctcccggccccatacgctggatgggcggaacatcgatcctaagccttgtacaccgcggggaatgcagcccgaacgaactcgtcccaaggaggggtggcagaaaggacccagatccgacaactccaaatccaacaagatcttcgtggggggaatcccgcacaactgtggggagaccgaactgcgtgagtacttcaagaagttcggcgtagtgactgaagtcgtgatgatctatgacgccgaaaaacagaggccaaggggatttgggttcattacgttcgaggatgagcagtctgtggatcaagctgtaaacatgcatttccatgacatcatggggaagaaagtggaagtgaaaagagccgagccccgcgacagcaagtcccaggccccaggccagccaggggcttcacagtggggatcccgggtggtccccaatgcagccaatgggtgggccggacagcctcctcccacgtggcaacagggctacgggccacaggggatgtgggtgccagcagggcaggctatagggggctacggccctccccccgctggtcgcggcgctccaccgccacccccacccttcacctcctacatcgtgtccacccctcctggcgggtttcctcctcctcaagggtttccccaggggtacggagcacctccccaattctcttttggctacggaccccctccgcccccccctgaccagttcgctcctcctggagtcccacctcctcccgcaacaccaggtgctgctccgttggctttcccacctcctcccagtcaggcagcgcccgatatgtccaagcccccaactgctcagccggactttccatatggacagtacgccggatacggacaggacttgtcaggctttggccagggattttccgacccttcccagcaaccaccgagctacggcgggccgtccgttcccggctctgggggcccacctgctggtggaagcggattcggccggggccagaaccacaacgttcaggggttccacccctataggcgttag

SEQ ID NO: 200686 - DNA, 1224 bp, Artificial Sequence
  derived and/or modified sequence
atgaataacagtggtgccgacgaaattggaaaactttttgtcggtggtctggactggtccacgacacaggagacgctgcgttcctacttctcacagtatggcgaggtcgtcgactgtgtgattatgaaggacaaaactaccaaccagtcccggggatttggttttgtaaaattcaaggaccccaactgcgtgggcacagttctggcctctcgaccgcatacgctggatggcagaaacatcgatcctaaaccctgtactcctagaggtatgcagcccgaaaggacacgcccaaaagaaggatggcagaaaggtcccaggagtgataacagtaagtcgaacaagattttcgttggtggtattccccataattgcggcgagaccgagctgcgggaatattttaaaaagtttggcgtcgtgacagaggtcgtcatgatatacgacgcggagaaacagcgcccaagaggattcgggttcatcacttttgaggacgagcagagtgtcgatcaggctgtcaacatgcattttcacgacatcatgggaaaaaaggtggaggttaagcgtgctgaacccagggattctaaatctcaggcgccaggacaacccggtgcgtcacaatggggatcacgcgttgtgcccaacgccgctaatggttgggctggacagcctccacctacttggcagcaaggatatggtcctcagggcatgtgggtgccggctgggcaagctatagggggttatggacccccacctgcgggacgtggcgctccgccacccccaccccctttcacatcatacattgtcagtactccacctggcggttttcccccaccccaggggttcccccagggctatggagccccaccccagttcagctttggttatggccctcctcctccccctcctgaccagtttgcaccgccaggcgtaccgccaccccctgcaacccccggagcggcaccccttgcgtttccccctccaccctcacaagcggcacccgatatgtccaagccaccaaccgcccagcccgacttcccatacggtcagtacgccggttacggtcaggacctgtccgggtttggccaaggtttctccgaccccagccaacagccaccatcttatggtggacccagcgttcccggaagcggcggacctcctgcaggaggcagcggattcggccgtgggcagaaccataatgtccagggctttcacccctaccgacggtag

SEQ ID NO: 200687 - DNA, 1224 bp, Artificial Sequence
  derived and/or modified sequence
atgaacaacagcggcgccgacgagatcggcaagctgttcgtgggcggcctggactggagcaccacccaggagaccctgagaagctacttcagccagtacggcgaggtggtggactgcgtgatcatgaaggacaagaccaccaaccagagcagaggcttcggcttcgtgaagttcaaggaccccaactgcgtgggcaccgtgctggccagcagaccccacaccctggacggcagaaacatcgaccccaagccctgcacccccagaggcatgcagcccgagagaaccagacccaaggagggctggcagaagggccccagaagcgacaacagcaagagcaacaagatcttcgtgggcggcatcccccacaactgcggcgagaccgagctgagagagtacttcaagaagttcggcgtggtgaccgaggtggtgatgatctacgacgccgagaagcagagacccagaggcttcggcttcatcaccttcgaggacgagcagagcgtggaccaggccgtgaacatgcacttccacgacatcatgggcaagaaggtggaggtgaagagagccgagcccagagacagcaagagccaggcccccggccagcccggcgccagccagtggggcagcagagtggtgcccaacgccgccaacggctgggccggccagcccccccccacctggcagcagggctacggcccccagggcatgtgggtgcccgccggccaggccatcggcggctacggccccccccccgccggcagaggcgccccccccccccccccccccttcaccagctacatcgtgagcaccccccccggcggcttcccccccccccagggcttcccccagggctacggcgcccccccccagttcagcttcggctacggcccccccccccccccccccgaccagttcgccccccccggcgtgccccccccccccgccacccccggcgccgcccccctggccttcccccccccccccagccaggccgcccccgacatgagcaagccccccaccgcccagcccgacttcccctacggccagtacgccggctacggccaggacctgagcggcttcggccagggcttcagcgaccccagccagcagccccccagctacggcggccccagcgtgcccggcagcggcggcccccccgccggcggcagcggcttcggcagaggccagaaccacaacgtgcagggcttccacccctacagaagatag

SEQ ID NO: 200688 - protein, 295 aa, Artificial Sequence
  derived and/or modified sequence
MVDSVYRTRSLGVAAEGLPDQYADGEAARVWQLYIGDTRSRTAEYKAWLLGLLRQHGCQRVLDVACGTGVDSIMLVEEGFSVTSVDASDKMLKYALKERWNRRHEPAFDKWVIEEANWMTLDKDVPQSAEGGFDAVICLGNSFAHLPDCKGDQSEHRLALKNIASMVRAGGLLVIDHRNYDHILSTGCAPPGKNIYYKSDLTKDVTTSVLIVNNKAHMVTLDYTVQVPGAGQDGSPGLSKFRLSYYPHCLASFTELLQAAFGGKCQHSVLGDFKPYKPGQTYIPCYFIHVLKRTD

SEQ ID NO: 200689 - DNA, 888 bp, Artificial Sequence
  derived and/or modified sequence
atggtcgatagcgtctatagaaccaggtctctgggcgtagctgctgaaggccttcccgatcagtatgccgacggcgaagccgctcgcgtgtggcaattatatatcggagatacccgcagcaggacggctgagtacaaagcatggctcctgggcctcctgcggcaacacgggtgtcagagggtgctggacgtggcctgcggtaccggagtcgattcaattatgcttgttgaggagggttttagcgtgacatccgtagacgcctcagacaagatgttaaagtatgccttgaaggagcggtggaacagaaggcacgaaccagcattcgataaatgggtgatcgaggaggccaattggatgactctggataaggatgtgccgcagtccgcagagggtggattcgatgccgtgatttgcctgggcaatagctttgcgcatttgcccgactgcaaaggggatcagtctgagcaccgcctcgcgctcaagaatattgcatcaatggtgagagcaggtggcctcctcgtgattgatcaccgcaactacgatcatatcctgtcaaccggctgtgccccacccggcaaaaatatctactacaagtctgatctcactaaggacgttacaacctcagtcctcatcgtgaacaacaaggcgcacatggtcaccctggactataccgtccaggtacccggtgcagggcaagatggctcgccggggcttagtaagtttaggcttagttactacccacactgccttgcaagttttactgaactcctgcaggctgcctttgggggcaagtgccaacacagtgtactaggggattttaagccatacaaacccgggcaaacctatattccatgctactttattcacgtactgaagcgcacagattag

SEQ ID NO: 200690 - DNA, 1072 bp, Artificial Sequence
  derived and/or modified sequence
gcggcgcaggatggtggacagcgtgtaccggacccgctccctgggggtggcggccgaagggctcccggaccagtacgcggacggggaggcggcgcgcgtgtggcagctgtatatcggagacacccgcagccgcaccgccgagtacaaggcatggctgcttgggctgctgcgccagcacggctgccagcgggtgctcgacgtagcctgtggcactggggtggactccattatgctggtggaagagggcttcagtgtgacgagtgtggatgccagtgacaagatgctgaagtatgcacttaaggagcgctggaaccggcggcacgagcccgccttcgacaagtgggtcatcgaagaagccaactggatgactctggacaaagatgtgccccagtcagcagagggtggctttgatgctgtcatctgccttggaaacagtttcgctcacttgccagactgcaaaggggaccagagtgagcaccggctggcgctgaaaaacattgcgagcatggtgcgggcagggggcctactggtcattgatcatcgcaactacgaccacatcctcagtacaggctgtgcacccccagggaagaacatctactataagagtgacttgaccaaggacgtcacaacatcagtgctgatagtgaacaacaaggcccacatggtgaccctggactatacggtgcaggtgccgggggctggccaggatggctctcctggcttgagtaagttccggctctcctactacccacactgtctggcatccttcacggagctgctccaagcagccttcggaggtaagtgccagcacagcgtcctgggcgacttcaagccttacaagccaggccaaacctacattccctgctacttcatccacgtgctcaagaggacagactgagtgtggcctcagctcccacaagcctctgcccaggcactgctaggctctgtctggaagatggggaccagcagccccacaccagggccagcctctagagcagactacagctggggtgcagggatgtgggttccacagacggaagggtaaacaatatagtctttttcagttcctgca

SEQ ID NO: 200691 - DNA, 888 bp, Artificial Sequence
  derived and/or modified sequence
atggtggacagcgtgtaccgcaccaggagcctgggcgtggccgctgagggcctgcctgaccagtatgcagatggagaggccgcccgggtgtggcagctgtacatcggggacaccaggagcaggacagctgagtacaaggcctggctgctgggcctgctgcggcagcacggctgccagagggtgctggatgtggcctgtggcaccggggtggacagcatcatgctggtggaggagggcttctctgtgacctctgtggatgccagtgacaagatgctgaagtatgccctgaaggagcgctggaacagaagacatgagcccgcctttgacaagtgggtgattgaggaggccaactggatgaccctggacaaggatgtgccccagagcgctgagggcggctttgatgctgtgatctgcctgggcaacagctttgcccacctgcctgactgcaagggggaccagagcgagcaccggctggccctgaagaacatcgcctccatggtgcgggccggcggcctgctggtgattgaccacaggaactatgaccacatcctgagcacaggctgtgcccctcctgggaagaacatctactacaagagtgacctgaccaaggatgtgaccacctctgtgctgattgtgaacaacaaggcccacatggtgaccctggactacacagtgcaggtgcctggggccggccaggacggcagccctggcctgagcaagttccggctgagctactacccccactgcctggccagcttcacagagctgctgcaggccgcctttggaggcaagtgccagcacagcgtgctgggggacttcaagccctacaagccaggccagacctacatcccctgctacttcatccacgtgctgaagaggacagactag

SEQ ID NO: 200692 - DNA, 888 bp, Artificial Sequence
  derived and/or modified sequence
atggtggacagcgtgtaccggacccggagcctgggcgtggccgccgaagggctccctgaccaatacgcagacggagaggccgcacgagtttggcagctgtatataggtgacacgaggagccgaacggccgagtacaaggcttggttactgggccttcttagacaacatggatgtcagcgtgtgttggatgttgcttgcggtacaggagtggattcaatcatgctggtggaagaggggttctccgttacaagcgtagacgccagtgataagatgcttaaatatgctcttaaagagcgttggaatcgacgtcacgaaccagcattcgacaaatgggtcatcgaggaggccaattggatgacactggataaggatgtgcctcaatctgctgagggcggatttgatgcagtgatctgcctggggaactcatttgctcatctgccagattgtaagggcgaccagtcagaacacaggcttgcactgaagaacatcgccagtatggtgagggcaggcggattactagtcattgaccatagaaactatgatcacatcctctccacggggtgcgcacccccagggaagaatatttattacaagtccgatctgacaaaggacgtcactacctcagtgctgatcgtgaataataaagcgcacatggtgacactggactatactgttcaggtacctggggccggacaggatgggtcccccggcctctccaaattccgtctgagctattaccctcactgccttgcctcctttacggaattactgcaagcagccttcggcgggaagtgccaacacagcgtcctgggcgattttaagccctacaaacctgggcagacgtacataccatgctactttatccacgttctcaagcggacggactag

SEQ ID NO: 200693 - DNA, 888 bp, Artificial Sequence
  derived and/or modified sequence
atggtggattcagtttacaggaccagatcactgggtgtggccgcagagggactgccagatcagtacgccgacggcgaggccgctagagtgtggcagttgtacattggagatacccgatcacggacagccgagtacaaagcttggctattgggactgctgcgccaacatggctgccagagggtgctggatgtcgcctgcgggaccggcgttgatagcattatgcttgtcgaagagggtttcagcgtaacatcagttgacgcgtcagataagatgctgaagtatgccctgaaagagcgctggaaccgcaggcacgaacccgcattcgacaagtgggtgatcgaagaggccaactggatgacattggataaggatgtcccccagtccgccgaaggcggatttgacgcagtgatttgcttgggaaattctttcgcccacctgcctgactgtaagggggatcaatctgagcatagattggccctcaaaaacattgcttctatggtaagagcaggtggcctgctggtcattgaccaccgcaattacgaccatatactatcaacgggttgcgcgcctcccggaaaaaatatctattacaagtcagacctgaccaaagacgtgacaacatctgtcttaatcgtcaacaataaggctcatatggtcactctggactataccgtgcaggtgccaggggctggacaggacgggtcccccggactgtctaagtttcgcctgagctattaccctcactgcttggctagcttcactgagctgctccaggccgcttttggcggaaaatgccaacactccgtcttgggcgatttcaagccttataagccaggtcagacttacataccttgctattttattcacgtgctgaagaggaccgattag

SEQ ID NO: 200694 - DNA, 888 bp, Artificial Sequence
  derived and/or modified sequence
atggtggacagcgtgtacagaaccagaagcctgggcgtggccgccgagggcctgcccgaccagtacgccgacggcgaggccgccagagtgtggcagctgtacatcggcgacaccagaagcagaaccgccgagtacaaggcctggctgctgggcctgctgagacagcacggctgccagagagtgctggacgtggcctgcggcaccggcgtggacagcatcatgctggtggaggagggcttcagcgtgaccagcgtggacgccagcgacaagatgctgaagtacgccctgaaggagagatggaacagaagacacgagcccgccttcgacaagtgggtgatcgaggaggccaactggatgaccctggacaaggacgtgccccagagcgccgagggcggcttcgacgccgtgatctgcctgggcaacagcttcgcccacctgcccgactgcaagggcgaccagagcgagcacagactggccctgaagaacatcgccagcatggtgagagccggcggcctgctggtgatcgaccacagaaactacgaccacatcctgagcaccggctgcgccccccccggcaagaacatctactacaagagcgacctgaccaaggacgtgaccaccagcgtgctgatcgtgaacaacaaggcccacatggtgaccctggactacaccgtgcaggtgcccggcgccggccaggacggcagccccggcctgagcaagttcagactgagctactacccccactgcctggccagcttcaccgagctgctgcaggccgccttcggcggcaagtgccagcacagcgtgctgggcgacttcaagccctacaagcccggccagacctacatcccctgctacttcatccacgtgctgaagagaaccgactag

SEQ ID NO: 200695 - protein, 661 aa, Artificial Sequence
  derived and/or modified sequence
MAAGETQLYAKVSNKLKSRSSPSLLEPLLAMGFPVHTALKALAATGRKTAEEALAWLHDHCNDPSLDDPIPQEYALFLCPTGPLLEKLQEFWRESKRQCAKNRAHEVFPHVTLCDFFTCEDQKVECLYEALKRAGDRLLGSFPTAVPLALHSSISYLGFFVSGSPADVIREFAMTFATEASLLAGTSVSRFWIFSQVPGHGPNLRLSNLTRASFVSHYILQKYCSVKPCTKQLHLTLAHKFYPHHQRTLEQLARAIPLGHSCQWTAALYSRDMRFVHYQTLRALFQYKPQNVDELTLSPGDYIFVDPTQQDEASEGWVIGISQRTGCRGFLPENYTDRASESDTWVKHRMYTFSLATDLNSRKDGEASSRCSGEFLPQTARSLSSLQALQATVARKSVLVVRHGERVDQIFGKAWLQQCSTPDGKYYRPDLNFPCSLPRRSRGIKDFENDPPLSSCGIFQSRIAGDALLDSGIRISSVFASPALRCVQTAKLILEELKLEKKIKIRVEPGIFEWTKWEAGKTTPTLMSLEELKEANFNIDTDYRPAFPLSALMPAESYQEYMDRCTASMVQIVNTCPQDTGVILIVSHGSTLDSCTRPLLGLPPRECGDFAQLVRKIPSLGMCFCEENKEEGKWELVNPPVKTLTHGANAAFNWRNWISGN

SEQ ID NO: 200696 - DNA, 1986 bp, Artificial Sequence
  derived and/or modified sequence
atggccgccggcgagacccagctgtacgccaaggtgagcaacaagctgaagagcagaagcagccccagcctgctggagcccctgctggccatgggcttccccgtgcacaccgccctgaaggccctggccgccaccggcagaaagaccgccgaggaggccctggcctggctgcacgaccactgcaacgaccccagcctggacgaccccatcccccaggagtacgccctgttcctgtgccccaccggccccctgctggagaagctgcaggagttctggagagagagcaagagacagtgcgccaagaacagagcccacgaggtgttcccccacgtgaccctgtgcgacttcttcacctgcgaggaccagaaggtggagtgcctgtacgaggccctgaagagagccggcgacagactgctgggcagcttccccaccgccgtgcccctggccctgcacagcagcatcagctacctgggcttcttcgtgagcggcagccccgccgacgtgatcagagagttcgccatgaccttcgccaccgaggccagcctgctggccggcaccagcgtgagcagattctggatcttcagccaggtgcccggccacggccccaacctgagactgagcaacctgaccagagccagcttcgtgagccactacatcctgcagaagtactgcagcgtgaagccctgcaccaagcagctgcacctgaccctggcccacaagttctacccccaccaccagagaaccctggagcagctggccagagccatccccctgggccacagctgccagtggaccgccgccctgtacagcagagacatgagattcgtgcactaccagaccctgagagccctgttccagtacaagccccagaacgtggacgagctgaccctgagccccggcgactacatcttcgtggaccccacccagcaggacgaggccagcgagggctgggtgatcggcatcagccagagaaccggctgcagaggcttcctgcccgagaactacaccgacagagccagcgagagcgacacctgggtgaagcacagaatgtacaccttcagcctggccaccgacctgaacagcagaaaggacggcgaggccagcagcagatgcagcggcgagttcctgccccagaccgccagaagcctgagcagcctgcaggccctgcaggccaccgtggccagaaagagcgtgctggtggtgagacacggcgagagagtggaccagatcttcggcaaggcctggctgcagcagtgcagcacccccgacggcaagtactacagacccgacctgaacttcccctgcagcctgcccagaagaagcagaggcatcaaggacttcgagaacgacccccccctgagcagctgcggcatcttccagagcagaatcgccggcgacgccctgctggacagcggcatcagaatcagcagcgtgttcgccagccccgccctgagatgcgtgcagaccgccaagctgatcctggaggagctgaagctggagaagaagatcaagatcagagtggagcccggcatcttcgagtggaccaagtgggaggccggcaagaccacccccaccctgatgagcctggaggagctgaaggaggccaacttcaacatcgacaccgactacagacccgccttccccctgagcgccctgatgcccgccgagagctaccaggagtacatggacagatgcaccgccagcatggtgcagatcgtgaacacctgcccccaggacaccggcgtgatcctgatcgtgagccacggcagcaccctggacagctgcaccagacccctgctgggcctgccccccagagagtgcggcgacttcgcccagctggtgagaaagatccccagcctgggcatgtgcttctgcgaggagaacaaggaggagggcaagtgggagctggtgaacccccccgtgaagaccctgacccacggcgccaacgccgccttcaactggagaaactggatcagcggcaactag

SEQ ID NO: 200697 - DNA, 1986 bp, Artificial Sequence
  derived and/or modified sequence
atggctgccggggagacccagctctatgctaaagtgagtaacaaactcaaatcgcgctcgagcccaagcctgcttgagcctttgctggcgatgggcttccccgtgcacacagctctgaaggccctagccgccacaggccgcaagaccgccgaggaggctctggcatggttgcacgaccattgcaatgacccttctctggacgatcccatcccgcaagagtacgcccttttcctctgccccaccggaccccttttggagaaacttcaagaattttggagagaaagcaagcgacagtgtgccaaaaaccgcgcgcacgaggtcttcccgcacgttacactctgcgacttctttacatgtgaagatcaaaaagtagagtgtttgtatgaagccttgaaacgagccggtgataggcttttagggtccttcccgacagccgtgcccctggccctccattcctccatttcctacctgggctttttcgtgtctggatctcctgccgatgtgatccgggagtttgccatgacgtttgccacagaggcttccctcctggccggaacttctgtctcacgtttctggatcttctcacaggtgccggggcatggaccaaatctccgcctaagcaatctgacaagggcttccttcgtctcccactacatcctccagaaatattgttcggtgaagccctgtactaagcagcttcatctaaccctggctcataagttctaccctcaccatcagcgaactctggaacaacttgctcgtgctatcccactggggcacagctgccaatggactgctgccctttatagccgagacatgcgttttgttcattatcagaccctcagagctttgtttcagtacaagcctcagaacgtcgatgagttgactttgagcccaggtgattacatcttcgttgaccctacccagcaggatgaagcgtctgaggggtgggtcatcgggatctctcaacgaaccggctgtcgtggattccttccagagaactacactgaccgtgcttcggaatctgacacatgggtgaagcatagaatgtacaccttcagcctcgctacagatcttaacagccggaaggacggggaagcctccagtagatgctctggagagtttctgccccagactgccagatctctttctagcctgcaagctctgcaggccacggttgccagaaaatccgtgcttgttgtaaggcacggggagcgcgtggatcagatattcggcaaggcctggctacagcagtgctccacgcctgacggcaaatattaccggccagatctaaactttccttgttcactcccccgacgctcgcgcggcattaaggattttgagaacgaccccccactttccagctgtgggatcttccagtcccgtatcgcaggagacgcactccttgattcaggcatccgcattagttctgtgtttgcatctcccgccttacgatgtgtacaaacagctaaactgatcctggaagagttgaagctcgaaaagaaaattaaaatccgcgtcgaacccggcatatttgagtggactaagtgggaagcaggtaaaactacccccaccctgatgagccttgaggagctgaaggaggccaactttaacattgacaccgactaccgccccgccttcccactgagcgcccttatgccggccgagtcctaccaggaatacatggatcggtgcacagctagcatggtgcagattgttaacacatgcccccaagacactggcgtgatcctgattgtttcgcatgggtccactcttgattcatgcacccgccctcttctgggtttgcctcccagagagtgtggcgatttcgctcagctggtgcggaaaatacccagcctgggaatgtgcttttgcgaagagaacaaagaggaaggcaagtgggagctcgtgaatccccctgtgaagaccctgacacacggagcgaacgcagcattcaattggaggaattggatctcgggtaattag

SEQ ID NO: 200698 - DNA, 1986 bp, Artificial Sequence
  derived and/or modified sequence
atggctgctggggagacccagctgtatgccaaggtgagcaacaagctgaagagccgcagcagccccagcctgctggagcccctgctggccatgggcttccctgtgcacacagccctgaaggccctggccgccactggaaggaagacagctgaggaggccctggcctggctgcatgaccactgcaatgaccccagcctggatgaccccatcccccaggagtatgccctcttcctgtgccccaccggccccctgctggagaagctgcaggagttctggagggagagcaagaggcagtgtgccaagaacagagcccacgaggtgttcccccacgtgaccctgtgtgacttcttcacctgtgaggaccagaaggtggagtgcctgtatgaggccctgaagagagctggggaccggctgctgggcagcttccccacagctgtgcccctggccctgcacagcagcatctcctacctgggcttctttgtgtctggcagccctgcagatgtgatccgggagtttgccatgacctttgccacagaggccagcctgctggccggcacctctgtgagccgcttctggatcttcagccaggtgcccggccacggccccaacctgcggctgagcaacctgacccgggccagctttgtgagccactacatcctgcagaagtactgcagcgtgaagccctgcaccaagcagctgcacctgaccctggcccacaagttctacccccaccaccagaggaccctggagcagctggcccgggccatccccctgggccacagctgccagtggacagctgccctgtacagccgggacatgagatttgtgcactaccagaccctgcgggccctcttccagtacaagccccagaatgtggatgagctgaccctgagccctggggactacatctttgtggaccccacccagcaggatgaggccagcgagggctgggtgattggcatcagccagaggacaggctgccggggcttcctgcctgagaactacacagaccgggccagcgagagtgacacctgggtgaagcacaggatgtacaccttcagcctggccacagacctgaacagcaggaaggatggagaggccagcagccgctgcagcggggagttcctgccccagacagcccggagcctgagcagcctgcaggccctgcaggccaccgtggccaggaagtctgtgctggtggtgagacatggagagcgggtggaccagatctttgggaaggcctggctgcagcagtgcagcaccccagatggcaagtactacagaccagacctgaacttcccctgcagcctgcccaggaggagccggggcatcaaggactttgaaaatgacccccccctgagcagctgtggcatcttccagagcagaattgctggagatgccctgctggacagcggcatccgcatcagctctgtgtttgccagccctgccctgcgctgtgtgcagacagccaagctgatcctggaggagctgaagctggagaagaagatcaagatccgggtggagcccggcatctttgagtggaccaagtgggaggccggcaagaccacccccaccctgatgagcctggaggagctgaaggaggccaacttcaacatcgacacagactacagacctgccttccccctgagcgccctgatgcctgctgagagctaccaggagtacatggaccgctgcacagcctccatggtgcagatcgtgaacacctgcccccaggacaccggggtcatcctgattgtgagccacggcagcaccctggacagctgcacccggcccctgctgggcctgcccccccgggagtgtggggactttgcccagctggtgaggaagatccccagcctgggcatgtgcttctgtgaggagaacaaggaggagggcaagtgggagctggtgaacccccctgtgaagaccctgacccacggggccaatgctgccttcaactggaggaactggatcagcggcaactag

SEQ ID NO: 200699 - DNA, 1986 bp, Artificial Sequence
  derived and/or modified sequence
atggccgccggcgagacccagctgtacgccaaggtgagcaacaagctgaaatccaggtcaagcccatctttgcttgagcctctgctcgcaatgggatttcccgtgcatactgccctcaaggctctcgctgccaccggtagaaagaccgcagaagaggccctcgcctggcttcatgatcactgcaatgatccatctctggatgacccgatccctcaagagtacgcactgttcctctgtcctaccggtccattactcgaaaaacttcaggagttttggagagaatctaagcgccagtgtgccaagaatcgcgcacatgaagtgttcccacacgtgaccctgtgcgacttcttcacctgtgaggatcagaaggttgagtgcctttacgaagccttaaagcgggccggggatcgcttattaggcagctttcctaccgcggttcccttggctttgcacagcagcatcagctaccttgggttcttcgtcagtggctctcctgctgatgtgattcgagaatttgccatgacctttgcaaccgaggcttcactccttgccggaaccagtgtgtctcgcttttggatctttagccaagtcccgggtcacgggcctaacctaagattgagtaatctcacccgggccagctttgtgagccactacatcctccagaaatattgctctgtaaagccgtgtactaagcagctgcacctgaccttggcccataagttctatccccatcaccagcgcacactggagcagctggccagggcgatacctctcgggcacagttgtcagtggactgccgcactgtatagccgtgatatgcggtttgtccactatcagaccctgagagccctgtttcagtacaaacctcagaatgtagatgagctcactctgtctcccggcgactacattttcgtggatcctacccagcaggacgaggcatctgagggttgggtgattggaattagtcagagaaccgggtgcagaggctttctgcctgagaactacacagatagggctagcgaaagtgatacgtgggtgaagcaccggatgtatacgttttcattggctacagaccttaattcccgcaaagatggagaggctagctcccgctgcagcggagagttcctccctcaaaccgcccggagtctttcaagcctccaggctctgcaagccacagtcgcaaggaagtccgtgctcgtggtacgacacggagaacgggtggatcagatattcggaaaagcttggttgcagcaatgttctacaccagatggcaagtattatcggccagatctgaatttcccttgctcactcccaaggcgcagccgtggcatcaaagattttgagaacgacccaccactgagcagctgcggaatcttccagtctcgcattgcaggcgacgccctcctggacagcggcattagaatatccagcgtctttgctagccccgcactgcgctgcgtgcagaccgcaaagctgatcctagaagagttaaagctagagaaaaagatcaagatccgagtggagccgggaatcttcgagtggacgaagtgggaagccggcaagactacacctactttgatgtccctggaagaactaaaagaggcaaacttcaacatcgataccgattaccggcccgctttcccgttatctgcactgatgccagcagaatcgtatcaggaatacatggatagatgtacggcgagcatggtgcagatcgtgaacacatgccctcaagacacgggtgttatcctaatagtttcccacggctcaactctggacagttgtacccggccattgcttgggttgcccccgagggagtgcggcgacttcgcacagctcgtccgcaagatccccagcttgggtatgtgcttctgcgaggagaataaagaggaggggaagtgggaacttgtcaatcccccagtgaagacccttactcatggcgcgaacgccgcattcaactggagaaattggatcagtggtaattag

SEQ ID NO: 200700 - DNA, 1986 bp, Artificial Sequence
  derived and/or modified sequence
atggcagcaggcgagactcagttatatgccaaggtgtctaacaagctgaaaagccggtctagtccgtcattactggagcccctgctagccatgggcttcccggtgcatactgctctcaaagcactcgccgctacaggccgaaagaccgctgaagaggcactggcctggctgcacgatcactgtaacgatccatccttggacgatccaataccccaggaatatgcactgttcctgtgccctaccggcccactcctggagaaacttcaggagttctggcgcgagtccaagcgccagtgcgcaaagaaccgggctcacgaggtttttccacacgttaccctttgtgacttcttcacatgtgaggaccaaaaagttgaatgcctctacgaggcactgaaacgggctggcgaccggctactagggtcctttcccacggccgtgcccttggcactgcattcatcaatttcctaccttggcttctttgtctctggttcccctgcggatgtcattagagaatttgccatgacctttgccaccgaggccagccttctggcaggcacaagcgtgagcaggttctggattttctcccaggtccccggacacggtcctaacttgagactaagtaacctgactcgagcgagcttcgtttcacattatatccttcagaaatactgttctgtgaagccatgtacaaaacaactgcacttgactttggcccacaaattctatcctcatcaccagcggactttagagcagttggctcgggcaatacccctcgggcactcctgccagtggaccgccgctctctactctcgtgatatgcgctttgtgcattaccagacactccgcgcactatttcagtacaagcctcaaaacgtcgatgaactgacgttatcccccggagactacatcttcgtggacccaacccagcaggacgaggccagtgaaggatgggtgataggtattagccagcgaacgggttgtagaggttttctgcccgagaattatacagatcgtgcctccgaatctgatacatgggtaaagcacagaatgtataccttcagtctagcaaccgatctcaatagccgtaaagatggagaagcctcatctagatgtagtggcgagttcctgccacagaccgctaggtcccttagctcattacaggctctgcaagcaacggtagcccgaaaatccgtgctggtcgtaaggcacggagaacgggtggatcagatcttcggcaaggcgtggctacagcagtgttccaccccagacggaaagtactatagacctgatctgaacttcccgtgtagtcttccaagacgtagccgtggcattaaagactttgagaatgatcctccactcagttcttgtggcatcttccaaagtcgtatagccggtgatgcccttctggactctgggattcgcatctccagtgttttcgcctctcctgcccttcggtgtgtacagacggcgaaattgatactggaggagctaaaattggaaaaaaaaatcaaaattagagttgagccagggatttttgagtggaccaagtgggaggccggaaaaactacgcctactctcatgtccctggaggagttgaaagaggctaacttcaacatcgacaccgactaccggcctgcctttcctttgtcagcactgatgccagccgagtcataccaggaatatatggaccgatgtacagcctcgatggttcaaattgtgaatacctgcccacaagatactggcgttatcctcattgtaagccatgggagcacgttggacagctgcacaaggcccctgctgggcctcccaccaagggagtgtggggatttcgcacaacttgtgcgcaaaattccaagccttggaatgtgtttctgcgaggagaacaaagaggagggcaaatgggaactggtgaacccaccagtgaaaactttaacacacggagcgaacgctgccttcaattggcggaattggatctctggtaattag

SEQ ID NO: 200701 - DNA, 2504 bp, Artificial Sequence
  derived and/or modified sequence
ggcgagcttcttggcctaagggcaggaagagatggcagcgggggagacgcagctctacgccaaggtctccaacaagctcaagagccgcagcagcccctcgctcctggagcccctcctggccatgggcttcccggtgcacaccgcgctgaaagcgttggcagccacggggaggaagacggcggaggaggccttggcctggctgcatgatcattgcaatgacccttccctagacgaccccatcccccaggagtatgcccttttcctctgtccaacggggcccctgctggaaaaacttcaagagttctggagagagagcaagcgccagtgtgcaaagaacagagctcatgaggtcttcccacacgtgacactctgtgacttcttcacgtgtgaagaccagaaggtggaatgcctgtacgaggcgctgaagagagctggagacaggctcctgggctccttccccacggccgtgcctctggctctccactcctccatcagctacctcggcttcttcgtcagtggcagccccgcagacgtcatccgggaattcgccatgaccttcgccacggaagcatctctcttagcaggcacttccgtttcccgcttctggattttcagccaggtgcctggacatggccctaacctgaggctgagcaatttaactagagcctccttcgtgagccactacatccttcaaaaatactgctccgtgaagccttgcaccaaacagctgcatctgaccttggcccacaagttctacccccaccaccagaggacgctggagcagctggccagagccatccccctgggccacagctgccagtggaccgcagcactctactcccgagacatgcgctttgtgcactaccagaccctgagagccctattccagtacaaaccccagaacgtggatgagctgacgctaagtcctggtgactacatctttgtggaccccacgcagcaggacgaagccagcgagggctgggtgattgggatctcacagcggacgggctgccggggcttcctgccggaaaactacacggatcgagccagtgagtctgacacgtgggtgaagcacaggatgtacaccttcagtctagccacagacctgaactccagaaaggatggtgaagccagcagcagatgcagcggggaatttcttccacaaacggcaaggagtcttagcagcttacaggccttgcaggctaccgttgcaaggaagagcgtgctggtggttcgccacggggagagagtggatcagatcttcgggaaggcatggctgcagcaatgctccactcctgatgggaaatactacaggccagacctgaatttcccctgcagtctgccaagacggagtcgtgggatcaaagactttgaaaacgatcccccattatcatcgtgtggcattttccagtccagaattgcaggggacgcgctactggacagtggtatcagaatcagctctgtgtttgcctccccagccctccgctgtgtgcagacggccaaactcatcctggaagaactcaaactggagaaaaaaatcaagatacgagtggaacctggaatctttgaatggacaaaatgggaagctggcaaaaccaccccaaccctcatgagcctggaagagctgaaagaggcaaatttcaacattgacactgattacaggcccgcgtttcccctgtccgccctcatgccggccgagagctaccaggagtacatggacaggtgcacggcgagcatggtgcaaatcgtcaacacctgtccacaggacacgggtgtcatcctaattgtgagtcacggctccactctggactcctgcacgcggccactgctcgggctgccgccccgggaatgtggggattttgcccaactcgtgagaaagatcccttccctgggcatgtgcttctgtgaagaaaataaagaggaaggaaaatgggagttggtgaacccaccggtgaagaccctgacccacggggcgaacgcagcatttaactggaggaactggatctcaggcaactgagagccacggtgatgttgtcataacctcagagtggagaggcagaaaccatgtgcagaggctgggagatgctgctgtttccagaggcgtcttagtctcacccaatgtgatttgtagaagcacgagacgcacttttatatcccggaatatttccctccggctttcgcctttgtaactcccatctgtggacccatcgtccaccagcccagctgcggggagcacagggcaggtggctgggtgaggatgccgccctgcagcatgtacaccgagtgtctgcagctggggacacaactgcccgggactctaacttccaggaattaaagactcaccacacacgaaggatctaaccacttcattttccatggtctaatcattaaattcccaatcgttttttctttttctgggtccatcactctttagccatatccacatgggctaaaacaggtgtaatagtcaataaaatggtcccagaaaaccatcgaccaggtca

SEQ ID NO: 200702 - protein, 2320 aa, Artificial Sequence
  derived and/or modified sequence
MAEPSSARRPVPLIESELYFLIARYLSAGPCRRAAQVLVQELEQYQLLPKRLDWEGNEHNRSYEELVLSNKHVAPDHLLQICQRIGPMLDKEIPPSISRVTSLLGAGRQSLLRTAKDCRHTVWKGSAFAALHRGRPPEMPVNYGSPPNLVEIHRGKQLTGCSTFSTAFPGTMYQHIKMHRRILGHLSAVYCVAFDRTGHRIFTGSDDCLVKIWSTHNGRLLSTLRGHSAEISDMAVNYENTMIAAGSCDKIIRVWCLRTCAPVAVLQGHTGSITSLQFSPMAKGSQRYMVSTGADGTVCFWQWDLESLKFSPRPLKFTEKPRPGVQMLCSSFSVGGMFLATGSTDHVIRMYFLGFEAPEKIAELESHTDKVDSIQFCNNGDRFLSGSRDGTARIWRFEQLEWRSILLDMATRISGDLSSEEERFMKPKVTMIAWNQNDSIVVTAVNDHVLKVWNSYTGQLLHNLMGHADEVFVLETHPFDSRIMLSAGHDGSIFIWDITKGTKMKHYFNMIEGQGHGAVFDCKFSQDGQHFACTDSHGHLLIFGFGCSKPYEKIPDQMFFHTDYRPLIRDSNNYVLDEQTQQAPHLMPPPFLVDVDGNPHPTKYQRLVPGRENSADEHLIPQLGYVATSDGEVIEQIISLQTNDNDERSPESSILDGMIRQLQQQQDQRMGADQDTIPRGLSNGEETPRRGFRRLSLDIQSPPNIGLRRSGQVEGVRQMHQNAPRSQIATERDLQAWKRRVVVPEVPLGIFRKLEDFRLEKGEEERNLYIIGRKRKTLQLSHKSDSVVLVSQSRQRTCRRKYPNYGRRNRSWRELSSGNESSSSVRHETSCDQSEGSGSSEEDEWRSDRKSESYSESSSDSSSRYSDWTADAGINLQPPLRTSCRRRITRFCSSSEDEISTENLSPPKRRRKRKKENKPKKENLRRMTPAELANMEHLYEFHPPVWITDTTLRKSPFVPQMGDEVIYFRQGHEAYIEAVRRNNIYELNPNKEPWRKMDLRDQELVKIVGIRYEVGPPTLCCLKLAFIDPATGKLMDKSFSIRYHDMPDVIDFLVLRQFYDEARQRNWQSCDRFRSIIDDAWWFGTVLSQEPYQPQYPDSHFQCYIVRWDNTEIEKLSPWDMEPIPDNVDPPEELGASISVTTDELEKLLYKPQAGEWGQKSRDEECDRIISGIDQLLNLDIAAAFAGPVDLCTYPKYCTVVAYPTDLYTIRMRLVNRFYRRLSALVWEVRYIEHNARTFNEPESVIARSAKKITDQLLKFIKNQHCTNISELSNTSENDEQNAEDLDDSDLPKTSSGRRRVHDGKKSIRATNYVESNWKKQCKELVNLIFQCEDSEPFRQPVDLVEYPDYRDIIDTPMDFGTVRETLDAGNYDSPLEFCKDIRLIFSNAKAYTPNKRSKIYSMTLRLSALFEEKMKKISSDFKIGQKFNEKLRRSQRFKQRQNCKGDSQPNKSIRNLKPKRLKSQTKIIPELVGSPTQSTSSRTAYLGTHKTSAGISSGVTSGDSSDSAESSERRKRNRPITNGSTLSESEVEDSLATSLSSSASSSSEESKESSRARESSSRSGLSRSSNLRVTRTRAAQRKTGPVSLANGCGRKATRKRVYLSDSDNNSLETGEILKARAGNNRKVLRKCAAVAANKIKLMSDVEENSSSESVCSGRKLPHRNASAVARKKLLHNSEDEQSLKSEIEEEELKDENQLLPVSSSHTAQSNVDESENRDSESESDLRVARKNWHANGYKSHTPAPSKTKFLKIESSEEDSKSHDSDHACNRTAGPSTSVQKLKAESISEEADSEPGRSGGRKYNTFHKNASFFKKTKILSDSEDSESEEQDREDGKCHKMEMNPISGNLNCDPIAMSQCSSDHGCETDLDSDDDKIEKPNNFMKDSASQDNGLSRKISRKRVCSSDSDSSLQVVKKSSKARTGLLRITRRCAATAANKIKLMSDVEDVSLENVHTRSKNGRKKPLHLACTTAKKKLSDCEGSVHCEVPSEQYACEGKPPDPDSEGSTKVLSQALNGDSDSEDMLNSEHKHRHTNIHKIDAPSKRKSSSVTSSGEDSKSHIPGSETDRTFSSESTLAQKATAENNFEVELNYGLRRWNGRRLRTYGKAPFSKTKVIHDSQETAEKEVKRKRSHPELENVKISETTGNSKFRPDTSSKSSDLGSVTESDIDCTDNTKTKRRKTKGKAKVVRKEFVPRDREPNTKVRTCMHNQKDAVQMPSETLKAKMVPEKVPRRCATVAANKIKIMSNLKETISGPENVWIRKSSRKLPHRNASAAAKKKLLNVYKEDDTTINSESEKELEDINRKMLFLRGFRSWKENAQ

SEQ ID NO: 200703 - DNA, 6963 bp, Artificial Sequence
  derived and/or modified sequence
atggccgagcccagcagcgccagaagacccgtgcccctgatcgagagcgagctgtacttcctgatcgccagatacctgagcgccggcccctgcagaagagccgcccaggtgctggtgcaggagctggagcagtaccagctgctgcccaagagactggactgggagggcaacgagcacaacagaagctacgaggagctggtgctgagcaacaagcacgtggcccccgaccacctgctgcagatctgccagagaatcggccccatgctggacaaggagatcccccccagcatcagcagagtgaccagcctgctgggcgccggcagacagagcctgctgagaaccgccaaggactgcagacacaccgtgtggaagggcagcgccttcgccgccctgcacagaggcagaccccccgagatgcccgtgaactacggcagcccccccaacctggtggagatccacagaggcaagcagctgaccggctgcagcaccttcagcaccgccttccccggcaccatgtaccagcacatcaagatgcacagaagaatcctgggccacctgagcgccgtgtactgcgtggccttcgacagaaccggccacagaatcttcaccggcagcgacgactgcctggtgaagatctggagcacccacaacggcagactgctgagcaccctgagaggccacagcgccgagatcagcgacatggccgtgaactacgagaacaccatgatcgccgccggcagctgcgacaagatcatcagagtgtggtgcctgagaacctgcgcccccgtggccgtgctgcagggccacaccggcagcatcaccagcctgcagttcagccccatggccaagggcagccagagatacatggtgagcaccggcgccgacggcaccgtgtgcttctggcagtgggacctggagagcctgaagttcagccccagacccctgaagttcaccgagaagcccagacccggcgtgcagatgctgtgcagcagcttcagcgtgggcggcatgttcctggccaccggcagcaccgaccacgtgatcagaatgtacttcctgggcttcgaggcccccgagaagatcgccgagctggagagccacaccgacaaggtggacagcatccagttctgcaacaacggcgacagattcctgagcggcagcagagacggcaccgccagaatctggagattcgagcagctggagtggagaagcatcctgctggacatggccaccagaatcagcggcgacctgagcagcgaggaggagagattcatgaagcccaaggtgaccatgatcgcctggaaccagaacgacagcatcgtggtgaccgccgtgaacgaccacgtgctgaaggtgtggaacagctacaccggccagctgctgcacaacctgatgggccacgccgacgaggtgttcgtgctggagacccaccccttcgacagcagaatcatgctgagcgccggccacgacggcagcatcttcatctgggacatcaccaagggcaccaagatgaagcactacttcaacatgatcgagggccagggccacggcgccgtgttcgactgcaagttcagccaggacggccagcacttcgcctgcaccgacagccacggccacctgctgatcttcggcttcggctgcagcaagccctacgagaagatccccgaccagatgttcttccacaccgactacagacccctgatcagagacagcaacaactacgtgctggacgagcagacccagcaggccccccacctgatgcccccccccttcctggtggacgtggacggcaacccccaccccaccaagtaccagagactggtgcccggcagagagaacagcgccgacgagcacctgatcccccagctgggctacgtggccaccagcgacggcgaggtgatcgagcagatcatcagcctgcagaccaacgacaacgacgagagaagccccgagagcagcatcctggacggcatgatcagacagctgcagcagcagcaggaccagagaatgggcgccgaccaggacaccatccccagaggcctgagcaacggcgaggagacccccagaagaggcttcagaagactgagcctggacatccagagcccccccaacatcggcctgagaagaagcggccaggtggagggcgtgagacagatgcaccagaacgcccccagaagccagatcgccaccgagagagacctgcaggcctggaagagaagagtggtggtgcccgaggtgcccctgggcatcttcagaaagctggaggacttcagactggagaagggcgaggaggagagaaacctgtacatcatcggcagaaagagaaagaccctgcagctgagccacaagagcgacagcgtggtgctggtgagccagagcagacagagaacctgcagaagaaagtaccccaactacggcagaagaaacagaagctggagagagctgagcagcggcaacgagagcagcagcagcgtgagacacgagaccagctgcgaccagagcgagggcagcggcagcagcgaggaggacgagtggagaagcgacagaaagagcgagagctacagcgagagcagcagcgacagcagcagcagatacagcgactggaccgccgacgccggcatcaacctgcagccccccctgagaaccagctgcagaagaagaatcaccagattctgcagcagcagcgaggacgagatcagcaccgagaacctgagcccccccaagagaagaagaaagagaaagaaggagaacaagcccaagaaggagaacctgagaagaatgacccccgccgagctggccaacatggagcacctgtacgagttccacccccccgtgtggatcaccgacaccaccctgagaaagagccccttcgtgccccagatgggcgacgaggtgatctacttcagacagggccacgaggcctacatcgaggccgtgagaagaaacaacatctacgagctgaaccccaacaaggagccctggagaaagatggacctgagagaccaggagctggtgaagatcgtgggcatcagatacgaggtgggcccccccaccctgtgctgcctgaagctggccttcatcgaccccgccaccggcaagctgatggacaagagcttcagcatcagataccacgacatgcccgacgtgatcgacttcctggtgctgagacagttctacgacgaggccagacagagaaactggcagagctgcgacagattcagaagcatcatcgacgacgcctggtggttcggcaccgtgctgagccaggagccctaccagccccagtaccccgacagccacttccagtgctacatcgtgagatgggacaacaccgagatcgagaagctgagcccctgggacatggagcccatccccgacaacgtggacccccccgaggagctgggcgccagcatcagcgtgaccaccgacgagctggagaagctgctgtacaagccccaggccggcgagtggggccagaagagcagagacgaggagtgcgacagaatcatcagcggcatcgaccagctgctgaacctggacatcgccgccgccttcgccggccccgtggacctgtgcacctaccccaagtactgcaccgtggtggcctaccccaccgacctgtacaccatcagaatgagactggtgaacagattctacagaagactgagcgccctggtgtgggaggtgagatacatcgagcacaacgccagaaccttcaacgagcccgagagcgtgatcgccagaagcgccaagaagatcaccgaccagctgctgaagttcatcaagaaccagcactgcaccaacatcagcgagctgagcaacaccagcgagaacgacgagcagaacgccgaggacctggacgacagcgacctgcccaagaccagcagcggcagaagaagagtgcacgacggcaagaagagcatcagagccaccaactacgtggagagcaactggaagaagcagtgcaaggagctggtgaacctgatcttccagtgcgaggacagcgagcccttcagacagcccgtggacctggtggagtaccccgactacagagacatcatcgacacccccatggacttcggcaccgtgagagagaccctggacgccggcaactacgacagccccctggagttctgcaaggacatcagactgatcttcagcaacgccaaggcctacacccccaacaagagaagcaagatctacagcatgaccctgagactgagcgccctgttcgaggagaagatgaagaagatcagcagcgacttcaagatcggccagaagttcaacgagaagctgagaagaagccagagattcaagcagagacagaactgcaagggcgacagccagcccaacaagagcatcagaaacctgaagcccaagagactgaagagccagaccaagatcatccccgagctggtgggcagccccacccagagcaccagcagcagaaccgcctacctgggcacccacaagaccagcgccggcatcagcagcggcgtgaccagcggcgacagcagcgacagcgccgagagcagcgagagaagaaagagaaacagacccatcaccaacggcagcaccctgagcgagagcgaggtggaggacagcctggccaccagcctgagcagcagcgccagcagcagcagcgaggagagcaaggagagcagcagagccagagagagcagcagcagaagcggcctgagcagaagcagcaacctgagagtgaccagaaccagagccgcccagagaaagaccggccccgtgagcctggccaacggctgcggcagaaaggccaccagaaagagagtgtacctgagcgacagcgacaacaacagcctggagaccggcgagatcctgaaggccagagccggcaacaacagaaaggtgctgagaaagtgcgccgccgtggccgccaacaagatcaagctgatgagcgacgtggaggagaacagcagcagcgagagcgtgtgcagcggcagaaagctgccccacagaaacgccagcgccgtggccagaaagaagctgctgcacaacagcgaggacgagcagagcctgaagagcgagatcgaggaggaggagctgaaggacgagaaccagctgctgcccgtgagcagcagccacaccgcccagagcaacgtggacgagagcgagaacagagacagcgagagcgagagcgacctgagagtggccagaaagaactggcacgccaacggctacaagagccacacccccgcccccagcaagaccaagttcctgaagatcgagagcagcgaggaggacagcaagagccacgacagcgaccacgcctgcaacagaaccgccggccccagcaccagcgtgcagaagctgaaggccgagagcatcagcgaggaggccgacagcgagcccggcagaagcggcggcagaaagtacaacaccttccacaagaacgccagcttcttcaagaagaccaagatcctgagcgacagcgaggacagcgagagcgaggagcaggacagagaggacggcaagtgccacaagatggagatgaaccccatcagcggcaacctgaactgcgaccccatcgccatgagccagtgcagcagcgaccacggctgcgagaccgacctggacagcgacgacgacaagatcgagaagcccaacaacttcatgaaggacagcgccagccaggacaacggcctgagcagaaagatcagcagaaagagagtgtgcagcagcgacagcgacagcagcctgcaggtggtgaagaagagcagcaaggccagaaccggcctgctgagaatcaccagaagatgcgccgccaccgccgccaacaagatcaagctgatgagcgacgtggaggacgtgagcctggagaacgtgcacaccagaagcaagaacggcagaaagaagcccctgcacctggcctgcaccaccgccaagaagaagctgagcgactgcgagggcagcgtgcactgcgaggtgcccagcgagcagtacgcctgcgagggcaagccccccgaccccgacagcgagggcagcaccaaggtgctgagccaggccctgaacggcgacagcgacagcgaggacatgctgaacagcgagcacaagcacagacacaccaacatccacaagatcgacgcccccagcaagagaaagagcagcagcgtgaccagcagcggcgaggacagcaagagccacatccccggcagcgagaccgacagaaccttcagcagcgagagcaccctggcccagaaggccaccgccgagaacaacttcgaggtggagctgaactacggcctgagaagatggaacggcagaagactgagaacctacggcaaggcccccttcagcaagaccaaggtgatccacgacagccaggagaccgccgagaaggaggtgaagagaaagagaagccaccccgagctggagaacgtgaagatcagcgagaccaccggcaacagcaagttcagacccgacaccagcagcaagagcagcgacctgggcagcgtgaccgagagcgacatcgactgcaccgacaacaccaagaccaagagaagaaagaccaagggcaaggccaaggtggtgagaaaggagttcgtgcccagagacagagagcccaacaccaaggtgagaacctgcatgcacaaccagaaggacgccgtgcagatgcccagcgagaccctgaaggccaagatggtgcccgagaaggtgcccagaagatgcgccaccgtggccgccaacaagatcaagatcatgagcaacctgaaggagaccatcagcggccccgagaacgtgtggatcagaaagagcagcagaaagctgccccacagaaacgccagcgccgccgccaagaagaagctgctgaacgtgtacaaggaggacgacaccaccatcaacagcgagagcgagaaggagctggaggacatcaacagaaagatgctgttcctgagaggcttcagaagctggaaggagaacgcccagtag

SEQ ID NO: 200704 - DNA, 10141 bp, Artificial Sequence
  derived and/or modified sequence
aggtctttgcctccgcgtcactttctcctcatcgagtccccggaggcagagagctgagcgaggttcgcctccccgggcgggacacgagctccggtcctctcttggcgcaaacccccgccccccgcggagggactacttttcgtctcccgcggaggaactacttcctcccccgcggaggcgtcggtccaggcggcgcgcacggtatggcggcggcggcggcggcggcggcgcgcgcctgagaagaggggacgccagcccggtcaggcctcggcgcggcctacacgctccgctcgctcgctcgctcccgcctcccgccccgcgcccggccatggcggagccgtcgtccgcccgacgcccggtgcctctcatcgagtcggagctgtacttccttatcgcccggtacctatcggcgggcccgtgtcggagagcggcccaggtgctggtgcaggagctggagcagtaccagttgttgccgaagagattggactgggagggcaacgagcacaacaggagctacgaggagttggtcttgtccaataagcatgtggctcctgatcatcttttgcaaatctgccagcgcatcggtcctatgttggataaagaaattccacccagtatttcaagagtcacttctttacttggtgcaggaaggcagtctttgctacgtacagcaaaagactgcaggcacacagtttggaagggctctgcctttgctgctcttcatagaggaagacctcctgaaatgccagtgaattatggttccccaccaaatcttgtggagatacatcgaggaaaacaactcacagggtgttccacttttagtacagcatttccaggaactatgtatcagcatataaaaatgcacagaaggattctcggacatctatctgctgtttactgtgtagcatttgataggacaggacatagaatctttacaggttcagatgactgtttggtaaagatttggtcaacacataatggccgcttgttatctacattaagaggtcattctgcagaaatttcagatatggcagtaaactatgagaatacaatgattgctgcggggagctgtgataaaattattagagtgtggtgcttgagaacttgtgccccagttgctgtgctccaaggacacacaggatcaattacatctttacagtttagcccgatggccaaaggctctcaaagatacatggtttccactggtgctgatgggacagtttgcttttggcaatgggatttagaatccttaaaatttagcccacgtcccctgaagttcactgaaaagcctaggccaggcgttcaaatgctttgttcttcttttagtgttggtggtatgtttttagccacaggtagtactgatcatgtaatcagaatgtattttttgggttttgaagcacccgaaaaaatcgcagaacttgaaagccacactgataaagtagatagtatccaattttgtaacaatggtgatcggttcctaagtggtagcagagatggaacagcacggatttggagatttgagcagttagaatggaggagcattttattggatatggctaccagaatctcaggggacttatcttccgaagaggaaaggtttatgaaacctaaagtaacaatgatagcttggaatcaaaatgatagcattgttgtcacagctgtgaatgatcatgtcctcaaagtgtggaattcttacactggacaactgcttcataacttaatgggacatgctgatgaagtatttgttctggagacacatccctttgattccagaattatgttatctgcaggacatgatggcagcatatttatatgggatattacaaaaggtaccaagatgaaacattattttaatatgattgaaggacaaggacatggagctgtgtttgactgtaagttttcacaggatggacagcattttgcctgtacagattctcatgggcaccttctgatatttggttttggatgcagcaaaccatatgaaaagattcctgatcagatgttcttccatactgactatcgaccacttattagagattctaataattatgtcttagatgagcaaactcagcaggctcctcatcttatgcctccaccattcttggtagatgtagatggaaatcctcatccaaccaagtatcagagattagtaccaggccgagaaaattctgcagatgaacatttgattccacagctgggctatgtggcaacaagtgatggagaggtgattgaacaaattataagcctgcaaaccaatgataatgatgaacgcagcccagaatcgagtattcttgatggaatgataagacagttgcagcagcagcaagatcagagaatgggagcagatcaggatactattccaagaggactttcaaatggtgaagaaacaccccggagaggttttagaaggctgagcttagacattcagtcccctccaaatattggtctgcgtcgtagtggacaagttgaaggtgttcgtcagatgcatcaaaacgctccacgcagtcagattgctacagaacgtgacctgcaggcttggaaacgaagagtggttgtaccagaggtaccactaggcatatttaggaagctggaagacttccgattagagaaaggtgaagaggaaagaaatctttatataataggaagaaaaagaaagactcttcagctctcacataagtcggattcagtggttttggtatcacagtctagacaaaggacatgtaggcgtaaatatccaaattatggtagaagaaatcgtagctggcgtgagttatcttctggaaatgagtcttcaagctctgtaagacatgagacttcctgtgatcagagtgaaggttctggttcttcagaagaggatgaatggagaagtgacagaaaaagtgagagttacagcgaaagttcaagtgactcttcatctagatattccgattggacagctgatgcgggcatcaatttgcagcctcctttaagaacatcatgtcgtcgacgaattactcgattttgtagtagttcagaagatgaaatatctactgagaatttatctcctccaaaaagaagacgaaagagaaagaaagaaaataagcctaagaaggagaatttgcggaggatgactccagcagagcttgcaaatatggagcatttatatgaatttcaccctccagtttggattactgacaccacacttagaaaatctccttttgttcctcaaatgggtgatgaggtaatatattttcgacagggtcatgaagcttatattgaggctgtaagaagaaataatatttatgaactgaaccctaataaggagccatggagaaaaatggatcttagggatcaagaattggttaaaatagttggaatacgatatgaagttgggccccctacactctgttgcctaaaactagcatttatagatccagcaactggaaaacttatggacaaatctttctctattagatatcatgatatgccagatgttattgactttcttgtattgcgtcaattttatgatgaagcaagacagaggaattggcagtcttgtgacagattccgctctattattgatgatgcttggtggtttggaacagtgttaagtcaagagccatatcaaccacagtatcctgatagtcatttccagtgttatattgttaggtgggataatactgaaattgaaaaacttagcccatgggacatggaaccaattcctgataatgttgatccacctgaagaattaggagctagtatttctgtcacaacagatgagctagagaaattgctctataaaccacaagctggtgaatggggtcagaaatcaagagatgaagaatgtgatagaattatcagtggtatagatcaacttttgaatcttgatatagcagcagcttttgcaggccctgttgatttgtgtacatacccgaagtactgtactgtagtagcttatccaaccgatctttacacaattcgaatgagacttgttaatcgattttacaggaggctgtctgcgttagtttgggaagtcagatatatagaacataatgccagaacatttaacgaacctgagagtgtaattgcaagatcagctaaaaagataactgaccaacttttaaaatttatcaagaatcaacactgtacaaatatctcagaactttctaacacatctgaaaatgatgagcaaaatgctgaggatttggatgatagtgatcttcctaaaacatcttctggaaggaggagagtccatgatgggaaaaaaagcatcagagctacgaactatgttgaaagcaactggaagaaacagtgtaaggaactagtgaacttaatttttcagtgtgaagattctgaaccatttagacaacctgttgatttggttgaatatccagactacagagatattatagataccccaatggattttggaacagtaagggaaactctagatgcgggaaattatgacagccctttggagttttgcaaagacatccggctgatatttagcaatgcaaaagcgtatacaccaaacaaaagatcaaagatttatagtatgaccttgagattatctgccttatttgaagaaaaaatgaagaaaatctcttctgattttaaaattggtcaaaaattcaatgaaaaacttcgaagaagccagaggttcaagcaacggcaaaattgtaaaggtgacagtcagcctaacaaaagtatcagaaacctcaagccgaagaggttaaaatctcagacaaaaataattcctgagttggtaggttctcctacccagtctacctcaagtaggacagcttatcttggaacccacaagacaagtgctggtatctcttcaggtgttacttctggtgactcttcagattcagcagaatcatcagaaaggaggaaaagaaatagacctataacaaatggttctacattatctgaaagtgaagtggaagattctttagctacctctttgtcatcgtcagcttccagtagttctgaggaaagcaaagagagttccagagctcgtgaatcctcctcacgcagtgggctatccagaagcagcaatctcagggtaaccagaactagagctgctcaaagaaaaactggtcccgtttcattagcaaatggatgtggcagaaaagccactcgaaagagagtctatttaagtgattctgataacaattcattggagactggtgaaattctaaaagccagagctggaaataaccgaaaagtcttaaggaagtgtgctgctgtggctgccaataaaataaagctaatgagtgatgtagaagagaattctagctctgaaagtgtctgttctggtcggaagctgcctcaccgcaatgcttctgctgtagctagaaaaaagttattacataattctgaagatgaacagagcttaaagtcagaaattgaagaagaggagctaaaagatgaaaatcaactattaccagtgtccagttctcacactgcccagagcaatgttgatgaatctgaaaacagagactcagagtcagaaagtgatttgcgggtagcccggaaaaattggcatgctaatggttacaagtcccatactccagcaccttcaaagacaaaatttcttaaaatagagtcttctgaggaagactctaaaagtcatgattcagatcatgcatgtaacagaactgctggcccatcaacgtctgtgcagaaacttaaggcagagagcatctcagaggaagcagattctgaaccaggaagatctggtggtaggaaatacaatacatttcacaagaatgcgagtttctttaaaaaaaccaagattctgagtgactcagaagactctgaatctgaagagcaagatagagaagatgggaaatgtcataaaatggaaatgaacccaatttcaggaaatctgaactgtgaccctattgctatgtcccagtgttcctcagatcatggatgtgaaactgatttagattcagatgatgacaaaatagaaaaaccaaacaattttatgaaagattctgcatcacaagacaatggactaagcagaaaaatttccaggaaaagggtctgttccagtgactcagacagtagtttacaggtggttaagaaatcatcaaaagccagaacaggtctcctgaggattactcgaagatgtgcagctacggctgccaataagatcaagctcatgagtgatgtagaagatgtcagtttagaaaatgtgcacactagaagcaaaaatggaaggaaaaaacctctccatcttgcttgtactacagctaagaagaaattgagtgattgtgaaggaagtgtacattgtgaagtaccaagtgaacagtatgcctgtgaaggcaagccacctgatcctgactccgaaggtagtacaaaagtgcttagtcaggctctaaatggagactcagactctgaagatatgttgaattcagaacacaagcacaggcataccaatattcacaaaatagatgcaccttctaaaagaaaaagttcctctgttacatcttcaggagaagattcaaaaagtcatattccagggagtgagactgataggacattttcttcagagtcaaccttggcacaaaaagctactgcagagaataattttgaagtggaactgaattatgggctgcgcaggtggaatggcagaagactcaggacctatggaaaggctccttttagtaagacaaaagtgattcatgattcacaggaaacagcagagaaggaagtaaaaaggaagagatcgcatcctgaattggaaaatgtgaaaatctctgaaacaactgggaattcaaagtttagacctgatactagttccaaatcatcagatttgggatctgtaactgaatcagatattgactgtactgataatacaaaaaccaaaaggaggaaaacgaaaggaaaagcaaaagtagttagaaaagaatttgttcctagagacagagaacccaatacaaaagtgagaacatgtatgcataatcagaaggatgcagtgcagatgcctagtgaaactctgaaagcaaaaatggtacctgagaaagttccccgcagatgtgctactgttgctgcaaataaaataaagataatgagtaatctaaaagaaacgatctcaggaccagaaaatgtctggattaggaagagtagcagaaaactgccccatcgaaatgcttctgctgcggctaagaaaaaattactgaatgtttataaagaggatgatacaaccataaattctgaaagtgaaaaagagctagaagatattaatagaaaaatgctttttttaagggggttcagatcctggaaagaaaatgcacaatagtgactatgagaatgtagaagtggcatctgaaaacaattggtacacaagtaaactggcagttacattctgctcccagctctaaaattactcccttattggcatctttggaggaattttctaaaagccataatccagtgggttcctcccagtcagctcttgtacagacatgtgctctggggaattctgaggaggaaataaattgcagagtctgtaggtggagaggtggaaagaaaagacaaatggcctgctataagactactattcctttccagaatgcaaggccttgaagacatgattccttagaggaagaatataatgggaagtgtacaggctaggaagaacttgaagtgaacaaatttcaaaatcttaacctgatgctaattttcagggttctccattacagtgtaaaaattcagaccacgacaactatggtgtcatgaggaaaaaaaatcaggcatttttccaaaggaagtgctaatgggcctatttgacttctgagtgaagcaaaaactacccagatccattccctacaattcacatccccaaaggtcaaaaacaaactaggaggacctgggaatttcagctggagatactgattattgagttctgaagtagagtgttggaaataggcaattagagaaagtccattgatgtcattttgtttataatattgcagttcatactgaatgaccacttgatatgactaattcagggaatatatatttttctatgaaagctatgaatgttactatcacggcttttccttatttttacttgtatgtagcagcatttacagaaatgccaaaaatgtgcctcattaagaggcaggtcttaatcagttagataaaaataaaatgtatagcttaagatcaaaacagtcatatttttagatacagtgaaatcttttatgtttctctacagcaccttaaaaattagaacttgaatactttgagtaaacttactacaatctcatcccaacaaactttaatggtagcatgtttggcctatttcattgtggcctgtactaggattagaaaatttggtcgtggtataacaaagaagtgtatttacaataggatttaatttgttgttaatatgtatttgttgaaattaaaattgccagattaaatgaatatactgtcgcatctttttaacatagtaacgtgttactggaaaaattaagttgttgaaagtaagttgttttcccatttaaaaatatctgaatatatgatttgcatgtgtaaatctgaaaaactaaactacagaaacctagggttttctatttcttttttaagtcaaatgcatttttttttttttgttatacagatgaaccaagtgtctaaaatacttgagaaatttgtggttgcatgtctgttttaaaaaaaaggctttttgttttttagcataagccagaatattctaacctactaagtctgtgtcctttgctccttttgtagtatactttcatctaaattactgatccccaatatgttgatacacaggtgagaaagggaagaattcctaataaactgctattacttttaggtgcatggggtttgatttttgagctctaatgaaatgcttaaacttctttccagttcaaattttacacttaatttataatatttattgagtatattatgtcctcaacaagtaactataaaatgaaatacttaactcggtgaagactattttatgcaaagtttttttttttttttttttttttttttagcaatttcagtgtaatgaaagaatttaagctttgaatttataatttgctgtggtggggttaatttctgtcagtatttgagattgtattatcagtcttgcataatgaaatccttttttggctaagtatttaattcgaacatatttgcctttttaaaaagtgcttggcctaaacttattgtaactgcatgaaataagcatttgcttaaaacttaacattgtaaaattgttctctctgaaatgtgtgcagaatttaaatcatggccaaatgtattactattaccctatttacagtaatttgctttgcagaaaatatttcttcatcatggaactgtgaaatcaaattgaagatcttactggtaaaaatgacaaattaacaaaaggactaagacaagtggtgcccaaacaacctttttattctgcagttccatcatcataatagaccagttaacccaggagtcctaatgttttaaaacatcattgtggtgatcttgtttattctatctcactaaggatatccagtttcctaagctcttactggctagcaatttcgtcttaattttattgctaaatgttcaaattttgcttccaaactcactttatttttgcagatgtgtacatctgctaagtactaattttatgtaaatgattttgttgattatctttccacatcttaaaatgtttctaacagctttgagattttatctcaacaggctctctctgaccccaaagtagtacttaccttcgtgactactgacaaagtcacaaaatgcaggcgatgtcatgtatttcggtacaactaaatctaggaaacggttttttcattgcattactgcatattttcattttcatttaaattatgtcccctttttctcttgcttgaaacagtgctcctcgaactttgtcttccagcacattttaaagagaaccaattaaagaacaatcacacattctgcttattaaaggctatttaaaaagaaacattttgtattagaaaatggccaactttaaaacactattttttacactcataaaaatgttttttaaatcgccttgacaatcatcagcttttgaaatgtgaattcctattgccagagtaaaggtctcgtttttataccacca

SEQ ID NO: 200705 - DNA, 6963 bp, Artificial Sequence
  derived and/or modified sequence
atggcagagccatcaagtgccaggcgacccgtgccactaatcgagtcagaactttatttcctcatcgcacgctatctcagcgcaggcccatgcaggagagccgctcaggtactggtgcaggaattagagcagtatcagctgctgccaaagaggctcgactgggaaggcaacgagcataaccgcagttatgaggaactcgtcctcagtaacaaacacgtcgcaccggatcatctgctccagatatgtcagcgcatcggccctatgttagacaaggagattcctccaagcataagcagggtcacatcactcctgggcgcggggcggcagtcccttttacggacagccaaagattgccgccataccgtctggaagggcagcgctttcgctgccctgcacagagggcgaccacccgaaatgcctgtgaactatgggagcccaccaaatctggtcgaaatccatcggggaaagcagctaaccggctgttcaacattcagcacggctttccccggcacaatgtaccagcatatcaaaatgcaccgaaggatccttggccacctttccgctgtgtactgcgtcgcctttgatcggactggacacaggatcttcacagggtccgatgactgtctcgttaagatctggtccacacacaacggacgcctgttaagtacccttaggggccactctgccgagatttccgatatggccgtgaattacgagaataccatgatcgccgccggatcctgtgataagattatcagagtctggtgcctaagaacttgcgcccccgtggctgttctgcagggccatactggaagtattacgagcctacagttcagtccaatggccaaaggaagccagagatacatggtgtccacaggggcggatggaacagtctgtttctggcagtgggatctggagagcctgaaattttcccctagaccactaaagttcacagaaaaaccacgccctggtgtgcagatgctgtgtagctccttcagcgtgggagggatgtttttggcgactggttcaaccgaccatgtgatccggatgtatttcttgggatttgaggctccagagaagatcgccgaactagaatctcataccgacaaggttgacagcatccagttctgtaacaacggggatcggtttctgagtggttcccgcgacggcaccgccagaatctggcggtttgagcaactcgaatggcggagcatccttcttgacatggccacccggatctctggggatctctccagcgaggaagagcgcttcatgaagcccaaggtgaccatgattgcgtggaatcaaaatgattccatcgtcgtcactgccgtaaacgaccacgttctcaaggtatggaactcttataccggtcagctccttcacaatctgatgggccacgctgatgaagtgttcgtcttggagacacaccctttcgactccagaattatgctgtccgcgggacacgatggttctatttttatctgggacatcaccaaaggtacaaaaatgaagcactacttcaatatgatagaaggacagggtcatggggccgtttttgattgtaaatttagtcaggatgggcagcatttcgcctgcactgattctcacggccatttgcttatattcggtttcgggtgttcaaagccatacgaaaaaatacccgatcagatgtttttccacactgattaccggcccctgattagggattcaaacaactacgttctggacgagcaaacacagcaagcccctcacctcatgccgcccccctttttagtggatgttgacggaaaccctcatcctacaaagtaccaaagactcgtgcccggtcgcgagaatagcgccgacgaacacttgattccccagctcggatacgttgccactagcgacggagaggttatcgagcagattatttcccttcagacaaacgataacgatgagagaagtcccgaatcgtccatacttgatgggatgatcaggcaactgcagcaacaacaggaccagcgtatgggagccgaccaggatactatacctcggggtttaagcaatggtgaagaaacccctcgtcgcggattccgtaggctgtctctggacattcagagtccgcctaacatagggctgagaaggtctggtcaggtcgaaggagtgagacagatgcaccagaacgcccccagatcccagatcgccactgaaagggatctacaggcctggaaacggcgtgtggtggttcctgaggtccccctcggcattttcagaaaactggaggattttaggctcgaaaaaggggaagaggagcggaacctctacattataggccgtaaaaggaaaaccctgcagctgtctcacaagagtgactccgtcgttctggtgtctcagtccagacagaggacctgcagaagaaaataccctaattacggccgcagaaatcgtagctggagagaactgtcctcagggaatgaatcttctagctccgtccgacatgaaacttcttgcgatcagtctgaagggagtggctcatccgaagaagacgaatggaggagcgatagaaaatccgaatcttatagcgaaagttcctccgactcttcatcgcgttacagcgactggaccgctgacgccggtataaatctgcagccgccactgagaacaagttgccgtagacggataacccggttttgctcttctagcgaggatgagattagcacagagaacttgtcaccacctaagagacgcaggaagcgcaagaaagagaacaaacctaaaaaagagaatctgagacgaatgacacctgccgagctggcaaatatggagcatctgtatgagtttcaccctccagtgtggattacagatactacactgaggaagagccctttcgtaccacagatgggggatgaagtcatttattttagacagggccacgaagcttacatcgaagctgtacggcgcaacaatatttatgagctcaaccccaataaggagccctggaggaagatggacctgagggatcaggaattagtcaagattgtgggaatccgttatgaggtgggaccccccactctgtgctgcctgaagctggccttcatcgatcccgccacaggaaaactgatggacaagagcttctccatacgctatcatgacatgcctgatgtaattgatttccttgtcttgcgccagttttatgacgaggcccggcaaagaaactggcagtcgtgcgatcggttcaggtccatcattgacgatgcttggtggttcggaaccgttctctcacaggagccataccaaccccagtaccctgacagccatttccagtgctacattgtcaggtgggataatacagaaatagaaaaattgtctccatgggatatggaacctatccccgataacgtcgaccccccggaggagctgggcgcctcaataagcgtgacaactgatgagctcgaaaagctactctataagccccaggccggcgagtggggccagaagtcccgggatgaagagtgtgatcgcattatatctgggatagatcaactgctgaacctcgacattgcagcagcatttgcaggtccagtggacctgtgtacatatcctaaatattgtacagtggtggcctatcctactgacttgtacacgattcgcatgcggctcgtgaaccgtttctataggcgcttgtctgccctggtgtgggaagtgaggtacattgagcataatgcacgcacatttaatgagccagagagcgtgatcgcccggtcagctaagaaaattaccgatcagctgttaaaatttatcaagaaccaacactgtaccaatatcagtgagctgagcaatacaagtgaaaatgatgaacagaacgccgaggacctggacgatagtgatcttcccaaaacgtccagtggccgaagacgggttcacgacggcaagaaatcaattagagcaacaaactacgttgaaagtaactggaaaaaacaatgcaaggagctggttaacctgatttttcagtgcgaagacagcgagccatttcgtcagcccgtcgatctggtcgagtacccagattatcgtgatataattgatactcccatggactttgggaccgttcgcgaaactttggacgccggcaattatgacagtcccctagaattctgcaaggatataaggcttatcttcagtaacgccaaagcttacactccaaacaagcggtctaaaatctatagcatgacgttgcgtctgtctgccctgtttgaagaaaagatgaaaaaaatcagctccgattttaaaattgggcagaagttcaatgagaagctccgcagatcgcagcggtttaaacagcgccagaattgcaagggtgacagccaacccaataagtcgatccgtaatctgaaaccaaaacgacttaagagccagacaaaaatcatacccgaactcgttggcagccccacccagtcgacttctagtcggactgcctacttagggacacataaaaccagcgcaggcatatcgtctggtgtgaccagcggcgactcatccgatagtgcagaatcatctgaacgaaggaagcgcaaccggccaatcacaaatggcagcaccttgagcgagtccgaggtggaggactcacttgcgacctcattaagttcctccgcatcctccagttcggaagagtcaaaggagtcctccagagcccgggaaagttccagccggtctggtctgtctcggtccagtaatcttagggtaacccggacccgagccgcccagcgaaaaaccggtcctgtttcactggcaaatggctgcggccggaaggctaccagaaagagagtctacctgtcggactccgacaataactcactggagaccggtgaaatcctgaaggcccgggctggcaacaatcggaaggtgttgcggaagtgcgctgccgtggcagccaacaaaattaagcttatgagcgatgtagaggaaaactcgagttcagagagcgtgtgcagtggccgaaagctgcctcatcggaacgctagcgcagtggcgaggaagaagcttttgcataattctgaggatgagcagtccctgaagtcagagatcgaggaagaggaactgaaagatgagaaccagctgctgccggtgagttcttctcacacagctcaatccaatgtcgatgagtccgaaaatagagattcagaatctgagtccgatctgagggttgctcgtaaaaactggcacgccaatggctataaatcacacacccctgccccaagcaaaacgaagtttctaaagatcgagagtagtgaagaggactcaaagtcgcatgacagtgatcatgcttgtaaccggacagcaggcccctcaacaagcgtccagaaattaaaagctgagtctatctcagaggaggccgatagcgagccagggcgatccgggggaagaaagtacaacactttccacaaaaacgccagttttttcaaaaagactaaaatccttagcgattcagaggacagtgaatctgaagagcaggatcgcgaggacggaaagtgtcacaagatggagatgaatcccatttcaggaaacctgaactgtgacccaattgccatgtctcaatgcagctcagaccatggctgtgagaccgacctcgactccgacgacgataaaatcgagaagccaaacaacttcatgaaagattctgcgtctcaggataacgggctgtcgaggaagattagtcgaaagagagtatgtagcagtgacagtgattcttccttgcaggtcgtgaagaagtcctcgaaggctaggactggactgctgaggatcactcgccgatgtgcagctaccgccgctaacaagatcaagctcatgagtgacgtggaagacgtcagccttgaaaatgtacacacccgttccaagaatgggcgaaaaaaacccctgcacctcgcctgtacaacagccaagaaaaagctatctgactgcgagggctccgttcattgtgaagtcccatctgagcaatatgcttgcgaaggtaaacccccagaccccgattccgaggggtcgacaaaagttctgtcccaagccctgaacggggactccgacagcgaggacatgctcaatagtgaacacaaacatagacacacaaacatccacaagatagacgctccttcaaagcggaagtccagctcagtcacgtccagcggagaagacagtaaaagccatataccagggtctgaaaccgatcgcacattctcctcagaatctaccctcgctcagaaggcgacagcggaaaacaacttcgaagttgagctgaattatggccttaggcgttggaacgggcgaaggcttcggacttatggtaaggccccctttagcaaaacgaaggtgatccatgactcacaggagacagctgagaaggaggttaaaagaaaacggtcacatccagagctcgagaacgttaaaatctctgagactacaggaaattccaagttcagacctgacacgtcctctaagtcgtccgacctcggaagtgtaaccgaatcagatattgactgtactgataacacaaagaccaagcgcagaaaaacaaagggaaaggccaaggtggtccgtaaggagtttgtcccccgtgaccgcgaaccaaataccaaggtccgcacctgtatgcacaatcaaaaagatgcggtgcaaatgccaagtgagaccctgaaggccaaaatggtccccgaaaaagttccccggaggtgtgcgaccgtcgcggctaataagattaaaatcatgagcaacctcaaagagaccatctccggccccgaaaacgtatggattaggaaatcaagtaggaagctcccccaccgcaacgcatccgcagccgccaagaaaaagctactaaacgtttacaaagaggatgataccactataaattccgagagcgaaaaagagctggaagacattaacaggaaaatgttgttcctcagaggcttcaggtcatggaaagaaaacgcacagtag

SEQ ID NO: 200706 - DNA, 6963 bp, Artificial Sequence
  derived and/or modified sequence
atggccgagcccagcagcgcccggcggcctgtgcccctcatcgagagcgagctgtacttcctgattgcccgctacctgtctgctggcccctgccggcgggccgcccaggtgctggtgcaggagctggagcagtaccagctgctgcccaagaggctggactgggagggcaatgagcacaacagaagctatgaggagctggtgctgagcaacaagcacgtggccccagaccacctgctgcagatctgccagagaattggccccatgctggacaaggagatcccccccagcatcagccgggtgaccagcctgctgggcgccggccggcagagcctgctgaggacagccaaggactgccgccacacagtgtggaagggcagcgcctttgctgccctgcaccggggccggcccccagagatgcctgtgaactacggcagcccccccaacctggtggagatccaccggggcaagcagctgaccggctgcagcaccttcagcacagccttccctggcaccatgtaccagcacatcaagatgcaccggcgcatcctgggccacctgtctgctgtgtactgtgtggcctttgacagaacaggccaccgcatcttcaccggcagtgatgactgcctggtgaagatctggagcacccacaacggccgcctgctgagcaccctgcggggccacagcgctgagatcagtgacatggctgtgaactatgagaacaccatgattgctgctggcagctgtgacaagatcatccgggtgtggtgcctgcggacctgtgcccctgtggccgtgctgcagggccacacaggcagcatcaccagcctgcagttcagccccatggccaagggcagccagcgctacatggtgtccactggagcagatggcaccgtgtgcttctggcagtgggacctggagagcctgaagttcagcccccggcccctgaagttcacagagaagcccaggcctggggtgcagatgctgtgcagcagcttctctgtgggcggcatgttcctggccaccggcagcacagaccacgtgatccgcatgtacttcctgggctttgaggcccctgagaagattgctgagctggagagccacacagacaaggtggacagcatccagttctgcaacaatggagaccgcttcctgagcggcagcagagatggaacagcccgcatctggaggtttgagcagctggagtggaggagcatcctgctggacatggccacccgcatcagcggggacctgagcagcgaggaggagcgcttcatgaagcccaaggtgaccatgattgcctggaaccagaatgacagcatcgtggtgacagctgtgaatgaccacgtgctgaaggtgtggaacagctacacaggccagctgctgcacaacctgatgggccacgcagatgaggtgtttgtgctggagacccacccctttgacagccgcatcatgctgtctgctggccatgatggcagcatcttcatctgggacatcaccaagggcaccaagatgaagcactacttcaacatgattgagggccagggccacggggctgtgtttgactgcaagttcagccaggacggccagcactttgcctgcacagacagccacggccacctgctgatctttggatttggctgcagcaagccctatgagaagatcccagaccagatgttcttccacacagactaccggcccctcatccgggacagcaacaactacgtgctggatgagcagacccagcaggccccccacctgatgcccccacccttcctggtggatgtggatggcaacccccaccccaccaagtaccagaggctggtgcccggccgggagaacagcgcagatgagcacctgatcccccagctgggctacgtggccaccagtgatggagaggtgattgagcagatcatcagcctgcagaccaatgacaatgatgagaggagccctgagagcagcatcctggatggcatgatccggcagctgcagcagcagcaggaccagaggatgggcgctgaccaggacaccatcccccggggcctgagcaatggagaggagaccccaagaagaggcttccggcggctgagcctggacatccagagcccccccaacatcggcctgcggcgcagcggccaggtggagggcgtgcggcagatgcaccagaatgcccccaggagccagatcgccacagagcgggacctgcaggcctggaagagaagagtggtggtgcctgaggtgcccctgggcatcttcaggaagctggaggacttccggctggagaagggggaggaggagaggaacctgtacatcattggaaggaagaggaagaccctgcagctgagccacaagagtgacagcgtggtgctggtgtcccagagccggcagaggacctgcaggaggaagtaccccaactatggaagaagaaacagatcctggagggagctgagcagtggaaatgaaagcagcagctctgtgagacatgagaccagctgtgaccagagcgagggcagcggcagcagcgaggaggatgagtggaggagtgacaggaagtctgagagctacagcgagagcagcagtgacagcagcagccgctacagcgactggacagcagatgctggcatcaacctgcagccccccctgcggaccagctgcagaagacgcatcacccgcttctgcagcagcagtgaagatgagatcagcacagagaacctgagcccccccaagagaagaaggaagaggaagaaggagaacaagcccaagaaggagaacctgcggaggatgaccccagctgagctggccaacatggagcacctgtatgagttccacccccctgtgtggatcacagacaccaccctgaggaagagcccctttgtgccccagatgggagatgaagtcatctacttccggcagggccacgaggcctacatcgaggccgtgagaagaaacaacatctatgagctgaaccccaacaaggagccctggaggaagatggacctgcgggaccaggagctggtgaagatcgtgggcatccgctatgaggtgggcccccccaccctgtgctgcctgaagctggccttcattgatcctgccaccgggaagctgatggacaagagcttcagcatccgctaccatgacatgccagatgtgattgacttcctggtgctgcggcagttctatgatgaggcccggcagaggaactggcagagctgtgaccgcttccgcagcatcattgatgatgcctggtggtttggaacagtgctgagccaggagccctaccagccccagtacccagacagccacttccagtgctacatcgtgcgctgggacaacacagaaattgagaagctgagcccctgggacatggagcccatcccagacaacgtggaccccccagaggagctgggcgccagcatctctgtgaccacagatgagctggagaagctgctgtacaagccccaggccggggagtggggccagaagagcagagatgaagaatgtgaccgcatcatctctggaattgaccagctgctgaacctggacattgctgctgcctttgctggccctgtggacctgtgcacctaccccaagtactgcaccgtggtggcctaccccacagacctgtacaccatccgcatgaggctggtgaaccgcttctaccgccgcctgagcgccctggtgtgggaggtgcgctacatcgagcacaatgcccggaccttcaatgaacctgagagcgtcatcgcccggagcgccaagaagatcacagaccagctgctgaagttcatcaagaaccagcactgcaccaacatcagcgagctgagcaacaccagtgaaaatgatgagcagaatgctgaggacctggatgacagcgacctgcccaagaccagcagcggcagaagaagagtgcatgatggcaagaagagcatccgggccaccaactacgtggagagcaactggaagaagcagtgcaaggagctggtgaacctgatcttccagtgtgaagattctgagcccttccggcagcctgtggacctggtggagtacccagactacagagacatcatcgacacccccatggactttggcaccgtgcgggagaccctggatgctggcaactatgacagccccctggagttctgcaaggacatccgcctcatcttcagcaatgccaaggcctacacccccaacaagaggagcaagatctacagcatgaccctgcggctgagcgccctgtttgaggagaagatgaagaagatcagcagtgacttcaagattggccagaagttcaatgagaagctgcggcgcagccagcgcttcaagcagaggcagaactgcaagggggacagccagcccaacaagagcatccggaacctgaagcccaagaggctgaagagccagaccaagatcatccctgagctggtgggcagccccacccagagcaccagcagcaggacagcctacctgggcacccacaagaccagcgctggcatcagcagcggcgtgaccagcggggacagcagtgacagcgctgagagcagcgagaggaggaagaggaaccggcccatcaccaacggcagcaccctgtctgagagcgaggtggaggacagcctggccaccagcctgagcagcagcgccagcagcagcagcgaggagagcaaggagagcagccgggcccgggagagcagcagccgcagcggcctgagccgcagcagcaacctgcgggtgaccaggaccagggctgcccagaggaagacaggccctgtgtccctggccaacggctgcggcaggaaggccaccaggaagagggtgtacctgagtgacagcgacaacaacagcctggagaccggggagatcctgaaggcccgggccggcaacaacaggaaggtgctgaggaaatgtgccgctgtggccgccaacaagatcaagctgatgtctgatgtggaggagaacagcagcagcgagagcgtgtgcagcggcaggaagctgccccacagaaatgccagcgctgtggccaggaagaagctgctgcacaacagtgaagatgagcagagcctgaagtcagaaattgaggaggaggagctgaaggatgagaaccagctgctgcctgtgagcagcagccacacagcccagagcaatgtggatgaaagtgagaacagagacagcgagagcgagagtgacctgcgggtggccaggaagaactggcacgccaacggctacaagagccacaccccagcccccagcaagaccaagttcctgaagattgagagcagcgaggaggacagcaagagccatgacagcgaccacgcctgcaacagaacagctggccccagcacctctgtgcagaagctgaaggccgagagcatcagcgaggaggccgacagcgagcccggccgcagcggcggcaggaagtacaacaccttccacaagaatgccagcttcttcaagaagaccaagatcctgagtgacagtgaagattctgagagcgaggagcaggacagagaagatggcaagtgccacaagatggagatgaaccccatcagcggcaacctgaactgtgaccccatcgccatgagccagtgcagcagtgaccacggctgtgaaacagacctggacagtgatgatgacaagattgagaagcccaacaacttcatgaaggacagcgccagccaggacaatggcctgagcaggaagatcagcaggaagagggtgtgcagcagtgacagcgacagcagcctgcaggtggtgaagaagagcagcaaggccaggacaggcctgctgcgcatcacccggcgctgtgccgccacagctgccaacaagatcaagctgatgtctgatgtggaggatgtgtccctggagaatgtgcacaccaggagcaagaatggaaggaagaagcccctgcacctggcctgcaccacagccaagaagaagctgagtgactgtgagggctctgtgcactgtgaggtgcccagcgagcagtatgcctgtgagggcaagcccccagaccctgattctgagggcagcaccaaggtgctgagccaggccctgaatggagacagcgacagcgaggacatgctgaacagcgagcacaagcaccgccacaccaacatccacaagattgatgcccccagcaagaggaagagcagctctgtgaccagcagcggggaggacagcaagagccacatccctggcagcgagacagacaggaccttcagcagcgagagcaccctggcccagaaggccacagctgagaacaactttgaggtggagctgaactacggcctgcggcgctggaatggaagaaggctgcggacctacggcaaggcccccttcagcaagaccaaggtgattcatgacagccaggagacagctgagaaggaggtgaagaggaagaggagccaccctgagctggagaatgtgaagatcagcgagaccaccggcaacagcaagttccggccagacaccagcagcaagagcagtgacctgggctctgtgacagaaagtgacatcgactgcacagacaacaccaagaccaagaggaggaagaccaagggcaaggccaaggtggtgaggaaggagtttgtgccccgggaccgggagcccaacaccaaggtgaggacctgcatgcacaaccagaaggatgctgtgcagatgcccagcgagaccctgaaggccaagatggtgcctgagaaggtgccccggcgctgtgccaccgtggccgccaacaagatcaagatcatgagcaacctgaaggagaccatcagcggcccagaaaatgtgtggatcaggaagagcagcaggaagctgccccacagaaatgccagcgctgctgccaagaagaagctgctgaatgtgtacaaggaggatgacaccaccatcaacagcgagagcgagaaggagctggaggacatcaacaggaagatgctgttcctgcggggcttccgctcctggaaggaaaatgcccagtag

SEQ ID NO: 200707 - DNA, 6963 bp, Artificial Sequence
  derived and/or modified sequence
atggccgagcccagcagcgcccggcggcccgtgcccctgatcgagtccgagctatacttcttgatcgcacggtacctttctgctggaccatgccgacgggcagctcaggtgttagttcaagaattagaacagtaccagctcctcccaaagcggctcgactgggaaggcaacgaacacaatcggagctatgaagagctggtcctttctaataaacatgtggctcccgatcatctactgcagatatgccaaaggatcggtccaatgctcgataaagagatccctcccagcatcagtagagtgacttcattgctgggagctggccgacaatctctcctacgcaccgccaaggactgtcgccatacagtctggaaagggagcgctttcgcagcgcttcatcggggccgtccaccagagatgccagtgaattacgggtcaccccctaacctggtcgaaatacaccggggtaaacagctgacgggatgtagcactttcagcaccgcgtttcccggcacaatgtaccagcacataaagatgcatagaaggatcctcgggcacctgagcgcagtttattgcgtagcttttgacagaaccggtcaccgcatattcaccggcagcgatgattgcctcgtcaagatctggtctacacacaacggacggttgttgagcaccctgagagggcactcggccgaaatttctgacatggctgtgaactatgagaatacgatgatcgcggctggatcctgtgacaagatcatccgcgtctggtgcctgaggacgtgcgcccccgttgccgtgctgcaaggccacacaggcagcatcacttcattgcagtttagtcccatggctaaaggcagccagcgttacatggttagcaccggcgctgatgggaccgtctgcttctggcagtgggacctggagtcacttaaattctccccaaggccgctcaagtttacggagaagcctcgacctggcgtgcagatgctgtgctccagcttttctgtgggcggcatgttcctcgcaactggatcaaccgaccatgtcatccgaatgtattttctcgggtttgaggcgcctgagaagatcgccgaactggagagtcacacagataaggtggattccatccagttctgcaacaacggggacagattcctgagcggatcaagggatggtacagctcgaatctggcggttcgagcagctggagtggagatctattctcctcgatatggctaccagaatttccggcgacctaagctccgaagaagaaagatttatgaaaccaaaggtcaccatgattgcgtggaaccaaaatgattcaatcgtcgtgaccgctgtcaatgaccacgtgttgaaggtgtggaattcatacactgggcagcttttacacaatctaatgggacacgctgacgaagtgtttgtcctggagacacatccctttgattcccggattatgctgagcgctggccatgatggctccatattcatttgggatatcaccaagggcactaagatgaagcactacttcaacatgattgaggggcaaggacacggagcggttttcgactgtaagttcagccaagacggccagcacttcgcctgtaccgactcacacggacatttacttattttcggctttgggtgctccaagccgtacgaaaaaatccctgatcagatgttcttccacacagattacaggccactgatcagagatagcaataactacgttttggatgagcagactcaacaggccccacatctcatgccgccgccatttcttgtcgacgttgatggaaatcctcaccccaccaaataccagaggctcgttccagggagagaaaattctgccgacgagcacctcatccctcagttgggatatgtcgctacttctgatggggaggtcatcgagcagatcataagtctacagactaacgacaacgacgagcgttccccagaatccagcattctggacggcatgattaggcagttacagcagcagcaggatcagcgaatgggcgcagaccaggatacaatccctcgcgggctgtctaatggcgaggagaccccaaggcggggattccgcagattaagcctagatatacagtcgccccccaacattggactgcggcgcagtggccaagtggagggtgttagacagatgcaccagaatgccccccgaagtcaaattgccacagagagagatcttcaagcatggaaaaggcgcgtcgtggtccccgaagtccctctgggtatcttcaggaagctagaggactttagactagagaagggcgaagaagaacggaacctttatatcatcggccggaagagaaaaaccctacagctgtcacataagtcagatagcgtggtgcttgtgtcccagagccgccaacgtacttgtaggcggaaataccctaactacggacggcggaacaggtcatggcgcgagttatctagtggaaatgaatcgtcttcaagcgtgcggcatgagacgtcctgtgatcagagcgagggatctggttctagtgaagaagacgaatggagatctgaccgtaaatccgaaagctattccgagtccagcagtgattccagctcgcgctacagcgattggacagccgacgcaggaatcaacctgcagccgcccctgaggacctcctgcagacgcagaattaccaggttttgttcatcttctgaggacgaaattagcacagagaacttaagtccacctaaacggcgcagaaaaagaaaaaaggagaataaaccaaagaaagagaatcttcgtcgaatgactccagcggaactggcaaatatggagcatctctacgaatttcaccctccagtgtggattacagacacaaccttgagaaagagcccctttgtgccgcaaatgggcgacgaagtaatatacttccgacaaggtcatgaggcttatatcgaggctgtgaggcgcaacaatatctatgaacttaatccaaataaagaaccatggaggaaaatggacttaagagatcaagagttggtgaagattgttggaatcagatacgaggtcggacctcctacactgtgttgtctgaaactcgcatttattgaccctgctactggaaaattgatggacaagagcttctcaatccgctatcatgatatgcccgacgtgatcgatttcctggtactcagacagttctacgatgaggccagacagaggaattggcagagttgtgaccgctttaggagtattattgacgacgcgtggtggttcgggacagtgttgtctcaggagccataccaaccccagtatccagacagtcatttccagtgttatatcgtgagatgggacaacactgagatagaaaaattgagtccttgggatatggaacccatcccggacaatgtagatccccccgaggagctgggagccagtatctccgtcacaaccgacgaactggagaaactgctgtacaagccccaagcaggagagtggggacagaagtctagggacgaggagtgtgacagaattatttcaggaattgaccagttgcttaaccttgacatcgctgccgcatttgctggccctgtggatctatgcacctaccccaagtactgcactgtggttgcctatcctaccgacctgtacaccattcggatgagactggtgaacaggttttaccggcgcctttccgcccttgtctgggaggtcagatatattgaacataatgctcgaacattcaatgagcccgagtccgtaatagcacgaagcgccaagaaaattacagatcagctgcttaagttcataaagaatcaacactgtacaaatattagcgaactaagtaacaccagtgagaacgacgaacaaaatgcagaggacctggacgattcagacctgccaaagacctccagtggacggaggcgggtgcacgatgggaagaaaagtataagggctacaaattatgtcgaatcaaactggaaaaagcagtgcaaagaactcgttaatctcatcttccagtgcgaggatagtgagcctttcaggcaaccagtggacctcgttgagtaccccgactaccgagatattattgatacccccatggactttgggaccgtccgtgagactctcgatgccgggaactatgactcaccccttgaattctgtaaagacatacggctgatcttttccaacgcaaaagcctacacccctaacaaacgcagtaaaatatatagtatgaccctgcgcttgagcgccctgtttgaagaaaagatgaagaaaatttccagcgatttcaagattggtcaaaagttcaacgaaaaattacggcggagtcaaagatttaaacagaggcagaattgtaaaggcgacagccagccaaataagtcaattagaaatctcaaacccaaacgccttaagagccagaccaagatcattcctgagctagtcggaagcccaacacagagcacatcttcccgtacagcctacctgggcactcataaaacctctgcgggaatcagctctggggtcacttctggagactcgtctgacagcgcggaaagctctgagcgcagaaagcggaatagacccatcaccaacgggagcacattgtccgaatctgaagtagaagattcactggccacgagtctgtccagctctgcctcaagtagttctgaagagtctaaagaaagctctcgagcgagggaaagctcaagcaggagcggtctctctcgaagctcgaatctgcgtgttactcggactcgggccgctcaaagaaagacgggccccgtgagtctggccaatggatgtgggcgcaaagctacacgaaagcgcgtgtacctctcagactccgacaacaattctctcgaaaccggagagatcctcaaagctagggctggcaacaaccgaaaagtgctgaggaagtgcgcagctgtcgcagctaacaaaatcaagttgatgagcgacgttgaagaaaactcttcctctgaaagcgtgtgttctggtcgaaagctccctcacaggaatgcctctgctgtggcaagaaaaaagttgttacataacagtgaagacgaacagtcactgaagtcagagatcgaagaggaggagttaaaggacgaaaatcagctgttgccggtaagttccagccacactgctcagagcaatgtggacgaatccgagaatcgggacagcgagtctgagagcgacctgcgtgtggctcggaagaattggcacgccaacggttacaagtcacacactcccgctcccagcaagacaaaatttttgaagatcgaatctagcgaggaagattccaaatctcatgattcggatcacgcttgtaacagaaccgctggccctagcacctcagttcagaaactgaaagcggagagtatcagtgaggaagcagatagcgaacccggacgctctggggggcgaaagtataacacatttcataaaaatgcctcattcttcaaaaagactaagattctaagcgattctgaggattcagagagcgaagaacaggatcgagaagatggtaagtgccacaaaatggaaatgaacccgatatccggcaacctgaattgtgatcctatcgccatgtctcaatgcagctctgaccacggttgtgagacggatcttgactcggacgatgataaaattgaaaagccgaataactttatgaaagacagcgcaagccaggacaatggcctgtctcgcaagattagtcgaaagcgtgtgtgttcttccgactccgatagcagtctgcaggtcgttaagaaaagtagcaaagctaggacagggctccttaggatcaccagacgctgtgccgccactgcggccaacaagattaaactgatgagtgacgtggaggacgtttccctagagaacgtccacaccaggagtaagaacggccgcaagaaacccttacacctggcttgcaccactgccaaaaagaaactgagcgattgcgaggggtctgtgcattgcgaggtgccctcagagcagtatgcttgcgaaggcaagcctcccgatccagacagtgaaggatccacgaaagtcctgtctcaagctcttaatggggactctgattctgaagacatgctaaattctgaacacaagcaccgtcacactaacatccacaagatcgatgcgccaagcaagcggaaatcgagcagcgtgaccagcagcggtgaggacagtaagagtcatatacctggtagcgaaacggacagaactttctcctcagaatccaccctggcccaaaaagccaccgccgagaacaactttgaggtcgaacttaattacgggcttcgtcgatggaatggacgccgcttaaggacgtacggtaaggcgcccttctccaagacaaaagtcatccacgattcccaagagactgctgagaaggaagtgaaaaggaaacgttcacacccagagcttgaaaatgtgaaaatctctgaaacgactggcaattctaagtttcgccccgatactagttccaaaagttctgacctggggtcggtgaccgaatccgacattgactgtacagataacacgaagacgaaacgccgtaaaacaaaggggaaagccaaggtcgtgaggaaggagtttgtgccccgcgaccgggagcccaacaccaaagtacgcacctgtatgcataaccagaaagacgcggtacagatgccttctgagaccctgaaagctaaaatggtgccagagaaggtgccccgcaggtgcgctacagtggctgctaataagatcaaaattatgagtaacttgaaggaaacaatcagcggcccggaaaacgtgtggatccgaaagtcttccagaaaattgccccacagaaatgcttccgcagctgcgaagaaaaaactcctgaacgtctacaaagaggacgatacaacaataaactctgaatccgaaaaagaactggaggacataaatcgcaagatgctgttccttagaggctttagatcatggaaagaaaatgcacagtag

SEQ ID NO: 200708 - DNA, 6962 bp, Artificial Sequence
  derived and/or modified sequence
atggcggagccaagttcagcgagacggccagtgcctctgatcgaatccgaattgtactttctcatcgcccgatatctgagtgcaggcccttgccggagagccgcacaggtgctagtccaggagctcgagcagtaccagcttttgccaaaacgtctggactgggaaggcaacgaacataacagaagttacgaggaactggtcctctctaacaaacacgttgctcctgaccacttgttgcagatctgtcagcggattggccctatgcttgacaaggagatacccccatcgatttctcgcgttaccagcctccttggcgcaggtagacagagtctactgagaaccgccaaggattgccggcataccgtgtggaaggggtccgccttcgccgcactgcaccggggacgccctcctgagatgcccgttaactatggatctccacctaatcttgtcgaaattcatagggggaagcagctcacagggtgctcaaccttttccaccgcgttccctggcaccatgtatcaacacattaagatgcaccggaggatcctgggccacctgagcgcggtgtattgcgtggcctttgaccgcactggccaccggatcttcaccggatctgacgactgtctcgttaagatatggtctacccacaacgggcgtctgctttctactctgcgcggacattctgccgaaatatcggatatggccgtaaactatgaaaataccatgatcgccgctggaagttgtgataagatcattagggtgtggtgtttaaggacatgcgcccctgtcgcagtgctccaggggcacaccggttcaatcaccagcctgcaattttcgcccatggcaaaggggtcccagcggtacatggttagcacaggggctgacgggactgtctgtttttggcagtgggatctggaaagcctgaagttttctccgcgtcctctgaagttcaccgaaaagcctcgacccggagtgcagatgctgtgttcttctttctccgtcggcggaatgttcctcgccactggcagcaccgatcatgttattaggatgtacttcctcgggtttgaagcccctgagaaaattgccgagttggaatcccacactgataaggttgattcaatccagttctgtaataatggagatagattcctatccggatcacgcgacggaactgccagaatatggagattcgagcagctggagtggcgcagtatattgctggatatggccacaagaatatctggcgatctgtctagcgaggaagagcgctttatgaagcctaaagtgacaatgatcgcctggaatcagaatgattccattgtcgttacggctgttaacgatcatgtcctgaaggtgtggaactcatacacgggtcaactgctgcacaacttaatgggtcacgccgatgaggtgttcgtactggagactcatcctttcgattcccgcatcatgctttccgccggacatgatggcagcatctttatctgggatatcacgaaaggtactaagatgaagcattacttcaacatgattgaggggcagggccatggcgcagtgttcgactgcaagttctcacaggacgggcaacattttgcatgtactgactctcacggccatctgctcattttcggattcggttgcagcaaaccgtatgagaaaatccctgaccaaatgttctttcataccgattacagacctttgatacgggattccaataattatgtcctggacgaacagacccagcaagcaccacaccttatgccgccacctttcctcgtggatgtggacgggaacccccaccctaccaagtatcagcggctggtgcctggcagagagaacagtgcagatgaacaccttattcctcaattggggtacgttgcaacctcagatggggaagtgattgagcagattataagtcttcagacgaacgacaacgatgagagaagccccgagtcctcaattctcgacggtatgatccggcagcttcagcaacagcaggatcagcgcatgggtgccgaccaggatacaattccacggggtttaagcaacggggaggaaactcccagacggggattccggaggctgtctttggacatccagagtccccctaacattggactgaggaggtccggacaggttgagggcgtgcgccaaatgcatcagaatgccccacgaagccaaatcgcaaccgaacgcgatctgcaagcctggaagagacgggtggtggtgcccgaagttcccctgggaatatttaggaagctcgaggactttcgcctggagaaaggtgaagaagagaggaacctgtacatcatagggcgtaagcgaaagaccctccaactgagccataagtccgattctgtcgtcttggttagccagtcaaggcagagaacttgtcgtaggaagtaccccaactatggcagaaggaaccgtagctggcgcgagttaagcagcggcaatgagagctcctcaagcgtgaggcacgaaacctcttgcgatcaatccgagggctcaggttcgtcagaagaggacgagtggcgctctgacaggaaatcggaaagttattccgagagcagcagcgacagctcttctagatatagcgactggacagccgatgctggcatcaatcttcaaccaccattgcgtacatcttgccgcagaaggatcaccaggttttgttcatcctccgaagacgagatttcgacagaaaacctgtctccacccaagcggagaaggaagagaaaaaaggaaaacaagcccaagaaggagaacctgcgccgaatgacaccagccgaactggccaacatggagcatctgtatgaatttcatccacccgtctggattaccgatacaactctccggaagagccctttcgtgccacagatgggagacgaggtgatttactttaggcaagggcacgaagcttacatagaagccgtgagacgaaataacatctatgaactcaatcccaacaaagagccatggcggaaaatggatctcagggaccaagaactggtgaagattgttggaatccgatacgaagtgggacccccaacactctgctgtcttaaattggcctttatcgatcccgctaccgggaaactcatggacaaatcatttagcattcgctaccacgatatgccagatgtgatcgatttcttggttctccgccagttctacgatgaagcgagacagagaaactggcagtcttgtgataggtttaggtcaattattgacgatgcatggtggtttggaaccgttctgtcacaggagccctaccagccacagtaccctgactctcacttccagtgttacatagttaggtgggataatacagaaattgagaagctgagcccttgggacatggaacctataccagataacgtcgacccaccagaagaacttggggcttcaatctcggtgaccaccgatgagttggagaagctgctgtataagccgcaagccggagagtggggacagaaaagccgggacgaggaatgtgatcggatcatctctggaattgaccagttgctcaatctggatattgcagccgctttcgctggtcccgtggacctgtgtacatatcctaaatattgcacggtagttgcttatccaacagacctctacactattagaatgcggctagtaaaccggttctaccgcaggctctcagccctggtgtgggaggtgaggtatatcgagcacaacgctagaaccttcaatgagcccgaatcagttatcgccaggtctgcaaagaaaataacagaccaacttctgaaatttattaagaatcagcattgcactaacattagcgagctctctaatactagcgagaacgacgagcagaacgccgaggaccttgacgactctgatctccctaagacatcctcaggcagacgaagagtccacgacggaaagaagtcgattcgtgcaacaaattacgtcgaatccaactggaagaagcagtgtaaagaactggttaacctgatcttccagtgcgaggattctgagccttttaggcagcccgtggacttggtcgagtatccggattatcgagatatcatcgatacaccgatggattttggaaccgtccgggaaaccctggacgccggaaattatgactctccactggagttctgcaaagacattagactgattttttcaaacgcgaaggcttatactcccaacaagcgatccaagatttacagcatgactctccgcctatctgccctgtttgaagaaaaaatgaaaaagatatctagcgatttcaagattggtcagaagtttaacgaaaagttgcggaggtctcaaagattcaagcagcggcagaactgtaaaggcgactcacagcctaacaagtcaatcaggaacctgaagcctaaaagactgaagtcacagacaaagataatccctgagttagtcggcagcccaacccagagtacaagctcccgtaccgcctatctcggtacacacaaaacctccgccggaatcagcagtggagttactagtggagattcctcagattcagccgagagctcagagaggagaaagagaaataggcctatcacaaacggttcaacattgtctgaatctgaggttgaagattctttggcaactagcctgagctcatcagcctcttcttcctccgaggagagcaaagaaagttctagggctcgcgaatcctcatccaggtctggactgtcaagatcttccaacctaagagtgacccgaaccagagccgctcagcggaagacaggacccgtttcactcgctaacggatgcggtcgaaaggcaacacggaaaagagtgtacttgtccgactccgacaataattctttggagacgggtgagatcctgaaggccagggccggtaataatcgcaaggtgctcagaaagtgcgccgctgtcgccgctaacaagattaaactcatgtcagacgttgaggagaattcctcctctgagtctgtttgcagtggcagaaaactgccccataggaatgcatctgctgtggcacgtaaaaagctcttacacaactccgaggatgagcaaagcctcaagtctgagattgaggaagaggagttaaaggacgagaaccagcttctgcctgtgtcatcctcgcataccgcgcagtctaatgtggatgaatctgagaaccgagattccgagagcgagtccgacttgagggtagctaggaaaaattggcatgctaacggttacaagtctcatacccctgccccttctaagactaagtttctaaagattgagtcctccgaagaagatagcaagagtcacgactcagatcacgcctgcaacaggactgccggaccctcgacctctgtccagaaactaaaagccgagtctattagtgaggaggctgacagcgagcccggacggagcgggggtcgcaaatataacacgtttcacaagaacgcctccttcttcaaaaagaccaaaattctgtcggactcagaagacagcgagtcagaagaacaggatagagaagacgggaagtgccataagatggaaatgaaccccattagtgggaatttaaattgcgatcctattgccatgagtcagtgcagttccgatcatgggtgcgaaacagatctggactctgacgatgataagatcgagaagccaaacaattttatgaaggattccgcgtctcaagacaatgggctgtctcgtaagatttcaaggaaacgagtatgctccagcgactctgactcctctcttcaggtggtgaagaaaagcagcaaagctcgcactggcttactcagaatcacacgcagatgtgccgcaactgcagccaacaagattaagctgatgagtgacgtggaagacgtttcactggagaatgtgcacaccagatccaaaaatgggagaaagaagccattacacttggcctgcaccactgctaagaaaaaattgagtgattgcgagggcagcgttcactgcgaggtgcccagtgagcaatatgcctgcgaggggaaaccgccagaccccgattctgaaggctcaaccaaggtactcagtcaggcccttaacggcgacagcgattcagaggatatgcttaactcagaacataagcatagacacacaaacatccacaagatcgatgcacccagcaagagaaaatctagctccgttacaagttccggggaggacagcaagagtcatatccccggatcagaaacagatcgcacattcagttcagaaagcacgctggcacaaaaggctaccgctgaaaacaacttcgaggtcgaactaaactacggacttcgcaggtggaacgggagaagactgcggacctacgggaaggcccctttctctaaaacaaaggttatccatgactcccaggagacggctgaaaaggaggtaaagcgaaaacggtcccatccggagctggaaaacgtgaagatttccgagactacaggaaacagcaagtttcgcccagatacgagcagcaaatcctctgacttggggagtgttacggaaagtgatattgactgtacggataacactaagaccaaacggaggaaaacgaagggcaaagctaaggtggtgagaaaggagtttgtacctcgcgaccgcgaaccaaacactaaagtgaggacatgtatgcataaccagaaagacgcagtgcagatgccctctgaaaccctgaaagcaaaaatggttcccgaaaaagtgcccagacggtgtgccaccgtcgccgctaataagatcaagataatgagtaatttgaaggagaccatcagcggccctgaaaatgtgtggattagaaaaagcagcaggaagctcccacaccgcaatgcttctgccgcagccaagaagaaactccttaacgtgtataaagaggacgataccacaatcaacagcgaatcagagaaggagctcgaggacattaaccgcaagatgctctttctgagaggatttcgtagctggaaagagaatgctcagta

SEQ ID NO: 200709 - protein, 533 aa, Artificial Sequence
  derived and/or modified sequence
MARLPAGIRFIISFSRDQWYRAFIFILTFLLYASFHLSRKPISIVKGELHKYCTAWDEADVRFSSQNRKSGSAAPHQLPDNETDCGWAPFDKNNYQQLLGALDYSFLCAYAVGMYLSGIIGERLPIRYYLTFGMLASGAFTALFGLGYFYNIHSFGFYVVTQVINGLVQTTGWPSVVTCLGNWFGKGRRGLIMGVWNSHTSVGNILGSLIAGYWVSTCWGLSFVVPGAIVAAMGIVCFLFLIEHPNDVRCSSTLVTHSKGYENGTNRLRLQKQILKSEKNKPLDPEMQCLLLSDGKGSIHPNHVVILPGDGGSGTAAISFTGALKIPGVIEFSLCLLFAKLVSYTFLFWLPLYITNVDHLDAKKAGELSTLFDVGGIFGGILAGVISDRLEKRASTCGLMLLLAAPTLYIFSTVSKMGLEATIAMLLLSGALVSGPYTLITTAVSADLGTHKSLKGNAHALSTVTAIIDGTGSVGAALGPLLAGLLSPSGWSNVFYMLMFADACALLFLIRLIHKELSCPGSATGDQVPFKEQ

SEQ ID NO: 200710 - protein, 18 aa, Artificial Sequence
  derived and/or modified sequence
MARLPAGIRFIISFSRDQ

SEQ ID NO: 200711 - DNA, 1602 bp, Artificial Sequence
  derived and/or modified sequence
atggcccgcctgcctgctggaatccggttcattatatcattttccagggaccagtggtatcgcgctttcatctttatattaacatttctgctgtatgcttcctttcatctgagtagaaagcccatttctatcgtgaagggggagctgcataagtactgtaccgcatgggacgaagcagatgttcgcttctcctcacaaaaccgaaaatccggcagcgcagctccgcatcaattgcctgataacgagaccgactgcggatgggcaccattcgacaaaaataactatcagcaattattgggcgcgttggattatagtttcctgtgcgcttacgctgttggaatgtacctgagtggaattattggggagaggctcccaattaggtattacctcacctttggcatgctggcttccggcgcctttacagccttgtttggactcggttatttttacaacattcattccttcggcttttatgttgtgacgcaggtgatcaatggcctagtacagaccacgggctggccaagcgtggtcacctgtctcggtaactggttcggtaaaggcagaagaggcctcatcatgggcgtgtggaacagtcatacctccgtgggcaacatactgggttccctcatagctgggtactgggtgtccacgtgttggggcctgtcctttgtcgtccccggcgccatcgtggcggcaatgggaattgtctgcttcctgttcctcattgagcatcccaacgatgtgagatgctccagcactttggtgacgcacagcaagggatacgaaaatggaactaaccggctgcgcctgcagaaacagattctaaagagtgaaaaaaataagccactggatccagagatgcagtgcctcctgctgtccgacggtaagggctctatacatccaaaccatgtggtgatcctgccgggggatggtggctcggggaccgcggccatcagctttacaggcgccctaaaaattcccggggtcatcgaattctctctgtgtctgctgttcgcgaagctggtgtcctatacttttctgttttggttaccactgtatatcacaaacgtcgaccacctcgatgcaaaaaaggcgggagagctgagcacactgtttgacgtgggaggcatcttcgggggcatactggccggggtgatttccgaccggctggagaaacgtgcgtccacatgtgggttaatgttactgcttgctgctccgacgctctacatcttctccacggtgagtaaaatgggattggaggctactattgcgatgctattgctgtcgggcgcactggtttcggggccatacaccctaatcaccacggcggtgtctgcggacctaggaacacataaaagtttgaagggaaacgctcatgcactatcaaccgtcacagcaattatcgacggaaccgggagtgtgggtgcggccttgggcccgctgctagcagggctgctctcaccaagcggttggagcaacgtattctatatgcttatgtttgcagatgcctgtgcactgctgttccttattcgccttatccataaggaactttcctgtccagggtccgcaactggcgatcaggtcccattcaaggagcagtag

SEQ ID NO: 200712 - DNA, 1602 bp, Artificial Sequence
  derived and/or modified sequence
atggccagactgccggctggaatccgcttcatcatctctttttcgcgcgatcaatggtacagggccttcatctttattctgaccttcttactctatgctagtttccatttgtctaggaagcccatctctattgttaaaggcgagctgcacaaatattgtaccgcttgggatgaagccgacgtcaggttctctagccagaatagaaaaagcggatctgccgcaccacaccaactgcctgacaacgagacagactgtgggtgggcaccctttgacaagaataactatcagcaactgctgggcgccctggactacagctttctgtgtgcatatgctgttgggatgtacctgagcggaatcataggtgaacgcttgccaattcggtactaccttaccttcggaatgctggcatcgggcgccttcacagcgttgtttggattgggttacttctacaatatccactctttcgggttttacgtggttacacaggttatcaacgggctcgtgcagaccaccggatggccaagcgtcgtcacttgccttggcaactggttcggtaaaggcagacgggggctgatcatgggagtctggaactcacataccagtgtggggaatatactgggatctcttatcgccgggtactgggtgagcacctgctggggcctgagttttgtcgtcccaggggccatagtagctgcaatgggaatcgtgtgctttctgttcctgattgagcaccccaacgacgtgcggtgctccagtacattagtgacccacagtaaaggctacgaaaacgggactaacagattgagactccagaagcaaatactgaaaagcgagaaaaataagcctctggatccggaaatgcaatgcctcctcttgtcagacggcaagggatccatccatcccaatcatgttgtgatcctcccaggcgatggggggtccggcaccgctgcgattagttttacgggcgcacttaagatcccaggcgtaatagagttcagtctgtgtctcctgttcgcaaaactggtgtcttacaccttccttttctggcttcccctctatataacgaacgtggaccacctggatgccaaaaaagctggtgagctgtctactctcttcgacgtcggcggcatctttggcggaatcctcgcaggggtgatcagtgacaggctcgagaagcgcgctagtacttgcggcctgatgttgctcctggccgcacccaccctgtacattttttccactgtgtcaaaaatgggcttggaagccacgatcgctatgctgttactcagcggcgctctggtttcggggccttataccctaattacaaccgctgtcagcgcagacctgggcacgcacaaatccctcaagggcaatgctcatgccctgtcaacagtgacagctatcatcgacgggacaggcagcgttggcgcagccctgggcccactactggccggcctcctgtccccatcgggctggagtaatgtgttttatatgctcatgtttgccgatgcatgcgctctgctctttctcatccgcctcattcacaaggagttgagctgtcccggaagcgctactggcgaccaggtgcccttcaaggagcagtag

SEQ ID NO: 200713 - DNA, 57 bp, Artificial Sequence
  derived and/or modified sequence
atggctaggctccccgccggcatcaggttcatcatctcctttagcagggaccaatag

SEQ ID NO: 200714 - DNA, 57 bp, Artificial Sequence
  derived and/or modified sequence
atggcaagactgcccgctggcattaggtttattatctcattctcccgggatcaatag

SEQ ID NO: 200715 - DNA, 1602 bp, Artificial Sequence
  derived and/or modified sequence
atggcccggctgcctgctggcatccgcttcatcatctccttcagccgggaccagtggtaccgggccttcatcttcatcctgaccttcctgctgtatgccagcttccacctgagcaggaagcccatcagcatcgtgaagggggagctgcacaagtactgcacagcctgggatgaagcagatgtgcgcttcagcagccagaacaggaagagcggcagcgctgccccccaccagctgcctgacaatgaaacagactgtggctgggccccctttgacaagaacaactaccagcagctgctgggcgccctggactacagcttcctgtgtgcctatgctgtgggcatgtacctgagcggcatcatcggggagcggctgcccatccgctactacctgaccttcggcatgctggccagcggggccttcaccgccctgtttggcctgggctacttctacaacatccacagctttggcttctacgtggtgacccaggtgatcaatggcctggtgcagaccaccggctggcccagcgtggtgacctgcctgggcaactggtttgggaagggccggcggggcctcatcatgggcgtgtggaacagccacacctctgtgggcaacatcctgggcagcctgattgctggctactgggtgtccacctgctggggcctgagctttgtggtgcctggggccatcgtggccgccatgggcatcgtgtgcttcctgttcctgattgagcaccccaatgatgtgcgctgcagcagcaccctggtgacccacagcaagggctatgaaaatggcaccaaccggctgcggctgcagaagcagatcctgaagtctgagaagaacaagcccctggaccctgagatgcagtgcctgctgctgagtgatggcaagggcagcatccaccccaaccacgtggtgatcctgcctggagatggcggcagcggcacagctgccatctccttcaccggggccctgaagatccctggggtcatcgagttcagcctgtgcctgctgtttgccaagctggtgtcctacaccttcctgttctggctgcccctgtacatcaccaacgtggaccacctggatgccaagaaggccggggagctgagcaccctgtttgatgtgggcggcatctttggaggcatcctggccggggtcatcagtgaccggctggagaagagggccagcacctgtggcctgatgctgctgctggccgcccccaccctgtacatcttcagcacagtgtccaagatgggcctggaggccaccatcgccatgctgctgctgagcggggccctggtgtctggcccctacaccctcatcaccacagctgtgtctgctgacctgggcacccacaagagcctgaagggaaatgcccacgccctgagcacagtgacagccatcattgatggcactggatctgtgggcgccgccctgggccccctgctggccggcctgctgagccccagcggctggagcaatgtgttctacatgctgatgtttgctgatgcctgtgccctgctcttcctgatccgcctcatccacaaggagctgagctgccccggcagcgccaccggggaccaggtgcccttcaaggagcagtag

SEQ ID NO: 200716 - DNA, 57 bp, Artificial Sequence
  derived and/or modified sequence
atggcccggctgcctgctggcatccgcttcatcatctccttcagccgggaccagtag

SEQ ID NO: 200717 - DNA, 1602 bp, Artificial Sequence
  derived and/or modified sequence
atggcccggctgcccgccggcatccggttcatcatcagcttcagccgggatcagtggtaccgggcatttatctttatcctcacctttctcttgtatgcctcattccacctatccaggaagccaatatcaatcgtcaaaggggaactgcacaaatactgcacagcatgggatgaggccgatgtgcgtttctcttcccaaaacaggaagagtggctctgccgctccgcatcagctgcccgacaacgagacagactgtgggtgggcgccctttgacaagaataactatcagcagttattgggagccctggactactcgtttctgtgcgcctacgcggttgggatgtatttgtctggaattatcggtgagcgcctgccaatccggtattacctgacctttggtatgttagcctctggggccttcaccgcactgttcggactgggatacttctacaatatccattcctttgggttctacgtggtaactcaggtgatcaatgggctcgtgcaaacaacaggctggccttccgtggtgacttgccttggtaattggttcggaaaggggcgaagaggcctgatcatgggtgtgtggaatagtcacacatcagtgggcaacatcttaggatcacttatagccggatactgggtgtcaacctgctggggactcagctttgttgtccctggtgccatcgttgcagcaatgggcattgtatgtttcctgtttcttatagaacaccccaacgacgttcgatgctcttcgacgctggtcacccactctaagggctacgagaacgggacaaatcgactgcgcctgcagaaacagatccttaaatccgaaaagaacaaacctctggatccagagatgcagtgtttgctgcttagcgatggtaaggggagtatacacccaaaccacgtcgtcatcttgccaggggacggtggatccgggaccgctgcaatcagttttacaggcgccctcaagatccccggagttatcgaattcagtctgtgtctactctttgctaagcttgttagttacaccttcctgttttggttgcctttgtatatcaccaatgtggaccacctggacgctaagaaagcaggtgagctgtctacactcttcgatgtgggcggaatattcggcggtattctggccggcgtgataagcgatagactcgaaaaaagagcaagcacctgcggactgatgttacttctggctgccccaactttatatatattttctacagtgtccaagatggggctagaggcgacaatagcgatgttgttattgtccggggccctagtgtcgggcccctacactctgatcacgaccgccgtttccgctgatcttggcacacataagtctctcaaggggaatgctcacgctctgtccaccgtcaccgctatcatcgatggaacagggagcgtgggagctgccctggggcctctcctcgccgggttgctgtcaccatcaggatggtctaatgtcttctatatgctgatgttcgcggatgcttgtgcactgttgttcttgataaggttgatacataaggagctgtcctgtccagggagcgcaacaggagaccaggtgcccttcaaagaacagtag

SEQ ID NO: 200718 - DNA, 1602 bp, Artificial Sequence
  derived and/or modified sequence
atggcccggctgcccgccggcatccggttcatcatcagcttcagcagggaccagtggtatcgggctttcatctttatcctgaccttcctgctctatgctagctttcacctcagccgcaagcctatatcaatcgtgaaaggggaactccacaagtattgtactgcttgggacgaggccgatgtgagattttcatcccaaaatagaaagagcggatctgctgccccacaccagctgccagacaatgagacagactgtggctgggctcccttcgataagaacaactatcaacagctgctcggcgctctggactatagtttcttgtgcgcctatgcagtgggaatgtacctgagcggaatcattggtgagaggcttcctatacgatattatctgacttttggcatgctcgcttccggtgcgtttaccgccctgttcgggcttggttatttctacaacattcacagcttcggattctacgtggttacacaggtcattaatggtcttgtgcaaactaccggctggccatcggtcgtcacctgtctgggcaactggtttgggaagggtaggagaggtttaatcatgggtgtctggaatagtcatacaagcgttgggaatatactgggtagcttaattgctgggtactgggtcagtacctgctggggattaagctttgtagttccaggcgccatcgttgcggctatgggcatcgtgtgcttcctttttctgatcgaacaccccaatgacgtgagatgttcaagtactctggtgacccactctaagggctacgagaatggaaccaatcggctcagactccagaaacaaattttaaagtcagagaagaacaagcctctcgaccctgagatgcaatgtctactgttgtcagacggaaagggatccatacatccaaaccacgtggtcattcttcctggcgacggcggaagtggaacagccgctatctccttcaccggcgcactgaagatcccaggtgtgatagagttctctctgtgcctccttttcgcgaaacttgtttcctacaccttcctgttttggcttcccctctacatcacaaacgtggaccatctggacgccaaaaaggcaggcgagctttcaacactgttcgacgtgggcggtatcttcggaggcatcttagccggggtaatcagtgaccgcttagaaaagcgcgcttcgacttgcgggctgatgctgctgctggccgcacctacattatatattttttctaccgtgtccaagatgggtctggaggctactatagctatgcttctgctatctggagcgttagtctccggaccctacactctgattaccaccgctgtaagtgctgatttgggcactcataaatcccttaaggggaacgcgcacgccctgtctacagtgacagccattatcgacgggacaggctcagtcggagctgcgttgggccctctgctggccggtctgttgagcccgtcagggtggtctaatgtgttctacatgctgatgttcgcagatgcctgcgcgttactattcctgatccggctaatacacaaagaactgtcttgccctggctccgctaccggggaccaggtcccattcaaggaacaatag

SEQ ID NO: 200719 - DNA, 57 bp, Artificial Sequence
  derived and/or modified sequence
atggcccggctgcccgccggcatccggttcatcatcagcttcagccgggaccagtag

SEQ ID NO: 200720 - DNA, 57 bp, Artificial Sequence
  derived and/or modified sequence
atggcccggctgcccgccggcatccggttcatcatcagcttcagcagggatcagtag

SEQ ID NO: 200721 - DNA, 1602 bp, Artificial Sequence
  derived and/or modified sequence
atggcacggcttcccgctgggatccgcttcattatttcctttagccgcgatcagtggtacagggcattcattttcatactgactttcctcctctacgccagcttccatctgtctcgtaaacccatctctattgtgaagggcgagctgcataagtattgcaccgcatgggacgaggccgatgttaggttcagctctcaaaatcggaagtccgggtctgccgctccacaccaactgcccgataacgaaactgattgcggatgggcgcctttcgacaagaacaactatcagcaactcctgggcgctctggactattcctttctgtgtgcatatgcagtaggcatgtatctgtccgggattatcggagagcggctgccaattcgatactatctaaccttcggcatgttagcctccggtgcctttacagccctctttggtctcggttatttttataacatacattccttcggcttttacgttgtgacccaggtcatcaatggcctcgtccagacaaccggctggccctctgtcgtgacttgtcttggcaattggtttggcaagggcagaaggggcttaatcatgggtgtttggaatagccacacaagcgtgggaaacatattgggttccctcattgccggatattgggtgagcacgtgctggggcctttcttttgtagtgccgggtgctattgtcgccgcaatgggaatagtttgcttcctctttttgatcgaacatcctaatgacgtcaggtgctctagcacactcgtgactcatagcaaagggtatgaaaatggtaccaaccgccttaggctgcaaaagcagatcctaaagagcgaaaaaaacaagccactggatccagagatgcagtgcctgctgttgtccgacgggaagggctccattcatcccaatcacgtcgtgattcttcctggtgacggaggcagtgggactgctgcaatctcttttacgggcgcactgaagatacctggggtcattgagttctctctatgcttactttttgccaagttggtgtcctacactttcctgttctggttacctctttatatcactaacgtggatcacctggacgccaagaaggcaggcgaactgtccacactgttcgacgtgggcggtatttttggtgggatattagcaggagtgattagtgaccgactggaaaagagagcctccacatgcggcctcatgttacttcttgccgctccaactctctatattttttcgacggtctccaagatgggtctggaagcaaccatcgcaatgctcctgttatccggggctctagtatctgggccttacaccctaatcacaaccgctgtgtcagcagacctggggacacataagtcacttaaaggcaatgcccacgccttgtccactgtcacagcaattatcgacgggaccggatccgtgggagccgctctggggcctctcctggccggtctgctctccccatccggctggtccaatgttttctatatgctcatgttcgctgacgcctgcgcactgcttttcctcatcagactgattcataaggagttgtcatgccccggaagcgcaactggtgatcaggtgccgtttaaggaacagtag

SEQ ID NO: 200722 - DNA, 1602 bp, Artificial Sequence
  derived and/or modified sequence
atggcccgactacctgccggtatccggttcatcatatctttctcccgcgaccagtggtatcgtgccttcattttcatacttaccttcctgttgtacgcgtcttttcacctgtctagaaaacctatctccattgtgaaaggggaactccacaaatattgcaccgcctgggacgaagccgacgtcagattcagtagccagaatcggaaaagtggctctgcggcacctcatcagctacccgacaatgagactgattgcggatgggctccgttcgataaaaacaattaccagcagctgcttggcgctttggactattctttcctgtgtgcatatgctgtaggaatgtacctatccggtatcattggcgagcgcctaccaattcgctactacctgaccttcggaatgctggctagtggagcctttacggcgttatttggtctcggctatttttataatatccacagttttggattttacgtggtgacacaggttatcaatgggcttgtgcagacaaccggatggccctctgtggtaacttgcctggggaactggtttggcaagggaagaaggggcctaatcatgggcgtctggaactctcacacctctgtgggtaacattctaggctcactgatcgcagggtattgggtgagcacttgttggggactgtcctttgtcgtgccaggagccattgttgctgccatgggtatcgtgtgctttctctttctcatcgaacatcccaacgacgtacgctgtagctcgacactggtgacacattccaaaggatatgagaatggtactaatcgactccggttacagaaacagatccttaagtcagaaaagaataagccccttgatcccgaaatgcagtgtctgctgctttctgatggaaagggatctattcacccgaaccacgtcgtcatcctgccgggagacggagggagcgggacagcagctataagtttcaccggcgcattaaagatccccggagtgattgagttttccctttgcttgctcttcgccaagcttgtgtcatacaccttccttttctggctgcccctgtacatcacaaatgtcgaccaccttgatgcgaagaaagccggagagctatcgactctgtttgatgtcggtgggatatttggcggaatcctggccggtgtcattagtgataggttagagaagagggcgtctacatgcggactgatgttgctgctcgccgctccaactctgtacattttttcaaccgtgtccaaaatgggactggaggccactatagctatgcttctcctgtctggtgcccttgtttccggaccttacaccttaatcaccacagcggtttccgcagatttgggcacccacaaatccctgaagggtaacgctcacgcgctgagtacggtcaccgcgattattgatggaaccggcagcgtgggcgctgccttgggcccacttcttgcaggcctgctgagtccgtccgggtggtcaaacgtattctatatgctgatgtttgccgatgcctgcgcactgctttttctgatacgtctgatccataaagagctgtcatgtcccggttccgcaacaggagaccaggtcccctttaaagagcaatag

SEQ ID NO: 200723 - DNA, 57 bp, Artificial Sequence
  derived and/or modified sequence
atggccagactccctgccggtatcaggttcatcattagttttagcagggaccaatag

SEQ ID NO: 200724 - DNA, 57 bp, Artificial Sequence
  derived and/or modified sequence
atggcacgcctgccggcaggaatcaggtttattatttctttcagccgagaccaatag

SEQ ID NO: 200725 - DNA, 3664 bp, Artificial Sequence
  derived and/or modified sequence
cggcggcgcaggtgaggcgcggggccggggccggaccgggaggcggggaccccccgcccccccgcccgcacctgcggggcagccggcgctcaggcgccgcagccgctcagcacctgcggcgccctcagggagccgggcgcggggccctgcgcactcggagctcggctcctctccttccttttcttttttttcggggggaggtgggggctggtttggatgttttccgagagccggggacggtctcaagctattttcgcggagggaagtctttgaaatacgacatctagaagagtggccctcggcgacaatgccgggcgttcccggaccggggcaacgctgggattccggggaagtggaggcagagggagcgggcacggggccggcagccgctccacggagtccccggcaggggcgagcttagctgtccagccgggtcccctgcccaccccggcccgggccgcggtgacagctgagggtccagagagccggcaggaggggaccctgcgcattgtctgccgcgatggggacgtgggcgtgcccgcggaattcacctcctccggggaccagccgcccagggaggagccggcacagaacgctggctcggagcgccggcaccctgggcctttgcgttgtttgtcggctgagcagctggttcccggagcccgtgggcctcctggccaatgcgagtgacagcgaccttctgggtttataataaagggcttgacgcgccggaaagtcccctcgccgctggccaccagccttccagcccttacggcccacgccgtaatcctggtgaccgagaagagagcagagccactgccagaaggaaggggacaagacccagcaggacaccttctttccacgctttccagcctgtgggagcggcaggggcaacagagagaggatctggagccaggattaatgactcatttatgaagcatcttattctgcgaccgaggctcagtggtcagtggcgacgtaaatggctcgactccccgctggcattcgcttcatcatctcattctccagggatcagtggtacagagccttcatttttattttgacatttctgctgtatgcaagttttcacttatctcgaaagcctatcagcatagttaagggtgagctccacaagtactgcactgcttgggatgaagctgacgtcaggttcagcagccagaacaggaagtctgggtccgctgccccccaccagctccctgacaatgagaccgactgtggctgggcaccgtttgataagaacaactatcagcagctgcttggggccctggactactccttcctgtgcgcctatgccgtggggatgtacctcagtggcatcattggggagcgcctgccgattaggtattacctaactttcgggatgctcgccagcggagccttcaccgccctgttcggcttagggtatttctacaacatccacagtttcggattctacgtggtaactcaggtcatcaacgggctggtgcagaccaccggctggcccagcgtcgtcacctgcctcggcaactggtttggaaaaggaaggagaggtttgattatgggggtctggaactcccacacctccgtgggcaacatcttggggtcattgatcgctggctactgggtgtccacatgctggggcctgtccttcgtcgtgcctggagccatcgtggcagccatggggatagtgtgctttctcttcctcattgaacatccgaacgacgtcaggtgctcctccaccctggtgacgcactcaaaaggctatgagaatggtacaaacagattgagactccagaagcaaatcttgaagagcgaaaagaacaagcctctggacccagagatgcagtgcctgctgctctcagatgggaagggctccatccacccgaaccacgtcgtcattctccccggggacggtgggagtggcacggccgccatcagcttcacaggggccttgaaaattccaggcgtgatagagttctcactgtgtctgctgtttgccaagctggtcagctatactttcctcttctggctgcccctgtacatcacgaatgtggatcaccttgatgccaaaaaggcgggggagctctccaccctgtttgacgtgggcggaatctttggtgggatcctggcaggtgtgatctcagaccgactggagaaaagggcctccacctgcggcctgatgctgctgctcgcggcccccacgctctacatcttctccaccgtcagcaagatggggcttgaggccaccatcgccatgctgctgctcagcggagccctggtcagtgggccctacacactcatcaccaccgccgtctccgccgacctggggactcataaaagtctgaaaggcaacgcgcacgccctctccaccgtgacggccatcattgacgggacgggctctgtaggagcagccctgggccccctgctggctgggctcctctccccgtccggctggagcaatgtgttttacatgctgatgtttgcagatgcctgtgccttactgttcctgatccgcctcatacacaaggagctgagctgcccagggtcagctacgggggaccaagttccatttaaggaacagtgacaccccaccccagtcccgtggagggggtctgggcccacccttcacaactgcctttcaaggacagttcagacaaagggccctgcatggaaagagtgacctccctttgccttttgcacacgcacctggaaaagacacagaagccaacctgagaacccctggtgctattttaaaggagacatattgctgaacagcagtgagaaaagtctgcaggaactgctgcctgagccaagccagagaaccgaagacccggccggccctggcctcacaggcgtgtgcccatgcagccacccaaatgcacgcgtgacaacaaggccgggagggtggggggggtgcacaggtagccccgaccctctcaggcattccagccacagaacatcaaagtgagcgagtactgcgctggctgtggcttcagagaacctgtatgtgccacatggaaaaacaggacaccagagcccaccagacagtgccggccagcagagaagcagagagccagcgccacacaacatcaagaaggccgacaaccaggttggaaaccaagacggagctcagacccaccacatcgccccagaggcttttccagcacccatgatgtttcggactgacctaaaaactaattgtcgagaagccaagggtgaggaggcaggaagcacctccggttggaggcacccaggcttgccagccacagagcgccccaaagtcaccgtcatcccagcccctggccttcctgctgccctccggggccatggcactgctgttcagctcaggcacaggggcacagcagaggtttgggaagcggtctccccaccggcactgggattggcgggtccaagcccagcaaccggcttcgctccacaacacacaccacacctgggactgtttttaatacatagcaacagactgggttatttatttaagatgtgtattgtgtcatatgaagtttaagagacataaatggcattttgttatttattaagacaaactccaattgttctctggctgtttttttcagttgtgtctagcaaaatacttatctgccctttgaaataaaatgtttttgtttaaaaaatctcagaacactca

SEQ ID NO: 200726 - DNA, 3094 bp, Artificial Sequence
  derived and/or modified sequence
tgggaagttcgcgcaagtgcggctctgcagggaggagggagggccgaggggaaggccctcgagagagtggagggcaacagtggccacggttcctctgtacttcgtttcttccctttatagaattgagagattgctgagcctaaatacatgttgctgcattgcctccgagaatggccggacctatccccactctcaccaaaacagagtgtgggactcactgctccctcgcctactagagcagagccactgccagaaggaaggggacaagacccagcaggacaccttctttccacgctttccagcctgtgggagcggcaggggcaacagagagaggatctggagccaggattaatgactcatttatgaagcatcttattctgcgaccgaggctcagtggtcagtggcgacgtaaatggctcgactccccgctggcattcgcttcatcatctcattctccagggatcagtggtacagagccttcatttttattttgacatttctgctgtatgcaagttttcacttatctcgaaagcctatcagcatagttaagggtgagctccacaagtactgcactgcttgggatgaagctgacgtcaggttcagcagccagaacaggaagtctgggtccgctgccccccaccagctccctgacaatgagaccgactgtggctgggcaccgtttgataagaacaactatcagcagctgcttggggccctggactactccttcctgtgcgcctatgccgtggggatgtacctcagtggcatcattggggagcgcctgccgattaggtattacctaactttcgggatgctcgccagcggagccttcaccgccctgttcggcttagggtatttctacaacatccacagtttcggattctacgtggtaactcaggtcatcaacgggctggtgcagaccaccggctggcccagcgtcgtcacctgcctcggcaactggtttggaaaaggaaggagaggtttgattatgggggtctggaactcccacacctccgtgggcaacatcttggggtcattgatcgctggctactgggtgtccacatgctggggcctgtccttcgtcgtgcctggagccatcgtggcagccatggggatagtgtgctttctcttcctcattgaacatccgaacgacgtcaggtgctcctccaccctggtgacgcactcaaaaggctatgagaatggtacaaacagattgagactccagaagcaaatcttgaagagcgaaaagaacaagcctctggacccagagatgcagtgcctgctgctctcagatgggaagggctccatccacccgaaccacgtcgtcattctccccggggacggtgggagtggcacggccgccatcagcttcacaggggccttgaaaattccaggcgtgatagagttctcactgtgtctgctgtttgccaagctggtcagctatactttcctcttctggctgcccctgtacatcacgaatgtggatcaccttgatgccaaaaaggcgggggagctctccaccctgtttgacgtgggcggaatctttggtgggatcctggcaggtgtgatctcagaccgactggagaaaagggcctccacctgcggcctgatgctgctgctcgcggcccccacgctctacatcttctccaccgtcagcaagatggggcttgaggccaccatcgccatgctgctgctcagcggagccctggtcagtgggccctacacactcatcaccaccgccgtctccgccgacctggggactcataaaagtctgaaaggcaacgcgcacgccctctccaccgtgacggccatcattgacgggacgggctctgtaggagcagccctgggccccctgctggctgggctcctctccccgtccggctggagcaatgtgttttacatgctgatgtttgcagatgcctgtgccttactgttcctgatccgcctcatacacaaggagctgagctgcccagggtcagctacgggggaccaagttccatttaaggaacagtgacaccccaccccagtcccgtggagggggtctgggcccacccttcacaactgcctttcaaggacagttcagacaaagggccctgcatggaaagagtgacctccctttgccttttgcacacgcacctggaaaagacacagaagccaacctgagaacccctggtgctattttaaaggagacatattgctgaacagcagtgagaaaagtctgcaggaactgctgcctgagccaagccagagaaccgaagacccggccggccctggcctcacaggcgtgtgcccatgcagccacccaaatgcacgcgtgacaacaaggccgggagggtggggggggtgcacaggtagccccgaccctctcaggcattccagccacagaacatcaaagtgagcgagtactgcgctggctgtggcttcagagaacctgtatgtgccacatggaaaaacaggacaccagagcccaccagacagtgccggccagcagagaagcagagagccagcgccacacaacatcaagaaggccgacaaccaggttggaaaccaagacggagctcagacccaccacatcgccccagaggcttttccagcacccatgatgtttcggactgacctaaaaactaattgtcgagaagccaagggtgaggaggcaggaagcacctccggttggaggcacccaggcttgccagccacagagcgccccaaagtcaccgtcatcccagcccctggccttcctgctgccctccggggccatggcactgctgttcagctcaggcacaggggcacagcagaggtttgggaagcggtctccccaccggcactgggattggcgggtccaagcccagcaaccggcttcgctccacaacacacaccacacctgggactgtttttaatacatagcaacagactgggttatttatttaagatgtgtattgtgtcatatgaagtttaagagacataaatggcattttgttatttattaagacaaactccaattgttctctggctgtttttttcagttgtgtctagcaaaatacttatctgccctttgaaataaaatgtttttgtttaaaaaatctcagaacactca

SEQ ID NO: 200727 - DNA, 494 bp, Artificial Sequence
  derived and/or modified sequence
ggcaccctgggcctttgcgttgtttgtcggctgagcagctggttcccggagcccgtgggcctcctggccaatgcgagtgacagcgaccttctgggtttataataaagggcttgacgcgccggaaagtcccctcgccgctggccaccagccttccagcccttacggcccacgccgtaatcctggtgaccgagaagctctttgcctggaaggtgcctgcctgcctgcctgccggcccttgaacttaaatcgtctgaagttgtagagcagagccactgccagaaggaaggggacaagacccagcaggacaccttctttccacgctttccagcctgtgggagcggcaggggcaacagagagaggatctggagccaggattaatgactcatttatgaagcatcttattctgcgaccgaggctcagtggtcagtggcgacgtaaatggctcgactccccgctggcattcgcttcatcatctcattctccagggatcagtg

SEQ ID NO: 200728 - DNA, 568 bp, Artificial Sequence
  derived and/or modified sequence
ggggagctgtggctcagacctctggtttctgcgcctcctcactctccaaacccaacctcgaggttcccccgccgctgcgcaccctgggaagccctttctcaccaggagctctcaccccaatatcattctctccctcctcctccaactcctccgagcccaggtccgacatggtctcgccccagcctggatcacagccgcagcgcctctagcagctttatagaattgagagattgctgagcctaaatacatgttgctgcattgcctccgagaatggccggacctatccccactctcaccaaaacagagtgtgggactcactgctccctcgcctactagagcagagccactgccagaaggaaggggacaagacccagcaggacaccttctttccacgctttccagcctgtgggagcggcaggggcaacagagagaggatctggagccaggattaatgactcatttatgaagcatcttattctgcgaccgaggctcagtggtcagtggcgacgtaaatggctcgactccccgctggcattcgcttcatcatctcattctccagggatcagtg

SEQ ID NO: 200729 - DNA, 1602 bp, Artificial Sequence
  derived and/or modified sequence
atggccagactgcccgccggcatcagattcatcatcagcttcagcagagaccagtggtacagagccttcatcttcatcctgaccttcctgctgtacgccagcttccacctgagcagaaagcccatcagcatcgtgaagggcgagctgcacaagtactgcaccgcctgggacgaggccgacgtgagattcagcagccagaacagaaagagcggcagcgccgccccccaccagctgcccgacaacgagaccgactgcggctgggcccccttcgacaagaacaactaccagcagctgctgggcgccctggactacagcttcctgtgcgcctacgccgtgggcatgtacctgagcggcatcatcggcgagagactgcccatcagatactacctgaccttcggcatgctggccagcggcgccttcaccgccctgttcggcctgggctacttctacaacatccacagcttcggcttctacgtggtgacccaggtgatcaacggcctggtgcagaccaccggctggcccagcgtggtgacctgcctgggcaactggttcggcaagggcagaagaggcctgatcatgggcgtgtggaacagccacaccagcgtgggcaacatcctgggcagcctgatcgccggctactgggtgagcacctgctggggcctgagcttcgtggtgcccggcgccatcgtggccgccatgggcatcgtgtgcttcctgttcctgatcgagcaccccaacgacgtgagatgcagcagcaccctggtgacccacagcaagggctacgagaacggcaccaacagactgagactgcagaagcagatcctgaagagcgagaagaacaagcccctggaccccgagatgcagtgcctgctgctgagcgacggcaagggcagcatccaccccaaccacgtggtgatcctgcccggcgacggcggcagcggcaccgccgccatcagcttcaccggcgccctgaagatccccggcgtgatcgagttcagcctgtgcctgctgttcgccaagctggtgagctacaccttcctgttctggctgcccctgtacatcaccaacgtggaccacctggacgccaagaaggccggcgagctgagcaccctgttcgacgtgggcggcatcttcggcggcatcctggccggcgtgatcagcgacagactggagaagagagccagcacctgcggcctgatgctgctgctggccgcccccaccctgtacatcttcagcaccgtgagcaagatgggcctggaggccaccatcgccatgctgctgctgagcggcgccctggtgagcggcccctacaccctgatcaccaccgccgtgagcgccgacctgggcacccacaagagcctgaagggcaacgcccacgccctgagcaccgtgaccgccatcatcgacggcaccggcagcgtgggcgccgccctgggccccctgctggccggcctgctgagccccagcggctggagcaacgtgttctacatgctgatgttcgccgacgcctgcgccctgctgttcctgatcagactgatccacaaggagctgagctgccccggcagcgccaccggcgaccaggtgcccttcaaggagcagtag

SEQ ID NO: 200730 - DNA, 57 bp, Artificial Sequence
  derived and/or modified sequence
atggccagactgcccgccggcatcagattcatcatcagcttcagcagagaccagtag

SEQ ID NO: 200731 - protein, 230 aa, Artificial Sequence
  derived and/or modified sequence
MEPLRLLILLFVTELSGAHNTTVFQGVAGQSLQVSCPYDSMKHWGRRKAWCRQLGEKGPCQRVVSTHNLWLLSFLRRWNGSTAITDDTLGGTLTITLRNLQPHDAGLYQCQSLHGSEADTLRKVLVEVLADPLDHRDAGDLWFPGESESFEDAHVEHSISRSLLEGEIPFPPTSILLLLACIFLIKILAASALWAAAWHGQKPGTHPPSELDCGHDPGYQLQTLPGLRDT

SEQ ID NO: 200732 - DNA, 693 bp, Artificial Sequence
  derived and/or modified sequence
atggagcccctgagactgctgatcctgctgttcgtgaccgagctgagcggcgcccacaacaccaccgtgttccagggcgtggccggccagagcctgcaggtgagctgcccctacgacagcatgaagcactggggcagaagaaaggcctggtgcagacagctgggcgagaagggcccctgccagagagtggtgagcacccacaacctgtggctgctgagcttcctgagaagatggaacggcagcaccgccatcaccgacgacaccctgggcggcaccctgaccatcaccctgagaaacctgcagccccacgacgccggcctgtaccagtgccagagcctgcacggcagcgaggccgacaccctgagaaaggtgctggtggaggtgctggccgaccccctggaccacagagacgccggcgacctgtggttccccggcgagagcgagagcttcgaggacgcccacgtggagcacagcatcagcagaagcctgctggagggcgagatccccttcccccccaccagcatcctgctgctgctggcctgcatcttcctgatcaagatcctggccgccagcgccctgtgggccgccgcctggcacggccagaagcccggcacccacccccccagcgagctggactgcggccacgaccccggctaccagctgcagaccctgcccggcctgagagacacctag

SEQ ID NO: 200733 - DNA, 693 bp, Artificial Sequence
  derived and/or modified sequence
atggagccattgagattactcatactgttattcgtgaccgagctgagcggggcccacaacacgactgtatttcagggggtggcgggacagtctttgcaggtgagctgcccctacgattccatgaagcattggggcaggaggaaagcttggtgtcgtcaattaggagaaaaaggcccttgccagagggtagttagcacacacaatctgtggctgctgagctttcttagaaggtggaatgggtctacagctattaccgatgataccctagggggaacacttaccataactctgcggaatcttcagccccacgatgccggcttgtatcaatgccagtcactgcatggttctgaggctgatacccttcggaaagtacttgtggaggtgctggcagaccccctggaccaccgcgacgcaggcgacctctggttccccggggagtccgaatctttcgaggatgcccatgtagaacactcaatctctcggtcgctgctcgagggcgagatcccattccctcctacctcaatcctgctcttgctggcgtgtatcttcttgatcaagattctcgcagcttcagctctctgggccgcagcctggcacggccaaaagcctggaacgcacccaccctcagaactagattgtggacatgatccagggtatcagctccaaacactcccgggtcttcgggatacctag

SEQ ID NO: 200734 - DNA, 693 bp, Artificial Sequence
  derived and/or modified sequence
atggagcccctgcggctgctgatcctgctgtttgtgacagagctgagcggggcccacaacaccaccgtcttccagggcgtggccggccagagcctgcaggtgtcctgcccctatgacagcatgaagcactggggccgcaggaaggcctggtgccggcagctgggggagaagggcccctgccagagggtggtgtccacccacaacctgtggctgctgtccttcctgcggcgctggaatggcagcacagccatcacagatgacaccctgggcggcaccctgaccatcaccctgaggaacctgcagccccatgatgctggcctgtaccagtgccagagcctgcacggcagcgaggccgacaccctgaggaaggtgctggtggaggtgctggccgaccccctggaccacagagatgctggggacctgtggttccctggagagagcgagagctttgaagatgcccacgtggagcacagcatcagccgcagcctgctggagggggagatccccttcccccccaccagcatcctgctgctgctggcctgcatcttcctgatcaagatcctggccgccagcgccctgtgggccgccgcctggcacggccagaagccaggcacccaccccccatctgagctggactgtggccatgaccccggctaccagctgcagaccctgcccggcctgcgggacacctag

SEQ ID NO: 200735 - DNA, 693 bp, Artificial Sequence
  derived and/or modified sequence
atggagcccctgcggctgctgatcctgctgttcgtgaccgagctgagcggcgcccacaacactaccgtcttccaaggagtcgctggacagagcctgcaagtgtcctgcccctacgactcaatgaagcattgggggagacgcaaggcctggtgccgccagctcggcgagaagggaccttgtcagagggtggtttcaactcacaatctgtggctgctaagcttcttgcgacggtggaacggcagtactgcgatcaccgacgatacacttggcggtacgcttaccattacactaagaaaccttcagccgcatgacgcaggtctctatcaatgtcagtccctgcacggctcagaagctgatacattgcgaaaggtactcgtagaggttctggccgacccactggatcacagagatgcaggagacctctggtttcccggggaaagcgaatccttcgaggatgcacacgtggagcacagtattagcagatctctgttagaaggcgagatcccgttccctccaacgagcattcttcttctcctcgcctgtatctttctcatcaagattctggcagccagcgccctttgggccgctgcttggcacggccagaagcctggaacccatccaccttctgagctcgactgtggccacgacccagggtatcaactgcagacgctccctggcctccgagacacgtag

SEQ ID NO: 200736 - DNA, 693 bp, Artificial Sequence
  derived and/or modified sequence
atggagccgctgcgcctcctgatactcctgttcgtgacagaactgtctggggctcataacactacggtgttccagggagtagccggacaatcgctgcaggtgtcatgcccttacgactcaatgaagcactggggcagacggaaggcgtggtgccggcagctcggagagaagggaccttgtcaacgagtggtctcaacgcacaatctgtggctgctaagcttcctgcggaggtggaatggttccactgccataacagatgacactttagggggaacactgaccatcacgctaaggaatcttcagcctcatgatgcgggattataccagtgtcagagtttgcacggctctgaagccgataccctgagaaaagtcctagtggaggtactggcggatcccctcgaccacagagacgctggagatctgtggttcccaggcgagtccgaatccttcgaggatgctcatgtggagcacagcatcagtaggtcactccttgagggcgaaattccattccccccaaccagcattctcttactccttgcgtgtatctttcttattaagatcctggctgctagcgctctgtgggcagccgcttggcacggccagaaacccggaacccaccccccaagcgagcttgactgtggtcacgaccccggataccagctgcagacgctgcccggactgcgcgatacctag

SEQ ID NO: 200737 - DNA, 1044 bp, Artificial Sequence
  derived and/or modified sequence
tgacatgcctgatcctctcttttctgcagttcaagggaaagacgagatcttgcacaaggcactctgcttctgcccttggctggggaagggtggcatggagcctctccggctgctcatcttactctttgtcacagagctgtccggagcccacaacaccacagtgttccagggcgtggcgggccagtccctgcaggtgtcttgcccctatgactccatgaagcactgggggaggcgcaaggcctggtgccgccagctgggagagaagggcccatgccagcgtgtggtcagcacgcacaacttgtggctgctgtccttcctgaggaggtggaatgggagcacagccatcacagacgataccctgggtggcactctcaccattacgctgcggaatctacaaccccatgatgcgggtctctaccagtgccagagcctccatggcagtgaggctgacaccctcaggaaggtcctggtggaggtgctggcagaccccctggatcaccgggatgctggagatctctggttccccggggagtctgagagcttcgaggatgcccatgtggagcacagcatctccaggagcctcttggaaggagaaatccccttcccacccacttccatccttctcctcctggcctgcatctttctcatcaagattctagcagccagcgccctctgggctgcagcctggcatggacagaagccagggacacatccacccagtgaactggactgtggccatgacccagggtatcagctccaaactctgccagggctgagagacacgtgaaggaagatgatgggaggaaaagcccaggagaagtcccaccagggaccagcccagcctgcatacttgccacttggccaccaggactccttgttctgctctggcaagagactactctgcctgaacactgcttctcctggaccctggaagcagggactggttgagggagtggggaggtggtaagaacacctgacaacttctgaatattggacattttaaacacttacaaataaatccaagactgtcatatttagctggat

SEQ ID NO: 200738 - protein, 539 aa, Artificial Sequence
  derived and/or modified sequence
MGTEGPPPPAASRGRQGCLLVPARTKTTIALLYDEESENAYDIRLKLTKEVLTIQKQDVVCVGGSHQGRNRRTVTLRRQPVGGLGLSIKGGSEHNVPVVISKIFEDQAADQTGMLFVGDAVLQVNGIHVENATHEEVVHLLRNAGDEVTITVEYLREAPAFLKLPLGSPGPSSDHSSGASSPLFDSGLHLNGNSSTTAPSSPSSPIAKDPRYEKRWLDTLSVPLSMARISRYKAGTEKLRWNAFEVLALDGVSSGILRFYTAQDGTDWLRAVSANIRELTLQNMKMANKCCSPSDQVVHMGWVNEKLQGADSSQTFRPKFLALKGPSFYVFSTPPVSTFDWVRAERTYHLCEVLFKVHKFWLTEDCWLQANLYLGLQDFDFEDQRPYCFSIVAGHGKSHVFNVELGSELAMWEKSFQRATFMEVQRTGSRTYMCSWQGEMLCFTVDFALGFTCFESKTKNVLWRFKFSQLKGSSDDGKTRVKLLFQNLDTKQIETKELEFQDLRAVLHCIHSFIAAKVASVDPGFMDSQSLARKYMYSS

SEQ ID NO: 200739 - DNA, 1620 bp, Artificial Sequence
  derived and/or modified sequence
atgggcaccgagggcccccccccccccgccgccagcagaggcagacagggctgcctgctggtgcccgccagaaccaagaccaccatcgccctgctgtacgacgaggagagcgagaacgcctacgacatcagactgaagctgaccaaggaggtgctgaccatccagaagcaggacgtggtgtgcgtgggcggcagccaccagggcagaaacagaagaaccgtgaccctgagaagacagcccgtgggcggcctgggcctgagcatcaagggcggcagcgagcacaacgtgcccgtggtgatcagcaagatcttcgaggaccaggccgccgaccagaccggcatgctgttcgtgggcgacgccgtgctgcaggtgaacggcatccacgtggagaacgccacccacgaggaggtggtgcacctgctgagaaacgccggcgacgaggtgaccatcaccgtggagtacctgagagaggcccccgccttcctgaagctgcccctgggcagccccggccccagcagcgaccacagcagcggcgccagcagccccctgttcgacagcggcctgcacctgaacggcaacagcagcaccaccgcccccagcagccccagcagccccatcgccaaggaccccagatacgagaagagatggctggacaccctgagcgtgcccctgagcatggccagaatcagcagatacaaggccggcaccgagaagctgagatggaacgccttcgaggtgctggccctggacggcgtgagcagcggcatcctgagattctacaccgcccaggacggcaccgactggctgagagccgtgagcgccaacatcagagagctgaccctgcagaacatgaagatggccaacaagtgctgcagccccagcgaccaggtggtgcacatgggctgggtgaacgagaagctgcagggcgccgacagcagccagaccttcagacccaagttcctggccctgaagggccccagcttctacgtgttcagcaccccccccgtgagcaccttcgactgggtgagagccgagagaacctaccacctgtgcgaggtgctgttcaaggtgcacaagttctggctgaccgaggactgctggctgcaggccaacctgtacctgggcctgcaggacttcgacttcgaggaccagagaccctactgcttcagcatcgtggccggccacggcaagagccacgtgttcaacgtggagctgggcagcgagctggccatgtgggagaagagcttccagagagccaccttcatggaggtgcagagaaccggcagcagaacctacatgtgcagctggcagggcgagatgctgtgcttcaccgtggacttcgccctgggcttcacctgcttcgagagcaagaccaagaacgtgctgtggagattcaagttcagccagctgaagggcagcagcgacgacggcaagaccagagtgaagctgctgttccagaacctggacaccaagcagatcgagaccaaggagctggagttccaggacctgagagccgtgctgcactgcatccacagcttcatcgccgccaaggtggccagcgtggaccccggcttcatggacagccagagcctggccagaaagtacatgtacagcagctag

SEQ ID NO: 200740 - DNA, 1620 bp, Artificial Sequence
  derived and/or modified sequence
atgggaacggagggcccgcctccccctgctgcctcgcggggacgtcagggttgtctgcttgtgccagcccgtacaaaaaccacgattgccctgctgtacgacgaggagtcagagaacgcctacgacattcgcctgaagctgacaaaggaagtgttgaccatccagaagcaggacgtagtgtgtgtgggcggatcacaccaggggagaaacagaaggaccgtcaccttacggcgccaacccgttggagggctggggctgagtatcaagggaggcagtgaacataacgtacctgtcgtcattagcaagatcttcgaggatcaggcagccgaccagaccggaatgctgttcgttggggatgccgtgctccaagtaaatgggattcacgtggaaaatgcgacccatgaggaggtggtgcatctgctccgaaacgctggcgacgaggttacgattactgtagagtatctgcgggaagctcccgccttcttgaagctcccactcggtagtcccggaccttcaagcgatcatagcagcggggcctcttcgccgctctttgactccgggctgcatctgaatggcaatagttccactaccgccccatcctctcccagtagtcccatcgccaaggacccaaggtacgaaaaacgatggctggacactctctccgtgcctctctctatggccaggattagccgttataaggctggtactgagaagctgcgatggaacgcatttgaggttctggccctggatggggtgagttcgggcattctgcgtttctacacggcccaagatggtaccgattggctacgagccgtatctgctaatatccgcgagttgactcttcagaacatgaaaatggctaataaatgttgcagcccctcagaccaggtggtacatatggggtgggtgaacgagaagctgcaaggagcagacagctcccagacatttcggcctaaattcctagcattgaaaggcccttccttctacgttttcagcactccccccgtcagtaccttcgattgggttagagctgaaagaacataccatctgtgcgaagttttgttcaaggtccataagttctggctgacagaggactgttggctgcaagccaacctgtatctgggtctccaggactttgattttgaggatcaacgaccatattgcttcagcatcgtcgcaggccacggtaaaagccatgtgtttaacgtagagttaggctctgagttggccatgtgggagaagtcattccagcgcgctacattcatggaggttcagcgtaccggttccagaacatacatgtgctcttggcagggcgaaatgctgtgctttacagtggacttcgccttgggtttcacctgcttcgagtctaagaccaagaatgtactgtggcgattcaagtttagccagttgaaagggtccagtgacgatggaaagactagagtaaagctcctctttcagaacctcgatacaaagcagatcgaaacaaaagaactggaattccaggatctaagagccgttctgcactgtatacatagcttcatcgcggctaaggtcgcatctgtcgatcctggattcatggactcccagtcacttgcgcgaaagtacatgtattcgagctag

SEQ ID NO: 200741 - DNA, 1620 bp, Artificial Sequence
  derived and/or modified sequence
atgggcacagagggccccccacctcctgctgccagccggggccggcagggctgcctgctggtgcctgcccggaccaagaccaccatcgccctgctgtatgatgaggagagtgaaaatgcctatgacatccggctgaagctgaccaaggaggtgctgaccatccagaagcaggatgtggtgtgtgtgggcggcagccaccagggcaggaacagaagaacagtgaccctgcggcggcagcctgtgggcggcctgggcctgagcatcaagggcggcagcgagcacaacgtgcctgtggtgatcagcaagatctttgaggaccaggccgctgaccagacaggcatgctgtttgtgggagatgctgtgctgcaggtgaatggcatccacgtggagaatgccacccatgaggaggtggtgcacctgctgagaaatgctggagatgaggtgaccatcaccgtggagtacctgcgggaggccccagccttcctgaagctgcccctgggcagccctggccccagcagtgaccacagcagcggggccagcagccccctgtttgacagcggcctgcacctgaatggaaacagcagcaccacagcccccagcagccccagcagccccatcgccaaggaccccaggtatgagaagcgctggctggacaccctgtctgtgcccctgtccatggcccgcatcagccgctacaaggccggcacagagaagctgcgctggaatgcctttgaggtgctggccctggatggagtgagcagcggcatcctgcgcttctacacagcccaggacggcacagactggctgcgggctgtgtctgccaacatccgggagctgaccctgcagaacatgaagatggccaacaagtgctgcagccccagcgaccaggtggtgcacatgggctgggtgaatgagaagctgcagggcgctgacagcagccagaccttccggcccaagttcctggccctgaagggccccagcttctacgtgttcagcaccccacctgtgtccacctttgactgggtgcgggcagagaggacctaccacctgtgtgaggtgctcttcaaggtgcacaagttctggctgacagaggactgctggctgcaggccaacctgtacctgggcctgcaggactttgattttgaggaccagaggccctactgcttcagcatcgtggccggccacggcaagagccacgtgttcaacgtggagctgggcagcgagctggccatgtgggagaagagcttccagagggccaccttcatggaggtgcagaggacaggcagcaggacctacatgtgctcctggcagggcgagatgctgtgcttcaccgtggactttgccctgggcttcacctgctttgagagcaagaccaagaatgtgctgtggaggttcaagttcagccagctgaagggcagcagtgatgatggcaagaccagggtgaagctgctcttccagaacctggacaccaagcagatcgagaccaaggagctggagttccaggacctgcgggctgtgctgcactgcatccacagcttcatcgccgccaaggtggcctctgtggaccccggcttcatggacagccagagcctggccaggaagtacatgtacagcagctag

SEQ ID NO: 200742 - DNA, 1620 bp, Artificial Sequence
  derived and/or modified sequence
atgggcaccgagggcccccccccccccgccgccagccggggccggcagggctgcttgctggtccccgcacggacaaaaacgactatcgccctcctatatgacgaggagagtgagaacgcatatgatatacggctgaaactaaccaaagaagtgctgaccattcagaagcaggacgtggtttgcgtcggagggtcacaccagggaaggaatcgaaggacagtcacactccgacgtcagccagttggcggtctgggcttgtccatcaagggcggttccgaacataacgtgcctgttgtaatatcaaagatattcgaagaccaggctgccgatcagactggcatgttgtttgtgggcgacgccgttctacaggttaacgggatccatgtggagaatgcgacccacgaggaggtggttcatcttctgaggaatgctggtgatgaagttacaatcacagtcgaatatctacgagaggctccagccttcctcaagttaccactgggttcccctggaccatcgagcgatcacagtagcggggcctctagtcccctatttgacagtgggctccacctgaatgggaattcctcgaccacagcgccatcgtccccaagcagccccatagcaaaagatcccaggtacgaaaagcggtggctcgacacgctaagcgtgcctctgtccatggcccggataagtaggtacaaggcggggactgagaagctcagatggaatgcttttgaggtcctggccttggatggcgtgtctagtggcatcctgaggttttatacagcccaagatggtaccgactggctacgggcagtgtctgctaacattagagagctgaccctgcaaaatatgaagatggcgaacaaatgctgcagccctagcgaccaggttgtgcacatggggtgggtgaacgaaaaactccaaggggcagactcttctcagacgttccgccctaagtttctggctctgaagggcccaagtttctacgttttttcaacacctccagtgagcaccttcgactgggtccgcgcggaacgaacttatcatctctgcgaggtcctgttcaaggtccacaagttctggttgacggaagactgctggctgcaagccaatctctaccttggcctccaggattttgattttgaggatcagaggccatactgcttcagcatagttgcaggccacgggaagtctcacgtgtttaatgtggagctgggcagcgagcttgcgatgtgggagaagagcttccagcgggccacgttcatggaggtgcagcgaaccggctctcgcacttacatgtgctcctggcaaggggagatgctgtgcttcactgtcgattttgctctggggttcacttgcttcgaaagtaaaacgaagaatgtcctgtggaggtttaaattcagtcagctaaaaggtagcagcgatgacggcaagacgagggtgaaactgttgttccagaatttagacactaagcagatcgaaacaaaagagctggagtttcaagacttaagggcagtcctgcactgcatacattcgttcatcgcagcaaaagtggcatccgtagaccccgggttcatggactctcaaagcctggccagaaagtatatgtactcctcatag

SEQ ID NO: 200743 - DNA, 1620 bp, Artificial Sequence
  derived and/or modified sequence
atggggaccgagggacctcctcctcctgccgctagccggggacgccagggctgtctgctagtccctgctcgaactaagaccacgattgcgttactgtatgatgaagagtctgagaatgcctatgacattagactgaaactcaccaaggaggtattgactattcaaaagcaggacgtggtctgtgttggaggttcacaccaaggcaggaaccgtcgtactgtgactcttcgaaggcagccagtgggtggtctgggcttgtctattaaagggggtagcgagcataacgtccctgtggttatttccaagattttcgaagatcaagcagccgatcagactgggatgctgttcgtgggtgacgcggttctccaggtcaacggcatacacgtggagaacgccacccacgaagaggtggtccatctgctgcgaaacgctggcgatgaggtaaccattactgtggagtatctgagggaagcccctgccttccttaagttaccacttggaagcccaggcccatccagcgatcattcctcaggagcaagctctcccttatttgattccggccttcatcttaatggaaattcatccacaaccgcaccctcaagcccctcatcaccaattgcaaaagatccaagatacgagaaacggtggttagacacactgtccgtgccgctgtccatggcccgaatctctagatacaaggctggcaccgaaaaactgcggtggaatgcatttgaagtactggccctcgacggggtgtcctccgggatcctccggttttacaccgctcaggatgggaccgattggttgcgagctgtgagcgcaaacataagagaactaactctgcagaacatgaagatggccaacaaatgctgttccccctccgatcaggttgtgcatatggggtgggtgaacgagaagctgcagggcgctgattcatctcagacttttagaccaaaatttctcgctctgaaaggcccatcgttctacgtgttctcaacgcctcccgtgtctactttcgactgggtgcgcgctgaacggacttatcatctatgtgaggtcctgtttaaggtgcacaaattctggcttacggaggattgttggctgcaggctaacctgtatttaggcctgcaggattttgatttcgaagaccagaggccgtattgcttctcaatcgtggccggacatgggaagtctcacgttttcaacgtggagctcggctccgagctggccatgtgggagaagagtttccaacgagcaacatttatggaggtgcaacggaccggttcaagaacctacatgtgctcttggcagggagagatgttgtgcttcacagtggattttgccttgggcttcacctgtttcgagtccaagactaagaatgtgctctggaggttcaagttctctcagctgaagggatcctccgatgacggaaaaacccgcgtgaagctgttgttccagaacttggacaccaagcaaatcgagaccaaggaactagagttccaggatctgagagccgttctgcattgtatccactcctttatagctgcgaaagtagcttccgtggatcctggttttatggactcacaatcactcgcgagaaagtacatgtatagctcgtag

SEQ ID NO: 200744 - DNA, 1888 bp, Artificial Sequence
  derived and/or modified sequence
gcccgagccggagccggcagaggggcgcgggcgcggacgcggcgcctggcggggccctgggaggctcggacggggtcctggcgttgagctcggccggcccggagcgcggacccagccgcaggggcggcgatgggcaccgagggacccccgcccccggccgcctcccgcggacgccagggctgcctgctggtacctgcgcggacgaaaaccactattgctctgttgtatgatgaagagtccgaaaatgcctatgacatccggctgaagctgacgaaagaggtgctgacaattcagaaacaagatgttgtctgtgtgggcggaagccaccagggcaggaatcgcagaactgttacactccgcagacagccagttggcggcttgggcctgagtataaagggaggttctgagcacaacgtccctgtcgtcatatcaaaaatattcgaagaccaagcagctgaccagacagggatgttgttcgtaggagatgctgttctccaggttaatggcatacatgtagaaaatgcaactcatgaagaagtggtgcatctgctgagaaatgctggcgatgaagttaccatcaccgttgagtatctcagggaagcgccggcatttctgaagctcccgttagggtccccagggccatccagcgaccacagcagtggggcctcctctcccctctttgacagcggtttgcatctgaacggaaactccagtaccacagccccatcgtcaccttcctcgcccatagctaaggacccgaggtatgagaagcgctggctggacaccttgtccgtgcctctgtccatggctcgcatctcaaggtacaaagccggaacggaaaaattaaggtggaatgcgttcgaggtgctcgccctggacggagtcagctctgggatcctccggttttacacagcccaggatggcaccgactggctgcgggcggtctcagccaacatcagggagctgacacttcagaacatgaagatggcgaacaaatgctgctctccttccgaccaggttgtgcatatggggtgggtaaatgagaaactccaaggagctgactcctctcaaaccttcagacccaagttcctagcactgaagggcccgtccttctacgttttcagcactcctccggtgagcacattcgattgggtgcgagcagaaaggacctatcacctctgtgaggtgctatttaaagttcacaagttctggctcacagaggactgctggttgcaagcaaacttgtatctgggtcttcaagattttgactttgaggaccagaggccctattgcttcagcatcgtggccggccatgggaagagccatgttttcaacgtggagcttggcagcgagctggccatgtgggagaagtccttccaaagagccacgttcatggaagttcagagaaccgggtccagaacatacatgtgcagctggcaaggagagatgctgtgtttcacggtggatttcgcgttgggatttacctgttttgagagtaagaccaagaatgtgctctggagatttaaattttcccagcttaagggatcttcagatgatgggaaaactcgagtaaagctgctgtttcagaatctggacaccaaacagattgagacgaaggaactcgagttccaggacctgagggctgtcctgcactgcatccactccttcatagcagccaaggtggcctccgtggaccccggcttcatggacagtcagagtcttgccagaaaatacatgtacagcagctaaaggttgtttctgttgagtgctgaaaaattaaattattttcgtaagaaatgattctttcctgcagaatattgcaactttgtgttgttttatgatgagcctatagttgtgataccaataaaacatgtcactagtttccaaa

SEQ ID NO: 200745 - protein, 358 aa, Artificial Sequence
  derived and/or modified sequence
MAERQEEQRGSPPLRAEGKADAEVKLILYHWTHSFSSQKVRLVIAEKALKCEEHDVSLPLSEHNEPWFMRLNSTGEVPVLIHGENIICEATQIIDYLEQTFLDERTPRLMPDKESMYYPRVQHYRELLDSLPMDAYTHGCILHPELTVDSMIPAYATTRIRSQIGNTESELKKLAEENPDLQEAYIAKQKRLKSKLLDHDNVKYLKKILDELEKVLDQVETELQRRNEETPEEGQQPWLCGESFTLADVSLAVTLHRLKFLGFARRNWGNGKRPNLETYYERVLKRKTFNKVLGHVNNILISAVLPTAFRVAKKRAPKVLGTTLVVGLLAGVGYFAFMLFRKRLGSMILAFRPRPNYF

SEQ ID NO: 200746 - protein, 290 aa, Artificial Sequence
  derived and/or modified sequence
MRLNSTGEVPVLIHGENIICEATQIIDYLEQTFLDERTPRLMPDKESMYYPRVQHYRELLDSLPMDAYTHGCILHPELTVDSMIPAYATTRIRSQIGNTESELKKLAEENPDLQEAYIAKQKRLKSKLLDHDNVKYLKKILDELEKVLDQVETELQRRNEETPEEGQQPWLCGESFTLADVSLAVTLHRLKFLGFARRNWGNGKRPNLETYYERVLKRKTFNKVLGHVNNILISAVLPTAFRVAKKRAPKVLGTTLVVGLLAGVGYFAFMLFRKRLGSMILAFRPRPNYF

SEQ ID NO: 200747 - DNA, 1077 bp, Artificial Sequence
  derived and/or modified sequence
atggccgagagacaggaggagcagagaggcagcccccccctgagagccgagggcaaggccgacgccgaggtgaagctgatcctgtaccactggacccacagcttcagcagccagaaggtgagactggtgatcgccgagaaggccctgaagtgcgaggagcacgacgtgagcctgcccctgagcgagcacaacgagccctggttcatgagactgaacagcaccggcgaggtgcccgtgctgatccacggcgagaacatcatctgcgaggccacccagatcatcgactacctggagcagaccttcctggacgagagaacccccagactgatgcccgacaaggagagcatgtactaccccagagtgcagcactacagagagctgctggacagcctgcccatggacgcctacacccacggctgcatcctgcaccccgagctgaccgtggacagcatgatccccgcctacgccaccaccagaatcagaagccagatcggcaacaccgagagcgagctgaagaagctggccgaggagaaccccgacctgcaggaggcctacatcgccaagcagaagagactgaagagcaagctgctggaccacgacaacgtgaagtacctgaagaagatcctggacgagctggagaaggtgctggaccaggtggagaccgagctgcagagaagaaacgaggagacccccgaggagggccagcagccctggctgtgcggcgagagcttcaccctggccgacgtgagcctggccgtgaccctgcacagactgaagttcctgggcttcgccagaagaaactggggcaacggcaagagacccaacctggagacctactacgagagagtgctgaagagaaagaccttcaacaaggtgctgggccacgtgaacaacatcctgatcagcgccgtgctgcccaccgccttcagagtggccaagaagagagcccccaaggtgctgggcaccaccctggtggtgggcctgctggccggcgtgggctacttcgccttcatgctgttcagaaagagactgggcagcatgatcctggccttcagacccagacccaactacttctag

SEQ ID NO: 200748 - DNA, 1077 bp, Artificial Sequence
  derived and/or modified sequence
atggccgagaggcaggaggaacagcgcgggagcccccccctccgtgcagaggggaaagctgatgccgaggtcaaactgattctctaccactggacacacagtttttcctcccagaaggtcagacttgtgatagctgagaaggcgttaaaatgtgaggaacatgacgtatctctccccttatccgagcacaatgaaccgtggttcatgcgtttgaattccacaggagaagtgccagttctgatccacggcgagaatatcatttgtgaggcaacccaaatcatagattacctagaacagacctttctcgacgagcggaccccccggttgatgccggacaaggaatcaatgtactaccccagggtgcagcattatagagaactgctggactctttgcctatggacgcatacacccacggatgtatccttcatcccgagctgaccgtggattctatgattcccgcctacgctactacacggattaggtcccagattgggaacaccgaatctgaactaaagaagctcgccgaggagaaccctgacctgcaggaagcgtatatcgccaagcaaaaacgcctaaagagtaagctgttggatcatgataacgtgaaatatctgaaaaagatacttgacgaactggagaaagtcttggaccaggtcgagactgaactgcagcgcaggaatgaagaaacacctgaggaaggccagcagccatggctgtgtggggaaagctttactttggcagatgtgagcctggccgtgactctgcataggctgaaattcctggggttcgctcggcggaattggggaaacgggaagagacccaacctggaaacctattacgaaagggtcctcaagcgcaaaacatttaataaggtgttaggacacgtcaataacatactcatctctgcagtgctcccaactgcttttcgcgtggctaagaagcgagcccctaaagtcctgggcactacattggtagtcgggttgctggcgggagtcgggtactttgccttcatgttgtttcgaaagcgactcggttcaatgattctcgcattcaggccgaggccaaattacttttag

SEQ ID NO: 200749 - DNA, 1077 bp, Artificial Sequence
  derived and/or modified sequence
atggccgagcggcaggaggagcagaggggcagcccccccctgcgggcagagggcaaggcagatgctgaggtgaagctgatcctgtaccactggacccacagcttcagcagccagaaggtgcggctggtgattgctgagaaggccctgaagtgtgaggagcatgatgtgtccctgcccctgtctgagcacaatgagccctggttcatgaggctgaacagcactggagaggtgcctgtgctgatccacggggagaacatcatctgtgaggccacccagatcatcgactacctggagcagaccttcctggatgagaggaccccccggctgatgccagacaaggagagcatgtactacccccgggtgcagcactaccgggagctgctggacagcctgcccatggatgcctacacccacggctgcatcctgcaccctgagctgactgtggacagcatgatcccagcctatgccaccacccgcatccgcagccagatcggcaacacagaaagtgagctgaagaagctggccgaggagaacccagacctgcaggaggcctacatcgccaagcagaagaggctgaagagcaagctgctggaccatgacaacgtgaagtacctgaagaagatcctggatgagctggagaaggtgctggaccaggtggagacagagctgcagaggagaaatgaggagaccccagaggagggccagcagccctggctgtgtggggagagcttcaccctggctgatgtgtccctggccgtgaccctgcaccggctgaagttcctgggctttgcccggaggaactggggcaatggcaagaggcccaacctggagacctactatgaaagagtgctgaagaggaagaccttcaacaaggtgctgggccacgtgaacaacatcctgatctctgctgtgctgcccacagccttccgggtggccaagaagagggcccccaaggtgctgggcaccaccctggtggtgggcctgctggccggcgtgggctactttgccttcatgctgttcaggaagaggctgggctccatgatcctggccttccggccccggcccaactacttctag

SEQ ID NO: 200750 - DNA, 1077 bp, Artificial Sequence
  derived and/or modified sequence
atggccgagcggcaggaggagcagcggggcagcccccccctgcgggccgagggaaaagctgatgccgaagttaaactgatcctttatcactggacacatagcttttctagtcagaaagttcgtctggtgatcgccgagaaagccctgaaatgtgaggagcatgatgtatcgctgcccctttccgaacataatgagccctggtttatgagactgaattcgacaggcgaagtgccagttctaattcatggtgagaacatcatctgcgaggcaacccagatcatcgactacctggagcagacttttctggacgagcgcactccacgccttatgcccgataaagaatccatgtactacccccgagttcagcactaccgggagctgttagattcactgcccatggatgcgtatacgcacggatgtatcttgcacccagaactgactgtggattctatgattccagcctacgccaccaccagaattaggtcgcaaatcggaaacacggaatctgagctgaaaaaactcgctgaggagaaccctgacctgcaggaagcttatatcgcaaagcaaaaaagactcaagtctaagttgctcgatcacgacaacgtgaaataccttaagaagatcctcgatgaactagagaaagttcttgaccaggtcgaaaccgaactacagcggcgcaacgaggaaactccagaagagggacaacagccctggttatgtggcgagagtttcactctcgctgatgttagcttagccgttacactgcatcgcttgaagtttctggggttcgctcgtagaaattggggcaatggcaaaagacccaatctcgaaacctattacgagcgagttctcaaaagaaaaacatttaataaggtcctcggacacgtgaacaatatcctgatctccgctgtgcttcccacggcctttcgggtagctaagaagagggcccccaaagtccttggaacaaccctcgttgtgggtctgctggccggcgtcgggtatttcgctttcatgctctttaggaaacggctcggttcaatgattctcgcattcaggcccagacccaattacttttag

SEQ ID NO: 200751 - DNA, 1077 bp, Artificial Sequence
  derived and/or modified sequence
atggccgagagacaggaagaacagcgaggctctccccctttgagagccgaaggaaaggccgacgcagaagtgaaacttattttgtaccattggacacattccttttcatctcagaaggtgagactggttatcgcggaaaaggcactgaagtgcgaggaacacgacgtctccctgccgttgtcagaacataatgagccgtggttcatgagactcaattctactggggaggtgcctgttctgatccacggagagaatattatctgtgaggcaacccagatcatcgactatctggagcagacgttcctcgatgaacgtacacctagactgatgccagacaaagagagcatgtactaccctagagtgcagcactacagagaattattggattcattgcctatggacgcttacacccacggttgcatattgcacccggaactcacggtggatagtatgatacccgcttacgcaacgacacggatccgtagccagattggtaatactgagagcgagctcaaaaagttggcggaggagaatcctgaccttcaagaggcttacatagccaaacagaagaggttgaagagtaaactgctcgatcatgataacgtgaagtacctcaaaaaaatcttggacgaactggagaaggtcctcgatcaggtagaaaccgaactacagaggcgcaatgaggaaaccccagaggaggggcaacagccgtggctgtgcggggagtctttcacactggcagacgtttcactggctgtaacactccaccgtctgaaattccttggctttgccaggaggaactggggtaatggtaagaggcctaatctcgaaacatactacgaacgcgtcctgaagagaaagacattcaacaaagtgctaggccacgtgaacaatatcttgattagtgcagtgcttcccaccgcgtttcgcgtcgctaagaagcgggctccgaaggtgctaggtacgaccttagtggtgggcctgttggctggcgtcggatactttgcatttatgcttttcagaaaaaggctgggatccatgatcttggccttcagaccccgacctaattatttttag

SEQ ID NO: 200752 - DNA, 3666 bp, Artificial Sequence
  derived and/or modified sequence
ggaaacgccttgcggggcagtgtgggagggagaagtccagggcggacaggctgggcgcacccgtgctcgcgcaccccaagatggctgagaggcaggaagagcagagagggagcccgcccttgagggcggaaggcaaggccgacgcggaggttaagctcattctgtaccattggacgcattcgttcagctctcaaaaggtgcgcttggtaattgctgaaaaggcattgaagtgcgaggaacatgatgtaagtctgcccttgagtgagcacaatgagccttggtttatgcgtttgaactcaactggagaagtgcctgtccttatccacggggaaaacataatttgtgaggccactcagatcattgattatcttgaacagactttcctggatgaaagaacacccaggttaatgcctgataaagaaagcatgtattacccacgggtacaacattaccgagagctgcttgactccttgccaatggatgcctatacacatggctgcattttacatcctgagttaactgtggactccatgatcccggcttatgcaactacaaggattcgtagccaaattggaaacacagagtctgagctgaagaaacttgctgaagaaaacccagatttacaagaagcatacattgcaaaacagaaacgacttaaatcaaagctgcttgatcatgacaatgtcaagtatttgaagaaaattcttgatgagttggagaaagtcttggatcaggttgaaactgaattgcaaagaagaaatgaagaaaccccagaagagggccagcaaccttggctctgcggtgaatccttcaccctggcagacgtctcactcgctgtcacattgcatcgactgaagttcctggggtttgcaaggagaaactggggaaacggaaagcgaccaaacttggaaacctattacgagcgtgtcttgaagagaaaaacatttaacaaggttttaggacatgtcaacaatatattaatctctgcagtgctgccaacagcattccgggtggccaagaaaagggccccaaaagttcttggcacgacccttgtggttggtttgcttgcaggagtgggatattttgcttttatgcttttcagaaagaggcttggcagcatgatattagcatttagacccagaccaaattatttctaggtttgttgggatcttgtcgtggcagctcatccaagcatttagctagaccctgtgattgcccgtggctctctgagtctgtcttattgagtagttagcagtattttttcctaaaattcagaagtcatctttgttacacaacacaggggttcaggtagcaataggacacaaaattgctttattctacaactgccagctccaggcagaaataggaaggcaaagagataagagaaggaaaaatgagagaatgaagtctgtatagggtagagcaatagaaagtaagcttcgggtgcctccaacgttcatggctgcctgtctcattggtaaacctcacatttagttacttgtggctactgcccacacatacacttctgtaattgagaactcttaggagaggactagggaatcactggggatagtgggctggagagaaccccaggctttatatgtatactttgacctcagtgttaattttaaatgcttatgaatcacacacattgctttagtaagattaagtgcttatatactagaaatttgatgctcattggaacacatctgcctagcatttctgtaaaagtcttaagtgatattaagatgattccttaccatttcagatggtccgcaatttgaattaccaagtggtaatggttccttactgttttagatggtgcctgtgagataccattcctctggatggtcatgtccagtcagtgggaggtagaaagggtggcatctgtagccctcttcatacacataagtggcatttaggtgaatgtcccagctaatcactagcatgtctaggtattggctgggtagtgggtattttgatgatctgggagcaccaaatatgttcattcttcgtttggggaggctggtctgtaaacacaaaaattgttgtccagatctttcatctgtttatgatcatcaacaaagacttgttagaaaggtctagtcttagcacttggcagttaatctagggaagatgaattaaatgggtagatagtgatgcatacctgtattcactgatgtatgtttaagggatttgggggggatacctcagttcatgtggaagggacagtctcggtgtgtcccatgaataaccttggaactgcaacaaatggtttgtgctcagaaaaagtctttcatggtgacaggaagacagtttccctggagctggccatgaaggccttagaagccatttctggtgtctggtgggtagcaggcatagagatgatgtgccgaggtcccagtgaacaacagtagccaaagaatgtactaactttatcattaataggaaagtcatacctaggaaacaatgactttttgatggcaaaatgattttttaattctattttgatgctgtaattccatttcatgacctagttgtattagaaaaccttgatgaactatatgttcccgatttacaaaaaaattaataaaacctccagagtaaactcagtcaaacaataattgagtagcagcttttataacatttaaaatttgcacatgagtgtgttgtcatatggagtgtctgaatctgttgctgggacataccaatccatgtattcattagagccatagaagttattattcattagttcatagtgtttgagttctttatgtcactctgttagaaacaagaactgagtcgtgaagaaataagaattggatttttataaaaacctctgaaggatatttacctatgaaaaagttgttaagaataaaaattagaagtccatggttaacttttccttcaatttatattattcctgaatcatagggaatctttctagaatgtgtttataatttccttgtacagtttctttggaaatacgttaaagatagtggcaatttcatatatttcatggatacttgagtttgtgcttttaaggtgtttgtttagggatacaatgaccactagatgtcgctgtttatccagtagactaagattgagtgttctttttgttcagcaactcttctaaaatgtttcaagcaaagatagtaatgacctcagtttctgaaataagggcatcttcatcagattattcttctgttttaaaaaaaagcttgaggcaaatgtgagtgatttccagtgctttgaaagggattacagtatcacacaatgtcaagctagagttaaacacagtattagctaaataggcacttatgtgtattttctttttcatgattatcggtgactggtcagtgtactcatcaatttccaaaatttgtataaatatcacaattagaaaaatgcctgaggtactaaagttatgttggctttttgtgtcttaacacacataaatactattgttattgcagcagatgccttttgaatccattttccataattgcggatagtcataaattgcttgctcaatttttagtaattattgctgttgacaccagcgttgtagatttttggtgttgttgaatgcagtagagagaccaagacactattctgtaagatcaataaaagtaattggaaaataaatatgaaccctaaaacaaa

SEQ ID NO: 200753 - DNA, 1228 bp, Artificial Sequence
  derived and/or modified sequence
ccagggcggacaggctgggcgcacccgtgctcgcgcaccccaagatggctgagaggcattgaagtgcgaggaacatgatgtaagtctgcccttgagtgagcacaatgagccttggtttatgcgtttgaactcaactggagaagtgcctgtccttatccacggggaaaacataatttgtgaggccactcagatcattgattatcttgaacagactttcctggatgaaagaacacccaggttaatgcctgataaagaaagcatgtattacccacgggtacaacattaccgagagctgcttgactccttgccaatggatgcctatacacatggctgcattttacatcctgagttaactgtggactccatgatcccggcttatgcaactacaaggattcgtagccaaattggaaacacagagtctgagctgaagaaacttgctgaagaaaacccagatttacaagaagcatacattgcaaaacagaaacgacttaaatcaaagctgcttgatcatgacaatgtcaagtatttgaagaaaattcttgatgagttggagaaagtcttggatcaggttgaaactgaattgcaaagaagaaatgaagaaaccccagaagagggccagcaaccttggctctgcggtgaatccttcaccctggcagacgtctcactcgctgtcacattgcatcgactgaagttcctggggtttgcaaggagaaactggggaaacggaaagcgaccaaacttggaaacctattacgagcgtgtcttgaagagaaaaacatttaacaaggttttaggacatgtcaacaatatattaatctctgcagtgctgccaacagcattccgggtggccaagaaaagggccccaaaagttcttggcacgacccttgtggttggtttgcttgcaggagtgggatattttgcttttatgcttttcagaaagaggcttggcagcatgatattagcatttagacccagaccaaattatttctaggtttgttgggatcttgtcgtggcagctcatccaagcatttagctagaccctgtgattgcccgtggctctctgagtctgtcttattgagtagttagcagtattttttcctaaaattcagaagtcatctttgttacacaacacaggggttcaggtagcaataggacacaaaattgctttattctacaactgccagctccaggcagaaataggaaggcaaagagataagagaaggaaaaa

SEQ ID NO: 200754 - protein, 92 aa, Artificial Sequence
  derived and/or modified sequence
MTKLAQWLWGLAILGSTWVALTTGALGLELPLSCQEVLWPLPAYLLVSAGCYALGTVGYRVATFHDCEDAARELQSQIQEARADLARRGLRF

SEQ ID NO: 200755 - protein, 122 aa, Artificial Sequence
  derived and/or modified sequence
MLSVGGLRLSLVRFSFLLLRGALLPSLAVTMTKLAQWLWGLAILGSTWVALTTGALGLELPLSCQEVLWPLPAYLLVSAGCYALGTVGYRVATFHDCEDAARELQSQIQEARADLARRGLRF

SEQ ID NO: 200756 - DNA, 369 bp, Artificial Sequence
  derived and/or modified sequence
atgcttagtgtgggcggattacgactaagccttgtccggttctcgtttctcctgcttagaggcgctttattaccctctttagccgtcacaatgactaaattggcccagtggctttggggcctggctattctgggctctacgtgggtggccctgaccacaggcgctctcggattagagttgccactgagttgtcaagaggtgttatggccactgcctgcctatctgctggtatccgctggctgttatgcactgggcaccgtagggtatagggttgcgacttttcatgactgtgaggatgctgcgcgcgaattgcagagtcagatacaagaagctcgcgcggacctcgccagaaggggactgagattctag

SEQ ID NO: 200757 - DNA, 369 bp, Artificial Sequence
  derived and/or modified sequence
atgctgtctgtgggcggcctgcggctgagcctggtgcgcttctccttcctgctgctgcggggggccctgctgcccagcctggccgtgaccatgaccaagctggcccagtggctgtggggcctggccatcctgggcagcacctgggtggccctgaccactggagccctgggcctggagctgcccctgagctgccaggaggtgctgtggcccctgcctgcctacctgctggtgtctgctggctgctacgccctgggcaccgtgggctacagagtggccaccttccatgactgtgaagatgctgcccgggagctgcagagccagatccaggaggcccgggctgacctggcccggcggggcctgcgcttctag

SEQ ID NO: 200758 - DNA, 369 bp, Artificial Sequence
  derived and/or modified sequence
atgctgagcgtgggcggcctgcggctgagcctggtgcggttcagcttcctcttgctccgtggggcattgcttcctagccttgcagtgaccatgactaagttggcacagtggctgtggggactcgcaattcttggcagtacatgggtagcactcaccacaggcgccctgggtctcgagctgcccctctcctgccaggaggttctttggccattgcctgcctacctcttagtttccgccggctgctatgcacttggcactgttggatatcgagtggccacttttcacgactgtgaggacgccgcacgagagctgcaatcacagatacaggaagccagagctgacctggcccgtcggggcctccggttctag

SEQ ID NO: 200759 - DNA, 369 bp, Artificial Sequence
  derived and/or modified sequence
atgctgagtgttggagggctccgcttgagtttagtccgattctcattcctcttgctgagaggggctctactgccatcacttgccgttaccatgaccaaactggcgcagtggctctggggtctggccattctgggctctacatgggtggccctcactactggggctctggggttggaactacctctgagctgccaggaggtcctgtggcctttgcccgcatacctcctggtgtcagcgggatgttatgctctgggcaccgtggggtaccgggtagcaacttttcacgattgtgaagacgccgcaagggaactgcaatcccagattcaggaggcccgagccgatctagctcgcaggggccttcgattctag

SEQ ID NO: 200760 - DNA, 369 bp, Artificial Sequence
  derived and/or modified sequence
atgctgagcgtgggcggcctgagactgagcctggtgagattcagcttcctgctgctgagaggcgccctgctgcccagcctggccgtgaccatgaccaagctggcccagtggctgtggggcctggccatcctgggcagcacctgggtggccctgaccaccggcgccctgggcctggagctgcccctgagctgccaggaggtgctgtggcccctgcccgcctacctgctggtgagcgccggctgctacgccctgggcaccgtgggctacagagtggccaccttccacgactgcgaggacgccgccagagagctgcagagccagatccaggaggccagagccgacctggccagaagaggcctgagattctag

SEQ ID NO: 200761 - DNA, 486 bp, Artificial Sequence
  derived and/or modified sequence
gaactacaactcccagaaggccgcgcggaagcggaacgtgaaccagggaggacttccggacgccaacatccgggccgcgcggggaaggggagacgtggggtagaggggagcattgcttccttctctcgcagtgaccatgacgaaattagcgcagtggctttggggactagcgatcctgggctccacctgggtggccctgaccacgggagccttgggcctggagctgcccttgtcctgccaggaagtcctgtggccactgcccgcctacttgctggtgtccgccggctgctatgccctgggcactgtgggctatcgtgtggccacttttcatgactgcgaggacgccgcacgcgagctgcagagccagatacaggaggcccgagccgacttagcccgcagggggctgcgcttctgacagcctaaccccattcctgtgcggacagcccttcctcccatttcccattaaagagccagtttattttctaa

SEQ ID NO: 200762 - DNA, 517 bp, Artificial Sequence
  derived and/or modified sequence
ggcccttccaccttttgtgggcactcaagttcggacctctgggatcggcgattcccctctggccagggctggttttaatgctctccgtgggcgggcttcggttgagtttggtccgcttttcctttctgctcctcaggggagcattgcttccttctctcgcagtgaccatgacgaaattagcgcagtggctttggggactagcgatcctgggctccacctgggtggccctgaccacgggagccttgggcctggagctgcccttgtcctgccaggaagtcctgtggccactgcccgcctacttgctggtgtccgccggctgctatgccctgggcactgtgggctatcgtgtggccacttttcatgactgcgaggacgccgcacgcgagctgcagagccagatacaggaggcccgagccgacttagcccgcagggggctgcgcttctgacagcctaaccccattcctgtgcggacagcccttcctcccatttcccattaaagagccagtttattttctaa

SEQ ID NO: 200763 - DNA, 409 bp, Artificial Sequence
  derived and/or modified sequence
acttccggacgccaacatccgggccgcgcggggaaggggagacgtggggtagagtgaccatgacgaaattagcgcagtggctttggggactagcgatcctgggctccacctgggtggccctgaccacgggagccttgggcctggagctgcccttgtcctgccaggaagtcctgtggccactgcccgcctacttgctggtgtccgccggctgctatgccctgggcactgtgggctatcgtgtggccacttttcatgactgcgaggacgccgcacgcgagctgcagagccagatacaggaggcccgagccgacttagcccgcagggggctgcgcttctgacagcctaaccccattcctgtgcggacagcccttcctcccatttcccattaaagagccagtttattttctaa

SEQ ID NO: 200764 - protein, 399 aa, Artificial Sequence
  derived and/or modified sequence
MAEAMDLGKDPNGPTHSSTLFVRDDGSSMSFYVRPSPAKRRLSTLILHGGGTVCRVQEPGAVLLAQPGEALAEASGDFISTQYILDCVERNERLELEAYRLGPASAADTGSEAKPGALAEGAAEPEPQRHAGRIAFTDADDVAILTYVKENARSPSSVTGNALWKAMEKSSLTQHSWQSLKDRYLKHLRGQEHKYLLGDAPVSPSSQKLKRKAEEDPEAADSGEPQNKRTPDLPEEEYVKEEIQENEEAVKKMLVEATREFEEVVVDESPPDFEIHITMCDDDPPTPEEDSETQPDEEEEEEEEKVSQPEVGAAIKIIRQLMEKFNLDLSTVTQAFLKNSGELEATSAFLASGQRADGYPIWSRQDDIDLQKDDEDTREALVKKFGAQNVARRIEFRKK

SEQ ID NO: 200765 - DNA, 1200 bp, Artificial Sequence
  derived and/or modified sequence
atggccgaggccatggacctgggcaaggaccccaacggccccacccacagcagcaccctgttcgtgagagacgacggcagcagcatgagcttctacgtgagacccagccccgccaagagaagactgagcaccctgatcctgcacggcggcggcaccgtgtgcagagtgcaggagcccggcgccgtgctgctggcccagcccggcgaggccctggccgaggccagcggcgacttcatcagcacccagtacatcctggactgcgtggagagaaacgagagactggagctggaggcctacagactgggccccgccagcgccgccgacaccggcagcgaggccaagcccggcgccctggccgagggcgccgccgagcccgagccccagagacacgccggcagaatcgccttcaccgacgccgacgacgtggccatcctgacctacgtgaaggagaacgccagaagccccagcagcgtgaccggcaacgccctgtggaaggccatggagaagagcagcctgacccagcacagctggcagagcctgaaggacagatacctgaagcacctgagaggccaggagcacaagtacctgctgggcgacgcccccgtgagccccagcagccagaagctgaagagaaaggccgaggaggaccccgaggccgccgacagcggcgagccccagaacaagagaacccccgacctgcccgaggaggagtacgtgaaggaggagatccaggagaacgaggaggccgtgaagaagatgctggtggaggccaccagagagttcgaggaggtggtggtggacgagagcccccccgacttcgagatccacatcaccatgtgcgacgacgacccccccacccccgaggaggacagcgagacccagcccgacgaggaggaggaggaggaggaggagaaggtgagccagcccgaggtgggcgccgccatcaagatcatcagacagctgatggagaagttcaacctggacctgagcaccgtgacccaggccttcctgaagaacagcggcgagctggaggccaccagcgccttcctggccagcggccagagagccgacggctaccccatctggagcagacaggacgacatcgacctgcagaaggacgacgaggacaccagagaggccctggtgaagaagttcggcgcccagaacgtggccagaagaatcgagttcagaaagaagtag

SEQ ID NO: 200766 - DNA, 1200 bp, Artificial Sequence
  derived and/or modified sequence
atggccgaagcaatggatctgggcaaagatccaaacggcccaactcactctagtactctctttgtcagagatgatggctcatctatgtccttctatgtgcgaccttccccagccaaacgccgcctctccaccctgattctgcacggcggcggaactgtgtgcagggtccaggaacctggggctgttctgctggcacagccgggggaggccctggccgaggcctctggcgactttatatcaacccagtacatccttgattgtgtggaaaggaatgaaaggctggagctggaggcttatagactggggccagccagcgctgccgacaccggatccgaggctaagcctggcgcactcgccgagggagccgccgagccggagccccagaggcacgcgggacgaatcgcgtttactgatgctgatgacgtggctattctaacttatgtcaaggagaatgcccggagtccctcaagcgtaactgggaatgctctatggaaagcaatggagaaatcttctttgacacagcactcatggcaaagcctgaaggataggtacctgaaacatctgcgggggcaagaacataagtatcttctcggggatgcacccgtgtccccgtcgagccaaaaattgaagcgcaaggctgaggaagaccctgaagctgcagattcgggcgagccccaaaacaaaagaacccccgacctgcccgaggaggagtacgtgaaggaggaaattcaggaaaatgaggaagcagtgaaaaagatgttggttgaggcaacgagagagttcgaggaagtagtagtggacgaatcccctccggacttcgagatacacatcaccatgtgcgatgacgacccacccacacctgaggaagacagcgaaactcagccagatgaagaagaagaggaggaggaagagaaggtgagtcagccagaggtgggggccgctatcaagatcatacggcagctgatggagaaattcaatctcgatctctccactgtgacccaagcatttttgaagaattctggggagttagaggcaaccagtgcttttctggcctcgggccagcgggctgatgggtacccaatctggtcacggcaggacgacattgatctacagaaggacgatgaagacacccgggaagctctggtcaaaaaatttggcgcccagaacgttgccaggcggattgagttccgaaaaaaatag

SEQ ID NO: 200767 - DNA, 1200 bp, Artificial Sequence
  derived and/or modified sequence
atggccgaggccatggacctgggcaaggaccccaacggccccacccacagcagcaccctgtttgtgagagatgatggcagctccatgtccttctacgtgcggcccagccctgccaagaggcggctgagcaccctcatcctgcacggcggcggcaccgtgtgccgggtgcaggagcctggagctgtgctgctggcccagcctggagaggccctggccgaggccagcggggacttcatcagcacccagtacatcctggactgtgtggagagaaatgaaaggctggagctggaggcctaccgcctgggccctgccagcgctgctgacaccggcagcgaggccaagccaggggccctggccgagggcgctgctgagcctgagccccagagacatgctggccgcatcgccttcacagatgctgatgatgtggccatcctgacctacgtgaaggaaaatgcccggagccccagctctgtgactggaaatgccctgtggaaggccatggagaagagcagcctgacccagcacagctggcagagcctgaaggaccgctacctgaagcacctgcggggccaggagcacaagtacctgctgggagatgcccctgtgagccccagcagccagaagctgaagaggaaggccgaggaggaccctgaggccgctgacagcggggagccccagaacaagaggaccccagacctgcctgaggaggagtatgtgaaggaggagatccaggagaatgaggaggccgtgaagaagatgctggtggaggccacccgggagtttgaggaggtggtggtggatgagagccccccagactttgagatccacatcaccatgtgtgatgatgacccccccaccccagaagaagattctgagacccagccagatgaggaggaggaggaggaggaggagaaggtgtcccagcctgaggtgggcgccgccatcaagatcatccggcagctgatggagaagttcaacctggacctgagcacagtgacccaggccttcctgaagaacagcggggagctggaggccaccagcgccttcctggccagcggccagagagcagatggctaccccatctggagccggcaggatgacatcgacctgcagaaggatgatgaggacacccgggaggccctggtgaagaagtttggagcccagaatgtggcccggcgcatcgagttcaggaagaagtag

SEQ ID NO: 200768 - DNA, 1200 bp, Artificial Sequence
  derived and/or modified sequence
atggccgaggccatggacctgggcaaggaccccaacggccccacccactcaagtaccctcttcgtccgcgacgacgggtctagcatgtccttctacgtcagaccatcgccagccaagagacgcctcagtactttgatacttcacgggggaggcacggtctgtagggtgcaggagccaggcgcggtgctgctggctcaaccgggagaagccttggcggaagcctcaggagactttatttccacccagtatatactggactgtgtagaacgaaatgagcgcttggaactggaggcttataggttagggcctgctagcgccgccgataccggatctgaggctaaacccggcgccctcgccgagggagctgccgagcccgaaccccagcggcatgcggggcggattgcctttacggatgccgacgacgtggccattcttacctatgtgaaggaaaatgctcgctcaccttcatctgtaaccggcaacgccctctggaaagccatggaaaaaagttccctgacccaacactcttggcaatcgctgaaagatcgttaccttaaacacctgcgcgggcaggaacacaagtacctgctcggggatgctcccgtaagtccgtcaagtcagaaactgaaacggaaggcggaggaggatcctgaggctgcggacagcggagagccacagaacaagcgcaccccggacctccccgaagaggagtacgttaaagaagagatacaagaaaatgaagaggccgtgaaaaaaatgcttgtcgaagcaacacgcgaattcgaagaggtcgtcgttgacgagtcgccaccagactttgagatacatattactatgtgcgacgacgaccctccaactccagaggaggacagtgagacgcagcctgatgaagaggaggaggaagaggaagaaaaggtgagtcagccagaagttggagcggcaataaagattattcggcagctcatggagaagttcaacctggaccttagcacagttacacaagcctttttgaagaattctggcgagctcgaagcgactagtgcctttctagccagtgggcagagggccgacggctatcctatttggagtcgtcaagacgacatcgatctccaaaaggacgacgaggatacccgggaagccctggtaaagaaatttggagcgcagaacgtagcaagacgcattgaattcaggaaaaagtag

SEQ ID NO: 200769 - DNA, 1200 bp, Artificial Sequence
  derived and/or modified sequence
atggcagaggccatggatctgggcaaagacccaaacggtcctacccacagcagtaccctttttgttcgagacgacggctcctcaatgtcattctacgttaggccatcccccgcaaagagaaggttaagcaccctcattttgcatgggggagggaccgtctgcagggtgcaggagccaggtgccgttttgcttgcccagccaggcgaggctctggccgaggcttccggagatttcatttctacgcaatacattctcgattgcgtggagcgaaatgaacgcttagaattggaggcgtacaggctgggtccagccagtgccgctgataccgggagcgaggccaaaccgggagctctagctgaaggggcagctgagccagaaccccagcggcacgccggacgcatcgccttcaccgacgccgacgacgtcgcgattttgacatatgttaaggagaacgctcggtcaccttcgtctgtcacgggcaatgcgctttggaaggccatggagaaatcgtctttgactcaacactcctggcagagcctgaaggacaggtatctgaagcacttgcggggtcaagaacataagtatctattaggggacgctccggtgtctccatcaagccaaaagttgaaacgcaaagctgaagaagaccccgaggcggctgacagcggcgagcctcagaataaaagaacaccagacctcccagaggaagagtacgtgaaagaagagatccaggaaaacgaagaggccgttaagaagatgttggtggaagctactcgcgaattcgaggaggtggtggtagacgagtcaccaccagacttcgaaatacatataacgatgtgtgatgatgacccacctacacctgaagaagattcagagacacagcccgacgaagaagaggaagaagaggaagagaaagtctcccagcccgaggtcggcgcagcaatcaaaataattcggcaactaatggaaaagtttaatctggatctctcgactgtaactcaggcgttccttaaaaactccggtgagctggaggcaacctcagcgtttctggcttccgggcagcgcgctgacggatatcctatatggtctcgtcaggacgacatcgacctgcagaaagacgatgaggacacccgggaagctttagtcaaaaagttcggggctcaaaacgtagcaagaagaatcgagttcaggaaaaaatag

SEQ ID NO: 200770 - DNA, 2175 bp, Artificial Sequence
  derived and/or modified sequence
actctcgatgcgccgcggctgctgctgcgcaggcccagtgctgcgcttcgcggcagaggcgtctgcggtgacagctcagtcagttgagctctgtgtgccaggcgctcgcgagggggtagctcttctagtagtgctcggcgtcagacatggcggaggcgatggatttgggcaaagaccccaacgggcccacccattcctcgactctgttcgtgagggacgacggcagctccatgtccttctacgtgcggcccagcccggccaagcgtcggctgtcgacgctcatcctgcacggcggcggcaccgtgtgccgagtgcaggagcccggggccgtgctgctggcccagcccggggaggcgctggccgaggcctcgggtgatttcatctccacgcagtacatcctggactgcgtggagcgcaacgagaggctggagctggaggcctatcggctgggccccgcctcggcggcggacaccggctcggaagcaaagcccggggccctggccgagggcgccgcggagccggagccgcagcggcacgccgggcggatcgccttcacggatgcggacgacgtagccatccttacctacgtgaaggaaaatgcccgctcgcccagctccgtcaccggtaacgccttgtggaaagcgatggagaagagctcgctcacgcagcactcgtggcagtccctgaaggaccgctacctcaagcacctgcggggccaggagcataagtacctgctgggggacgcgccggtgagcccctcctcccagaagctcaagcggaaggcggaggaggacccggaggccgcggatagcggggaaccacagaataagagaactccagatttgcctgaagaagagtatgtgaaggaagaaatccaggagaatgaagaagcagtcaaaaagatgcttgtggaagccacccgggagtttgaggaggttgtggtggatgagagccctcctgattttgaaatacatataactatgtgtgatgatgatccacccacacctgaggaagactcagaaacacagcctgatgaggaggaagaagaagaagaagaaaaagtttctcaaccagaggtgggagctgccattaagatcattcggcagttaatggagaagtttaacttggatctatcaacagttacacaggccttcctaaaaaatagtggtgagctggaggctacttccgccttcttagcgtctggtcagagagctgatggatatcccatttggtcccgacaagatgacatagatttgcaaaaagatgatgaggataccagagaggcattggtcaaaaaatttggtgctcagaatgtagctcggaggattgaatttcgaaagaaataattggcaagataatgagaaaagaaaaaagtcatggtaggtgaggtggttaaaaaaaattgtgaccaatgaactttagagagttcttgcattggaactggcacttattttctgaccatcgctgctgttgctctgtgagtcctagatttttgtagccaagcagagttgtagagggggataaaaagaaaagaaattggatgtatttacagctgtccttgaacaagtatcaatgtgtttatgaaaggaagatctaaatcagacaggagttggtctacatagtagtaatccattgttggaatggaacccttgctatagtagtgacaaagtgaaaggaaatttaggaggcataggccatttcaggcagcataagtaatctcctgtcctttggcagaagctcctttagattgggatagattccaaataaagaatctagaaataggagaagatttaattatgaggccttgaacacggattatccccaaacccttgtcatttcccccagtgagctctgatttctagactgctttgaaaatgctgtattcattttgctaacttagtatttgggtaccctgctctttggctgttctttttttggagcccttctcagtcaagtctgccggatgtctttctttacctacccctcagttttccttaaaacgcgcacacaactctagagagtgttaagaataatgttacttggttaatgtgttatttattgagtattgtttgtgctaagcattgtgttagatttaaaaaattagtggattgactccactttgttgtgttgttttcattgttgaaaataaatataactttgtattcgagtctcgtc

SEQ ID NO: 200771 - protein, 506 aa, Artificial Sequence
  derived and/or modified sequence
MKKAEMGRFSISPDEDSSSYSSNSDFNYSYPTKQAALKSHYADVDPENQNFLLESNLGKKKYETEFHPGTTSFGMSVFNLSNAIVGSGILGLSYAMANTGIALFIILLTFVSIFSLYSVHLLLKTANEGGSLLYEQLGYKAFGLVGKLAASGSITMQNIGAMSSYLFIVKYELPLVIQALTNIEDKTGLWYLNGNYLVLLVSLVVILPLSLFRNLGYLGYTSGLSLLCMVFFLIVVICKKFQVPCPVEAALIINETINTTLTQPTALVPALSHNVTENDSCRPHYFIFNSQTVYAVPILIFSFVCHPAVLPIYEELKDRSRRRMMNVSKISFFAMFLMYLLAALFGYLTFYEHVESELLHTYSSILGTDILLLIVRLAVLMAVTLTVPVVIFPIRSSVTHLLCASKDFSWWRHSLITVSILAFTNLLVIFVPTIRDIFGFIGASAASMLIFILPSAFYIKLVKKEPMKSVQKIGALFFLLSGVLVMTGSMALIVLDWVHNAPGGGH

SEQ ID NO: 200772 - DNA, 1521 bp, Artificial Sequence
  derived and/or modified sequence
atgaaaaaagctgagatgggaagattcagcatatcacctgacgaggattcctcgtcatattcaagcaattcagattttaattatagctatcctaccaagcaagctgcacttaagagccactatgcagacgtggatcctgagaatcagaacttcctgttggaaagtaacctgggcaaaaaaaagtacgagacagaatttcacccaggcaccacttcctttggtatgagtgtcttcaatctcagcaacgccatcgtcgggagcggcatactcgggttgtcttatgccatggccaatacaggcatcgctttatttattattttactgacctttgtttctattttttcattgtatagtgtgcatttgctcctaaaaacggccaatgaaggagggtctcttctgtatgaacagttgggatacaaagcctttgggctggtcggtaagctcgccgcctcgggctctattactatgcaaaacatcggcgccatgtcgagctatttgtttatcgtgaaatacgagttaccccttgttatccaggcgctcaccaacatcgaggataaaacagggctgtggtatctgaacgggaactatcttgttctcctggtgtctctggtcgttatactgcctctctctctgtttcgcaacttgggatacttgggttatacctccgggctgtccctcctgtgtatggtgttcttcctgatcgtggtgatctgtaagaagttccaggtgccctgtcctgtggaagcagcactgatcattaacgagaccatcaataccacccttacccagccgaccgccctggtccccgcactgagccacaacgtgactgagaatgacagttgccgaccgcactatttcatctttaactcacagaccgtgtatgctgtgccaatcctcatattttcctttgtatgtcatcctgcagtcctgcctatttacgaggaactcaaggaccgcagtaggaggaggatgatgaatgtctctaagatctccttcttcgcgatgttcctaatgtatttattggctgctctgtttggctacctgaccttctacgagcatgtggagagcgagttgctccatacgtacagctccatcctgggcactgacatactgctgcttatcgtcaggctagccgtgctgatggccgtgactctgactgtcccagtcgtgatctttcctatccggagttccgtcactcatttactgtgcgccagtaaggactttagttggtggaggcactcactgattactgtatccatccttgcgtttacaaatcttctggtcatcttcgtgcccaccatccgggacatttttggattcattggggcctctgctgcaagcatgttaatttttatcctgccctccgctttttatatcaagctggtcaagaaggagccaatgaaatccgtccagaaaatcggtgccctcttctttctcctctctggggttctggtgatgaccggctctatggccttgatcgtcctggattgggtccataacgcaccaggcgggggccattag

SEQ ID NO: 200773 - DNA, 1521 bp, Artificial Sequence
  derived and/or modified sequence
atgaagaaggccgagatgggccgcttcagcatcagcccagatgaggacagcagcagctacagcagcaacagcgacttcaactacagctaccccaccaagcaggccgccctgaagagccactatgcagatgtggaccctgagaaccagaacttcctgctggagagcaacctgggcaagaagaagtatgaaacagagttccaccctggcaccaccagctttggcatgtctgtgttcaacctgagcaatgccatcgtgggcagcggcatcctgggcctgtcctatgccatggccaacacaggaattgccctcttcatcatcctgctgacctttgtgtccatcttcagcctgtacagcgtgcacctgctgctgaagacagccaatgaaggaggcagcctgctgtatgagcagctgggctacaaggccttcggcctggtgggcaagctggccgccagcggcagcatcaccatgcagaacattggagccatgagcagctacctgttcatcgtgaagtatgagctgcccctggtgatccaggccctgaccaacatcgaggacaagacaggcctgtggtacctgaatggaaactacctggtgctgctggtgtccctggtggtgatcctgcccctgagcctcttcaggaacctgggctacctgggctacaccagcggcctgagcctgctgtgcatggtgttcttcctgattgtggtgatctgcaagaagttccaggtgccctgccctgtggaggccgccctgatcatcaatgagaccatcaacaccaccctgacccagcccacagccctggtgcctgccctgagccacaacgtgacagaaaatgacagctgccggccccactacttcatcttcaacagccagacagtgtatgctgtgcccatcctgatcttctcctttgtgtgccaccctgctgtgctgcccatctatgaggagctgaaggacaggagcagaagaaggatgatgaatgtgtccaagatctccttctttgccatgttcctgatgtacctgctggccgccctgtttggctacctgaccttctatgaacatgtggagagcgagctgctgcacacctacagcagcatcctgggcacagacatcctgctgctgattgtgcggctggccgtgctgatggctgtgaccctgactgtgcctgtggtgatcttccccatccgcagctctgtgacccacctgctgtgtgccagcaaggacttctcctggtggaggcacagcctcatcaccgtgtccatcctggccttcaccaacctgctggtgatctttgtgcccaccatccgggacatcttcggcttcatcggggccagcgctgcctccatgctgatcttcatcctgcccagcgccttctacatcaagctggtgaagaaggagcccatgaagtctgtgcagaagattggagccctcttcttcctgctgtctggagtgctggtgatgacaggctccatggccctgattgtgctggactgggtgcacaatgcccctgggggcggccactag

SEQ ID NO: 200774 - DNA, 1521 bp, Artificial Sequence
  derived and/or modified sequence
atgaagaaggccgagatgggccggttcagcatcagccccgacgaggactcctcaagctactcctcgaactcagactttaattatagctacccaaccaaacaggccgcgctcaagtctcactacgctgacgttgaccctgagaatcagaatttcttactggagtcaaatctcggaaagaagaaatacgaaaccgaattccaccctggtaccacctcttttggaatgtccgttttcaatctgtcaaacgccatcgtgggtagcggcatcctcgggttgtcctatgctatggccaacaccggcatcgctctgtttatcattcttctcaccttcgtctctatcttcagcctctactccgtgcacttgctgctcaagaccgctaatgagggtggcagtctcttgtacgagcaactcggctacaaagccttcggcctggtggggaagctggcggcatccggcagcatcactatgcagaatatcggcgcaatgtcttcttacctttttatagttaaatatgagttgccccttgtgatccaggcactcactaatatcgaagacaagacagggctctggtacctgaacggcaactatctggttttactagtgagcctggtggtaattctgccactgtcactgttcaggaatttgggatatctcggctacactagcgggttgagcctgctctgtatggtctttttcctgatcgtagtaatctgcaagaagtttcaagtgccctgccccgtcgaagctgccttgataatcaatgagaccattaatacgacactgacacagcctacagcgctcgtgcccgccttatctcacaacgtgacggaaaacgattcctgtcgcccccactacttcatcttcaacagtcagacagtgtatgcggtgcccatacttatcttttccttcgtctgtcaccctgccgtcctgcccatttacgaggagctcaaagacagatctcgtagacgtatgatgaacgtgagtaagataagctttttcgccatgtttctcatgtatttacttgccgccttgttcggttatcttacattctatgagcatgtggaaagcgaactgttgcacacgtactcaagcattctcgggactgacatcctgctgcttatagtgcggctggctgtgcttatggccgtaaccctgacagtgcccgttgtcatttttcccataagaagttctgtgacgcatctgttatgtgcctctaaggattttagctggtggagacactctttgattaccgtgagtattcttgcctttactaacctcttggtaatctttgtgccaacgattcgagatatatttggtttcatcggcgctagtgccgcctctatgctgatctttattcttcctagcgccttctatatcaaattagtaaaaaaggagcccatgaaaagcgtccaaaaaattggcgcccttttctttcttctctccggagttctcgtgatgaccgggagcatggcactgatcgtgctggactgggtacacaacgcccccggcggcggccattag

SEQ ID NO: 200775 - DNA, 1521 bp, Artificial Sequence
  derived and/or modified sequence
atgaagaaagctgaaatgggcaggtttagcatcagccccgatgaagatagctccagttactcatcaaactctgatttcaattactcttatcccaccaaacaggccgctctgaagagccactacgcagatgtggaccccgagaatcaaaattttctgctggagtctaacctcggtaaaaaaaagtacgagaccgaattccatccagggactactagcttcgggatgtcagtgttcaacctgtctaacgccatcgtgggctccggcattttgggattgtcttatgcaatggctaataccggcatagcactctttatcattctgctgaccttcgtgtcgattttctcactgtatagtgtccacctattactgaagaccgccaacgaaggagggtcactgctctacgagcagctcggctacaaggcgttcggcttagtggggaaactcgctgctagtgggtccatcaccatgcagaacatcggagccatgtcttcttacctgtttattgtgaaatatgagctgcccttagtcatccaagccctcaccaacatagaggacaaaacaggcctatggtaccttaacggcaactacctggtgctgcttgtgagccttgtcgtaattcttcctctgagtctcttccgtaacctaggctacctggggtacacaagcggattgagcttgctgtgtatggtgttttttctcattgtggttatctgtaagaaatttcaagtgccgtgtcccgtagaggccgcactcattatcaatgaaaccatcaatactaccctcacgcaacctactgccctggttcccgctctgtcccataacgttacagagaacgactcttgtcgtccacactatttcattttcaactcccagacagtttatgccgtgcctattctgatcttcagcttcgtgtgtcatcccgctgttctgccaatatatgaggagctcaaggaccggtcccgtcgcagaatgatgaatgtgtctaagatttcgttcttcgctatgtttctgatgtacctgttggcggctctattcggttacctgaccttttatgaacacgtcgaatccgagctcctccatacatacagcagcatcctcggcacagacatcttgctcctgatcgttagactcgcggtcctgatggccgtgaccctgaccgtgcccgtcgtcatctttcctattcgctcctctgtgacccacttgctgtgtgcttcgaaagatttctcttggtggcgacactcattgatcactgtgtctatccttgcattcaccaacctgctcgtgatattcgtgccaactatcagggacatttttggctttatcggcgctagtgctgcctccatgctgatcttcattctgccatccgcgttttacattaaactggtgaaaaaagagcccatgaaatctgtccagaaaatcggggcactgttcttcctgctgagtggcgttctagtcatgacggggagtatggccctgattgtcctggattgggtgcacaacgcaccgggagggggtcattag

SEQ ID NO: 200776 - DNA, 4888 bp, Artificial Sequence
  derived and/or modified sequence
gatacacaaagagaaggcgcccgggcggccgcggtcccgcccactgacgcgtccccggggtgccgctataacccgccgctcgcagggctgctccacagccgcgcgacgccgccgccttagaacgcctttccagtactgctagcagcagcccgaccacgcgttaccgcacgctcgcgcctttcccttgacacggcggacgccggaggattggggcggcaatttgtcttttccttttttattaaaattatttttcctgcctgttgttggatttggggaaattttttgtttgttttttatgatttgtatttgactgagagaaacccactgaagacgtctgcgtgagaatagagaccaccgaggccgactcgcgggccgctgcacccaccgccaaggacaaaaggagcccagcgctactagctgcacccgattcctcccagtgcttagcatgaagaaggccgaaatgggacgattcagtatttccccggatgaagacagcagcagctacagttccaacagcgacttcaactactcctaccccaccaagcaagctgctctgaaaagccattatgcagatgtagatcctgaaaaccagaactttttacttgaatcgaatttggggaagaagaagtatgaaacagaatttcatccaggtactacttcctttggaatgtcagtatttaatctgagcaatgcgattgtgggcagtggaatccttgggctttcttatgccatggctaatactggaattgctctttttataattctcttgacatttgtgtcaatattttccctgtattctgttcatctccttttgaagactgccaatgaaggagggtctttattatatgaacaattgggatataaggcatttggattagttggaaagcttgcagcatctggatcaattacaatgcagaacattggagctatgtcaagctacctcttcatagtgaaatatgagttgcctttggtgatccaggcattaacgaacattgaagataaaactggattgtggtatctgaacgggaactatttggttctgttggtgtcattggtggtcattcttcctttgtcgctgtttagaaatttaggatatttgggatataccagtggcctttccttgttgtgtatggtgttctttctgattgtggtcatttgcaagaaatttcaggttccgtgtcctgtggaagctgctttgataattaacgaaacaataaacaccaccttaacacagccaacagctcttgtacctgctttgtcacataacgtgactgaaaatgactcttgcagacctcactattttattttcaactcacagactgtctatgctgtgccaattctgatcttttcatttgtctgtcatcctgctgttcttcccatctatgaagaactgaaagaccgcagccgtagaagaatgatgaatgtgtccaagatttcattttttgctatgtttctcatgtatctgcttgccgccctctttggatacctaacattttacgaacatgttgagtcagaattgcttcatacctactcttctatcttgggaactgatattcttcttctcattgtccgtctggctgtgttaatggctgtgaccctgacagtaccagtagttattttcccaatccggagttctgtaactcacttgttgtgtgcatcaaaagatttcagttggtggcgtcatagtctcattacagtgtctatcttggcatttaccaatttacttgtcatctttgtcccaactattagggatatctttggttttattggtgcatctgcagcttctatgttgatttttattcttccttctgccttctatatcaagttggtgaagaaagaacctatgaaatctgtacaaaagattggggctttgttcttcctgttaagtggtgtactggtgatgaccggaagcatggccttgattgttttggattgggtacacaatgcacctggaggtggccattaattggcaccactcaaactcaaactcagtccatctgatgccagtgttgagtaaactcaactactatgaaatttcacctaatgttttcagtttcacttccttttgaagtgcagattcctcgctggttcttctgagtgcagaataagtgaacttttttgttttgttttgtttttttaagaaacttatctgtatgttagaaatggatatgaacaacaaaaccacgagtctcgggttaagggaagtgacaattttattccattccagagaatggacaaactcttaacttttatcaagccacatgcttggctgtgtcattgtttaacttggatattttatgattttacttgaatgtgcctaatggaaccatttgatgtgagaaacaattctttttaatttacagcaaaatattgaataaccattgacaaaaacactattattttttgtaccaaaaatacttaaagacctcagaagcactcttttacttttaagaaattgcttttttgaactttattcagaagcagttatcaataaattccataaaataatgtcattggtatttaaaaatgaatattaatataatgaaatggtttgcctttttgtaggcataataagccaaatacttttttacccaaaataatttttagagaaaatgatgtaatgaaaaattgtaccatgaattaggagcatagttttttccatttaaacgtcaccattacttaaaagatgattgattattgctataccaaatcagatgaactctgttcatcacttttcttctctgtccccaaacaatttggttcattcagactgaaatgtttgtgtcttcaacttattagaatggaagataatgcagatatttctgtgggaaataaaataactaattttgaggtaccaaatagtgcaattgggtaaaacagggtttattcagttgcatctgtctccagtgttgtattgacagctctgggtctttttttgggccagcccttttttgacattgcttccagcagtggaaaatgggcatttgatggcaataggccaaaattattgtgtccagagagtacactttttcaaaatgctcacctactggaagtgtgaattacttgacaatgtatggcttagttgtgttcatgttttgtctacagtagaggtctaatccacaggttacacctatgtttgatatgatataagttctctttgcgtaggccactgggtttctcatgcagtaagctttataaaaactcatttgcactggactgtcatctcattcttgtacaacgtagaattacttgtttacatccaacaaatggttagctagggaaaacagtgcaaactgagtgttagtagtcattttggtccaactgcatgtcaacccttccatttcaatcccagttagaaatgaaaataattactttgaaacttggctttaagagcacatttatcgtacgtcacagtgtatggtgaatatattattaaataatgtggtacttcgctcatcaggcataatgtctaaaatctaatatacataattccattaagtggttgaaggaagcaaataatggaattgtcaattggtcatctggctgtaaggtttgcccttgaactaaaaatgttgtttggggcaagggccagaaatgtggagacatggtttttgttacgcattcttgtattatatgtgactaaatttacaaacaagatacatgtgtaattaaagacccttatggaactggaagacgtcttgtagtgctacattgggtgaaaccgttggtccatttttgtctgtttctatgaagataaaataattgggggccatctagaaatagaaaggcagtgggaagacagattctacggcactgctttcatttaattgggctttaggcactccattcgaatgcagaacctcacctctagttgagaccaagaattggcaaatttgcatgagctcctggaaagagttgctgactttgtatctaagacctgccagggaataccaagagttgtttctacagacttttttttttttttttgtatgggagaagatactgtggcaaccaggaaggaatggaaaaaaaattcttttctctacagcaaattaatgtgaggaagctcctccaatcctctggctatttaaggttcaaaatcaagtgcctagggaaaattccaatggatgattttctgggagctatcttgtctaccttgaggttcctgaacaatgaattcccattaatgagcagtcttcagtattaaaaccactgtcttgtcacctcattttgcattactgtcttccgtggatgtttcagttacaactgtaatgttatttatagaacaacattaatccattaaagctaacctatttttcaatatttatgataatctatgtacatatattgtctgtccatatgtatttgtaaataggttgtatataatgtcaggtttgggtcttgggttcaagtgtatatattcctgtaagtttcttaactgcattttgatgaattcacattatgtaactataagaattgtcccaaaagtacctgtacagaaaattgaatattgaaaaattgacaaattgtgtacaaacactaaaaaaaacttgtttaaattgtatttgcaataaacaacatcaaattttttcatgaaatcttggtacaaattcagatctcttatttaaaatttaaataaggaatacattttcaaaatgcagtaatcaaaatgtgatctagtgtaatgaaataaaatgtgatctagtgtaatggaagacctttgagaacctgggtgtattaactttgtgtatatagtgtaaatatccccactgtactgttagaggccaacaattctagtatggcttgttggcaaagagtgctacaccgtttcaatgaaacaatgtatgtttgttttaactgaactaaaataaatacatgcttaatcctg

SEQ ID NO: 200777 - DNA, 1521 bp, Artificial Sequence
  derived and/or modified sequence
atgaagaaggccgagatgggcagattcagcatcagccccgacgaggacagcagcagctacagcagcaacagcgacttcaactacagctaccccaccaagcaggccgccctgaagagccactacgccgacgtggaccccgagaaccagaacttcctgctggagagcaacctgggcaagaagaagtacgagaccgagttccaccccggcaccaccagcttcggcatgagcgtgttcaacctgagcaacgccatcgtgggcagcggcatcctgggcctgagctacgccatggccaacaccggcatcgccctgttcatcatcctgctgaccttcgtgagcatcttcagcctgtacagcgtgcacctgctgctgaagaccgccaacgagggcggcagcctgctgtacgagcagctgggctacaaggccttcggcctggtgggcaagctggccgccagcggcagcatcaccatgcagaacatcggcgccatgagcagctacctgttcatcgtgaagtacgagctgcccctggtgatccaggccctgaccaacatcgaggacaagaccggcctgtggtacctgaacggcaactacctggtgctgctggtgagcctggtggtgatcctgcccctgagcctgttcagaaacctgggctacctgggctacaccagcggcctgagcctgctgtgcatggtgttcttcctgatcgtggtgatctgcaagaagttccaggtgccctgccccgtggaggccgccctgatcatcaacgagaccatcaacaccaccctgacccagcccaccgccctggtgcccgccctgagccacaacgtgaccgagaacgacagctgcagaccccactacttcatcttcaacagccagaccgtgtacgccgtgcccatcctgatcttcagcttcgtgtgccaccccgccgtgctgcccatctacgaggagctgaaggacagaagcagaagaagaatgatgaacgtgagcaagatcagcttcttcgccatgttcctgatgtacctgctggccgccctgttcggctacctgaccttctacgagcacgtggagagcgagctgctgcacacctacagcagcatcctgggcaccgacatcctgctgctgatcgtgagactggccgtgctgatggccgtgaccctgaccgtgcccgtggtgatcttccccatcagaagcagcgtgacccacctgctgtgcgccagcaaggacttcagctggtggagacacagcctgatcaccgtgagcatcctggccttcaccaacctgctggtgatcttcgtgcccaccatcagagacatcttcggcttcatcggcgccagcgccgccagcatgctgatcttcatcctgcccagcgccttctacatcaagctggtgaagaaggagcccatgaagagcgtgcagaagatcggcgccctgttcttcctgctgagcggcgtgctggtgatgaccggcagcatggccctgatcgtgctggactgggtgcacaacgcccccggcggcggccactag

SEQ ID NO: 200778 - protein, 828 aa, Artificial Sequence
  derived and/or modified sequence
MWLRLGPPSLSLSPKPTVGRSLCLTLWFLSLALRASTQAPAPTVNTHFGKLRGARVPLPSEILGPVDQYLGVPYAAPPIGEKRFLPPEPPPSWSGIRNATHFPPVCPQNIHTAVPEVMLPVWFTANLDIVATYIQEPNEDCLYLNVYVPTEDGSGAKKQGEDLADNDGDEDEDIRDSGAKPVMVYIHGGSYMEGTGNMIDGSILASYGNVIVITLNYRVGVLGFLSTGDQAAKGNYGLLDQIQALRWVSENIAFFGGDPRRITVFGSGIGASCVSLLTLSHHSEGLFQRAIIQSGSALSSWAVNYQPVKYTSLLADKVGCNVLDTVDMVDCLRQKSAKELVEQDIQPARYHVAFGPVIDGDVIPDDPEILMEQGEFLNYDIMLGVNQGEGLKFVEGVVDPEDGVSGTDFDYSVSNFVDNLYGYPEGKDTLRETIKFMYTDWADRDNPETRRKTLVALFTDHQWVEPSVVTADLHARYGSPTYFYAFYHHCQSLMKPAWSDAAHGDEVPYVFGVPMVGPTDLFPCNFSKNDVMLSAVVMTYWTNFAKTGDPNKPVPQDTKFIHTKANRFEEVAWSKYNPRDQLYLHIGLKPRVRDHYRATKVAFWKHLVPHLYNLHDMFHYTSTTTKVPPPDTTHSSHITRRPNGKTWSTKRPAISPAYSNENAQGSWNGDQDAGPLLVENPRDYSTELSVTIAVGASLLFLNVLAFAALYYRKDKRRQEPLRQPSPQRGAGAPELGAAPEEELAALQLGPTHHECEAGPPHDTLRLTALPDYTLTLRRSPDDIPLMTPNTITMIPNSLVGLQTLHPYNTFAAGFNSTGLPHSHSTTRV

SEQ ID NO: 200779 - DNA, 2487 bp, Artificial Sequence
  derived and/or modified sequence
atgtggctccgcctggggcccccttcgctctccctttctcccaaacctactgtggggaggagcctttgtctgacgctgtggtttctgtcacttgcattgcgcgcttccactcaagctcccgccccaactgtgaatacacacttcggaaaattgaggggcgcgcgcgtgcccctgccgagcgaaattctcggacccgtggaccaatacctgggcgtgccatatgctgccccccctatcggcgagaagcgattcctccctccagagccacctcccagctggtccggtatcagaaacgcgacacactttccccccgtgtgccctcagaatatccacaccgccgtgcccgaggtgatgctaccagtgtggtttactgctaacctggatattgtggccacatacatacaggagcctaatgaggattgtctctatctcaacgtctacgttcccaccgaggacgggtccggcgctaaaaagcagggagaggatctcgccgacaacgatggggacgaggatgaagacatccgcgactctggagcgaaacctgtaatggtctacattcatggcggatcatacatggagggaacggggaatatgatagacggaagtatccttgcgtcctacggcaatgtgattgtgattaccctaaactacagagtgggcgttttgggttttttgagtaccggggaccaggccgcaaaaggaaattatggattactcgatcagatacaggctctgaggtgggtgtcagagaatatcgcattcttcggaggcgatccccggaggattacagtgttcggctcaggaatcggtgcttcctgtgtctcactcctgacccttagtcatcatagcgagggattgttccaacgggccatcatccagagtggtagcgccctgtcttcctgggccgtcaactatcagcctgtgaaatatacaagtctgctggctgacaaggttgggtgcaatgtattagacaccgttgatatggtggactgcctgcgccaaaagagcgcaaaggaactggtggaacaagatattcagccagctcgttaccacgtggccttcggcccggtcatcgacggggacgtgattccagatgacccagaaattctaatggagcagggggagttccttaactatgacatcatgctgggcgtgaatcagggcgaaggtctgaaatttgttgaaggtgtggtcgacccagaggatggagtgtcgggaactgacttcgactacagtgtgagcaacttcgtcgataacctgtatggataccctgagggcaaagacacactgcgagagaccatcaagttcatgtatacggattgggctgaccgagataatccagaaacacgccgaaagacactggttgccctattcaccgatcatcagtgggtggagcccagcgtggtgacagccgacctgcatgcccgctatgggagccctacttacttctatgccttttaccatcattgtcagtccctgatgaaacctgcttggtcggacgctgctcacggggatgaagttccatatgtgttcggggtgcctatggtcggcccaacagatctgttcccctgtaattttagcaaaaacgatgtgatgcttagcgctgttgtcatgacatactggaccaactttgccaaaaccggcgatcccaataagcctgtccctcaggacacaaaatttattcacacaaaggccaatcgattcgaagaggtggcatggtctaagtacaatcctagagaccagctgtatctgcatatcggccttaagccacgtgtgagggaccattatcgcgcaactaaagtggctttctggaagcacctcgtgccacatttatataatctgcacgacatgttccactacactagtaccacgaccaaagtgccgccgccggacaccactcatagctctcatattacccgtcgaccgaacgggaagacctggtccacaaagcggcccgctatttcacccgcttattccaacgagaacgctcagggctcatggaacggcgatcaggatgctggccccttattggtggaaaatcccagggactacagcactgaactgtcagtcaccatcgcagtgggtgcctccctcctttttctgaatgttttggcgttcgccgcgctgtactatcgcaaggataaaagaaggcaggagcccctccggcagccctccccacaacgtggcgccggggctccagagttaggcgctgcccccgaggaggaacttgctgcactgcagttgggcccaacccaccacgagtgtgaggctggtcctccacatgatacattaaggttaactgcgttgcccgactacaccctgacccttagacggtctcccgacgacattcccctgatgacaccaaatactatcactatgattccaaactcgctcgtggggctccagactctgcatccctacaacacatttgccgcgggattcaacagcactggcttaccgcattctcactccacaactagagtgtag

SEQ ID NO: 200780 - DNA, 2487 bp, Artificial Sequence
  derived and/or modified sequence
atgtggctgcggctgggcccccccagcctgagcctgagccccaagcccaccgtgggccgcagcctgtgcctgaccctgtggttcctgagcctggccctgcgggccagcacccaggccccagcccccaccgtgaacacccactttgggaagctgcggggggcccgggtgcccctgcccagcgagatcctgggccctgtggaccagtacctgggcgtgccctatgctgccccacccatcggggagaagcgcttcctgcccccagagcccccacccagctggagcggcatcagaaatgccacccacttcccccctgtgtgcccccagaacatccacacagctgtgcctgaggtgatgctgcctgtgtggttcaccgccaacctggacatcgtggccacctacatccaggagcccaatgaagactgcctgtacctgaatgtgtatgtgcccacagaagatggcagcggggccaagaagcagggcgaggacctggccgacaatgatggagatgaagatgaggacatccgggacagcggggccaagcctgtgatggtgtacatccatggaggcagctacatggagggcactggaaacatgattgatggcagcatcctggccagctatggaaatgtgattgtcatcaccctgaactacagagtgggcgtgctgggcttcctgagcactggagaccaggccgccaagggcaactacggcctgctggaccagatccaggccctgcgctgggtgtctgagaacatcgccttctttggaggagacccccggcgcatcaccgtgtttggaagtggcattggagccagctgtgtgtccctgctgaccctgagccaccacagcgagggcctcttccagagggccatcatccagagcggcagcgccctgagctcctgggccgtgaactaccagcctgtgaagtacaccagcctgctggccgacaaggtgggctgcaatgtgctggacacagtggacatggtggactgcctgcggcagaagagcgccaaggagctggtggagcaggacatccagcctgcccgctaccacgtggccttcggccctgtgattgatggagatgtgatcccagatgatcctgagatcctgatggagcagggcgagttcctgaactatgacatcatgctgggcgtgaaccagggcgagggcctgaagtttgtggagggcgtggtggaccctgaagatggagtgtctggaacagactttgactacagcgtgagcaactttgtggacaacctgtatggctacccagagggcaaggacaccctgcgggagaccatcaagttcatgtacacagactgggccgaccgggacaaccctgagaccaggaggaagaccctggtggccctcttcacagaccaccagtgggtggagcccagcgtggtgacagctgacctgcacgcccgctatggcagccccacctacttctacgccttctaccaccactgccagagcctgatgaagccagcctggagcgatgctgcccatggagatgaggtgccctacgtgtttggagtgcccatggtgggccccacagacctcttcccctgcaacttcagcaagaatgatgtgatgctgtctgctgtggtgatgacctactggaccaactttgccaagacaggagaccccaacaagcctgtgccccaggacaccaagttcatccacaccaaggccaacagatttgaggaggtggcctggagcaagtacaacccccgggaccagctgtacctgcacatcggcctgaagccccgggtgcgggaccactaccgggccaccaaggtggccttctggaagcacctggtgccccacctgtacaacctgcatgacatgttccactacaccagcaccaccaccaaggtgcccccaccagacaccacccacagcagccacatcacccggcggcccaacgggaagacctggagcaccaagaggcctgccatcagccctgcctacagcaatgaaaatgcccagggctcctggaatggagaccaggatgctggccccctgctggtggagaacccccgggactacagcacagagctgtctgtgaccatcgctgtgggcgccagcctgctcttcctgaatgtgctggcctttgctgccctgtactacaggaaggacaagaggcggcaggagcccctgcggcagcccagcccccagagaggagctggggcccctgagctgggcgccgcccctgaggaggagctggccgccctgcagctgggccccacccaccatgaatgtgaggccggcccccctcatgacaccctgcggctgacagccctgcctgactacaccctgaccctgcggcgcagcccagatgacatccccctgatgacccccaacaccatcaccatgatccccaacagcctggtgggcctgcagaccctgcacccctacaacacctttgctgctggcttcaacagcacaggcctgccccacagccacagcaccaccagggtgtag

SEQ ID NO: 200781 - DNA, 2487 bp, Artificial Sequence
  derived and/or modified sequence
atgtggctgcggctgggcccccccagcctgagcctgagccccaagcccaccgtcgggagaagtctctgtcttaccttgtggttcttgagtttagcgttgcgagcctctacacaggcacctgcaccaaccgtgaacacacacttcggtaaattgcgtggagccagggtccctctgccgtcagagattttggggcccgtggatcagtacctgggcgtgccttacgctgccccacccattggtgagaaacggtttcttcccccagagccgcctccttcttggagtggcattagaaacgccacccacttcccccccgtctgtccgcagaatattcatacagcagtgccagaggtaatgctgccagtttggtttacagcaaacctggacatagtggctacctatatccaggagcccaacgaagactgcctgtaccttaatgtgtacgtccctacggaggacggttctggcgcgaagaagcagggagaggacctggcagataatgatggagatgaggatgaggatattagggacagcggggctaaacccgtgatggtgtacattcacggtggatcctacatggagggtacgggtaacatgatcgacggaagcattctcgccagctacggaaacgtcatcgtaatcaccctcaactaccgtgtgggtgtgctggggtttttgtccacgggcgaccaggctgccaagggtaactatgggctgctggatcagatccaggcgctgcgctgggtgtctgaaaacattgctttctttgggggtgatcctcgccggattaccgtgttcggctcaggcatcggagcatcatgtgtgtctctcctgactctctctcaccactcagaaggcctgttccagcgcgctatcattcagagcggttctgccctaagttcctgggcggtgaactatcagcccgtcaaatacacctctttgctcgctgacaaggtggggtgcaacgtactcgatacagtggatatggttgattgtctgcgccagaagtcagcaaaggagctggtggaacaagacatacagcccgctagataccacgtggccttcggtccagtgattgacggtgatgtgatcccagacgacccagagatcctgatggaacaaggagagttcttgaattatgacatcatgctgggggtaaatcagggcgaaggcctcaaattcgtcgaaggagtggtggatcccgaggacggagtgtcaggaacggacttcgactactccgtgtcgaatttcgtggataacctgtatggatatcccgaggggaaggacacgttgcgcgaaaccattaaatttatgtacactgattgggctgatcgggataatcctgagacacggagaaagactttggtggctttattcaccgatcatcagtgggtcgagccctctgttgtaactgcagatctacacgcacgttatggatcccccacctatttttatgccttctaccaccactgccagagcctcatgaaaccagcttggtctgacgcagcccacggggatgaggtgccgtacgtctttggcgtcccgatggtgggacccacagatctatttccctgtaatttttcgaagaacgacgtgatgctgagtgcggtggtgatgacatattggaccaatttcgcaaagactggggaccctaataaaccggtccctcaagacaccaaatttatccataccaaggcgaaccgcttcgaggaagtggcctggagtaagtacaaccccagagaccagctgtatttgcacattggactcaaaccccgcgtcagagaccactatcgggcaaccaaggtagcgttttggaagcacctcgttccacacctttacaatctccacgatatgttccactacactagtacgaccacaaaggtgccaccaccagataccacacactcttcacatatcactcggagaccaaacggtaaaacgtggtctacaaaacggcctgctatctcacccgcatattcaaacgagaacgcgcagggctcttggaacggagaccaagacgccggtcccctcctggtcgaaaatccgagggactactccaccgagctgagcgtgacgatagccgtgggggcgagccttttgttcctaaatgtgcttgctttcgcagcactgtattaccggaaggacaagcggagacaagaacctctgcgccagccatcccctcagcggggtgcaggggcaccagaattaggtgccgctcccgaagaggagctggcagccctccaacttggccccacccaccacgagtgtgaggctgggcctccacacgatacgctgcgcttgacggctctccctgattacacgttaactctcagaaggtcacccgatgatatccccctaatgacacccaataccatcaccatgatccccaattctctcgtaggtttacagactctgcatccttataacactttcgctgctggatttaactccaccggcctgcctcactcacactctaccactcgggtgtag

SEQ ID NO: 200782 - DNA, 3913 bp, Artificial Sequence
  derived and/or modified sequence
gggcacagcagccaggctgccggagagctgatctcggggattcgggtgcggagcccttggcctggaggcgatatgggtggtccgtggcccggttcagtcgcttgcagcagcccggggaacaggcctgtctggccctgagggagtcccctttctgaagctgtggtgcttggacgacctgctctctacattgctgggcacctgtaggtgtccctcgagagctcagttttgaggttcaagtcagtgtggccatgaaggggctgcctattgggctgatgctgtgaccctggagtctgcctctcctgccagtccccctgcccggaacatgtggctgcggcttggcccgccctcgctgtccctgagccccaagcccacggttggcaggagcctgtgcctcaccctgtggttcctcagtttggcgctgagggccagtacccaggccccagcacccacagtcaacactcactttgggaagctaaggggtgcccgagtaccactgcccagtgagatcctggggcctgtggaccaatacctgggggtgccctacgcagctcccccgatcggcgagaaacgtttcctgccccctgaaccacccccatcctggtcgggcatccggaacgccacacactttcccccagtgtgcccccagaacatccacacagctgtgcccgaagtcatgctgccggtctggttcactgccaacttggatatcgtcgctacttacatccaggagcccaacgaagactgtctctacctgaacgtctatgtgccgacggaggatggatccggcgctaagaaacagggcgaggacttagcggataatgacggggatgaagatgaagacatccgggacagtggtgctaaacccgtcatggtctacatccacggaggctcttacatggaagggacaggcaacatgattgatggcagcatcctcgccagttatggcaatgtcatcgtcatcaccctcaactatcgggttggagtgctaggtttcctgagtactggagatcaggctgccaagggcaactatgggctccttgaccagatccaggccctccgctgggtgagcgagaatattgccttcttcgggggagacccccgccggatcactgtctttggctcgggcattggtgcatcctgcgtcagcctcctcacgttgtcacatcactcagagggacttttccagagagccatcatccaaagtggctctgctctgtccagctgggctgtgaactaccaaccagtgaagtacaccagcctgctggcagacaaagtgggctgtaatgtgctggacaccgtggatatggtggactgtcttcggcaaaagagtgccaaggagctggtagagcaggacatccagccagcccgctaccacgtggcctttggccctgtgattgatggtgatgtcattcctgatgaccctgagatcctcatggagcagggcgagttcctcaactatgacatcatgctaggtgtcaaccagggcgagggtctcaagtttgtggaaggggtggtggaccctgaggatggtgtctctggcactgactttgactattccgtctccaattttgtggacaatctgtatggctatcctgagggtaaggacaccctgcgagagaccatcaagttcatgtatacagactgggcagaccgtgacaaccctgagacccgccgtaaaacactggtggcactcttcactgaccaccagtgggtggagccctcagtggtgacagccgatctgcatgcccgctacggctcgcctacctacttctacgccttctatcatcactgccagagcctcatgaagcctgcttggtcagatgcagctcatggggatgaagtaccctatgtttttggggttcctatggtaggccccactgaccttttcccctgcaacttctccaagaatgatgttatgctcagtgctgtcgtcatgacctattggaccaactttgccaagactggggatcccaacaagccggtcccccaggacaccaagttcattcacaccaaggccaaccgctttgaggaagtggcctggtccaaatacaatccccgagaccagctctaccttcacatcgggctgaaaccaagggtccgagatcattaccgggccactaaggtggccttttggaaacatctggtgccccacctatacaacctgcatgacatgttccactatacgtccaccaccaccaaagtgccgcctccggataccacccacagctcccacatcacccgcaggcccaatggcaagacctggagcaccaagcggccagccatctcacctgcctacagcaacgagaatgcccaggggtcctggaacggggaccaggatgcagggccactcctggtggagaaccctcgtgactactccactgaattaagtgtcaccatcgccgtgggggcctccctcctgttccttaacgttctggccttcgctgccctctactaccgtaaggacaaacggcgccaggagcccctgcggcagcctagccctcagcggggagccggggccccggagttgggagctgctccagaggaggagctggcagcattacaactgggccccacccaccacgagtgtgaggccggtcccccccatgacacgctgcgcctcactgcattgcccgactacaccctgaccctgcggcgctccccggatgacatcccactcatgacccccaacaccatcactatgatccccaactccctggtagggctgcagacattgcacccctataacacctttgccgcagggttcaacagtaccgggctgccccactcacactccactacccgggtatagctccaactcagagcacagccaatctccaggctccctccctcccagatccaggaacacatgcacacacacacacacacacacgcagacacacacacacacacacatatatgtatacgcacgcacccacaccctacagcagatccacctgcacaaacatagacagatgtggacatgcacccgcatgtacaaaaacacaaatacggaagtaaacctgaacaaaccctttaaatggggacgcagatgagtcctcggtaaaccgaggacccatgaaacagcagctgaagccagctccctgaatctgaccacagacactcctggggggcctgaaagcaacagctggacacccccttggtgctcgccttcggcctctcttggaactgcaccaccgaccaactccagacttgggagctttaaagagcaggatagctcttcctccccaggacttggtcttttttctgggtcttgttttgttgatttttcttttttaattttggaacaaatgcttttccaacccatgagtgctaagagcctctggaagggagggcttcaggcccgaaggtctctctggctctaggacccccagtgctcacacaatcagaccaaggaacaagacccccaggaaggaaacagatttaagcaagaccatggggtggaaggagaaaggggctagcactggatggagctggagggtcgtaggggagagatctccaactctctctgtgtccgtgtggagggctgcagagcctgcagggtgacctgcttccccaaaggccaacagcattggcctggccagaccaggtgaccttagatttggtgaacaacgtactatggaagccacatcactattgggcccccaggtctgatctgggttttgcctctgcccttggggaaatgctatcagaaattcgccccattttctttacagtcttttgtgtctgtcatttctctttcaaaaaggcggtgttttttgttgttgttggtttttttttttttttaaagaaaagttcttaaaacactaacggaaacccatggagtttgtcctttgtaaaaattttaaacacagtgtcttgatataaaaataaaaaatccagttagcactcccaa

SEQ ID NO: 200783 - DNA, 2487 bp, Artificial Sequence
  derived and/or modified sequence
atgtggcttcggcttggcccacctagtctttcactgtctccgaagccgactgttggccgtagtctttgtctgaccctttggtttctaagtctggccttgagggcatctactcaggcccctgctccaacggtgaatacccattttggcaagcttcggggtgcacgggtacctcttccatccgagatccttgggccagtggatcagtacctgggcgtgccttacgccgctcctccgatcggagaaaagcgttttctgccccctgaaccccctccatcctggtccggaattcgtaacgctacacattttccacccgtgtgtcctcagaacatccacacggccgtgccagaagtcatgttgccggtgtggtttacagctaacctcgatatagtggcgacgtatatccaggaacctaacgaagactgtctttatttgaacgtttacgtacccactgaagatggttcgggggcaaagaagcagggagaggacctcgcagacaatgacggagacgaggacgaggacataagggattcaggcgctaagcccgttatggtatacatacacggagggtcttacatggagggaactgggaacatgatcgacggcagcattctggcctcctacggcaatgtgatcgttatcaccctgaactatagagtcggagtgctcggatttctcagtaccggagaccaggctgcgaaaggaaattacgggttactggatcagattcaagccttgcgatgggtcagtgaaaacatcgcctttttcgggggtgaccctcggcgaattactgtttttggaagcggcattggagctagttgcgtctcgctcctgaccttaagccaccacagtgaaggtcttttccagcgcgctatcattcagagtggttccgctctgtccagctgggccgtgaattatcaacctgtcaaatatactagcctgctggccgacaaagtaggctgtaatgtgttggacaccgttgacatggttgattgtcttcgccagaaatccgccaaggagctggtagagcaggatatccaacccgctaggtaccacgttgcattcggcccagttattgacggcgacgtcatcccggatgaccctgaaatcctgatggagcagggagagttccttaattacgatattatgctcggcgtcaaccagggggaaggtttaaagtttgtggagggtgtggtggatcctgaagacggtgtcagtggaactgattttgattattctgtcagtaatttcgtggacaacctttacgggtaccctgaggggaaggataccttgagagaaaccataaaatttatgtataccgactgggccgacagggataaccccgagacccggagaaaaactctggtcgctctgttcaccgatcaccaatgggtcgagccatctgtggttacagccgacttacatgcaagatacgggagcccaacgtacttttatgctttctatcaccattgccagtcacttatgaaacctgcatggtccgatgcagcccacggcgacgaggtgccctatgtgtttggagtgcccatggtgggacccaccgatttatttccctgtaacttctcaaagaacgacgtgatgctcagcgccgtggtgatgacctattggacgaacttcgcaaagacaggtgatccaaacaaacctgttccacaagacaccaagttcatacataccaaggccaaccgattcgaggaggtcgcttggagcaagtataatccgagggaccagttatacttgcatattggattgaagccacgggtgcgggatcattaccgagctactaaagtcgccttctggaagcacctggtgccacacttgtataacctacacgacatgttccattatacctccacgacaaccaaggtgccgccaccggatactacacatagctcccatattaccaggagaccaaatggtaaaacctggtctacaaaacgccctgcaatatcacccgcatatagcaacgaaaatgcacaggggtcctggaacggggatcaggatgccggaccattactggtggagaacccgagggactattctaccgagctatccgtgacaatagcggtgggagcgtcactcctattcctgaatgtgctggcattcgcggcactgtactaccggaaggacaagcgacggcaggaaccactccggcagccatccccacaacgcggagccggagctcctgagctgggcgctgcgccagaggaagagctggcggcactccaactaggtcctacccaccacgaatgcgaagctggcccacctcatgatacattaagactgactgcgctgccagattataccctgacgctaagacgcagccccgacgatatccccctgatgacaccaaacaccataacgatgatcccaaactcacttgttggcctccaaacattgcatccctacaatacatttgcagcaggctttaacagcaccgggttgccccatagccacagcacaacccgggtctag

SEQ ID NO: 200784 - DNA, 2487 bp, Artificial Sequence
  derived and/or modified sequence
atgtggctgagactgggcccccccagcctgagcctgagccccaagcccaccgtgggcagaagcctgtgcctgaccctgtggttcctgagcctggccctgagagccagcacccaggcccccgcccccaccgtgaacacccacttcggcaagctgagaggcgccagagtgcccctgcccagcgagatcctgggccccgtggaccagtacctgggcgtgccctacgccgccccccccatcggcgagaagagattcctgccccccgagcccccccccagctggagcggcatcagaaacgccacccacttcccccccgtgtgcccccagaacatccacaccgccgtgcccgaggtgatgctgcccgtgtggttcaccgccaacctggacatcgtggccacctacatccaggagcccaacgaggactgcctgtacctgaacgtgtacgtgcccaccgaggacggcagcggcgccaagaagcagggcgaggacctggccgacaacgacggcgacgaggacgaggacatcagagacagcggcgccaagcccgtgatggtgtacatccacggcggcagctacatggagggcaccggcaacatgatcgacggcagcatcctggccagctacggcaacgtgatcgtgatcaccctgaactacagagtgggcgtgctgggcttcctgagcaccggcgaccaggccgccaagggcaactacggcctgctggaccagatccaggccctgagatgggtgagcgagaacatcgccttcttcggcggcgaccccagaagaatcaccgtgttcggcagcggcatcggcgccagctgcgtgagcctgctgaccctgagccaccacagcgagggcctgttccagagagccatcatccagagcggcagcgccctgagcagctgggccgtgaactaccagcccgtgaagtacaccagcctgctggccgacaaggtgggctgcaacgtgctggacaccgtggacatggtggactgcctgagacagaagagcgccaaggagctggtggagcaggacatccagcccgccagataccacgtggccttcggccccgtgatcgacggcgacgtgatccccgacgaccccgagatcctgatggagcagggcgagttcctgaactacgacatcatgctgggcgtgaaccagggcgagggcctgaagttcgtggagggcgtggtggaccccgaggacggcgtgagcggcaccgacttcgactacagcgtgagcaacttcgtggacaacctgtacggctaccccgagggcaaggacaccctgagagagaccatcaagttcatgtacaccgactgggccgacagagacaaccccgagaccagaagaaagaccctggtggccctgttcaccgaccaccagtgggtggagcccagcgtggtgaccgccgacctgcacgccagatacggcagccccacctacttctacgccttctaccaccactgccagagcctgatgaagcccgcctggagcgacgccgcccacggcgacgaggtgccctacgtgttcggcgtgcccatggtgggccccaccgacctgttcccctgcaacttcagcaagaacgacgtgatgctgagcgccgtggtgatgacctactggaccaacttcgccaagaccggcgaccccaacaagcccgtgccccaggacaccaagttcatccacaccaaggccaacagattcgaggaggtggcctggagcaagtacaaccccagagaccagctgtacctgcacatcggcctgaagcccagagtgagagaccactacagagccaccaaggtggccttctggaagcacctggtgccccacctgtacaacctgcacgacatgttccactacaccagcaccaccaccaaggtgcccccccccgacaccacccacagcagccacatcaccagaagacccaacggcaagacctggagcaccaagagacccgccatcagccccgcctacagcaacgagaacgcccagggcagctggaacggcgaccaggacgccggccccctgctggtggagaaccccagagactacagcaccgagctgagcgtgaccatcgccgtgggcgccagcctgctgttcctgaacgtgctggccttcgccgccctgtactacagaaaggacaagagaagacaggagcccctgagacagcccagcccccagagaggcgccggcgcccccgagctgggcgccgcccccgaggaggagctggccgccctgcagctgggccccacccaccacgagtgcgaggccggccccccccacgacaccctgagactgaccgccctgcccgactacaccctgaccctgagaagaagccccgacgacatccccctgatgacccccaacaccatcaccatgatccccaacagcctggtgggcctgcagaccctgcacccctacaacaccttcgccgccggcttcaacagcaccggcctgccccacagccacagcaccaccagagtgtag

SEQ ID NO: 200785 - protein, 2382 aa, Artificial Sequence
  derived and/or modified sequence
MSGGAAEKQSSTPGSLFLSPPAPAPKNGSSSDSSVGEKLGAAAADAVTGRTEEYRRRRHTMDKDSRGAAATTTTTEHRFFRRSVICDSNATALELPGLPLSLPQPSIPAAVPQSAPPEPHREETVTATATSQVAQQPPAAAAPGEQAVAGPAPSTVPSSTSKDRPVSQPSLVGSKEEPPPARSGSGGGSAKEPQEERSQQQDDIEELETKAVGMSNDGRFLKFDIEIGRGSFKTVYKGLDTETTVEVAWCELQDRKLTKSERQRFKEEAEMLKGLQHPNIVRFYDSWESTVKGKKCIVLVTELMTSGTLKTYLKRFKVMKIKVLRSWCRQILKGLQFLHTRTPPIIHRDLKCDNIFITGPTGSVKIGDLGLATLKRASFAKSVIGTPEFMAPEMYEEKYDESVDVYAFGMCMLEMATSEYPYSECQNAAQIYRRVTSGVKPASFDKVAIPEVKEIIEGCIRQNKDERYSIKDLLNHAFFQEETGVRVELAEEDDGEKIAIKLWLRIEDIKKLKGKYKDNEAIEFSFDLERDVPEDVAQEMVESGYVCEGDHKTMAKAIKDRVSLIKRKREQRQLVREEQEKKKQEESSLKQQVEQSSASQTGIKQLPSASTGIPTASTTSASVSTQVEPEEPEADQHQQLQYQQPSISVLSDGTVDSGQGSSVFTESRVSSQQTVSYGSQHEQAHSTGTVPGHIPSTVQAQSQPHGVYPPSSVAQGQSQGQPSSSSLTGVSSSQPIQHPQQQQGIQQTAPPQQTVQYSLSQTSTSSEATTAQPVSQPQAPQVLPQVSAGKQLPVSQPVPTIQGEPQIPVATQPSVVPVHSGAHFLPVGQPLPTPLLPQYPVSQIPISTPHVSTAQTGFSSLPITMAAGITQPLLTLASSATTAAIPGVSTVVPSQLPTLLQPVTQLPSQVHPQLLQPAVQSMGIPANLGQAAEVPLSSGDVLYQGFPPRLPPQYPGDSNIAPSSNVASVCIHSTVLSPPMPTEVLATPGYFPTVVQPYVESNLLVPMGGVGGQVQVSQPGGSLAQAPTTSSQQAVLESTQGVSQVAPAEPVAVAQTQATQPTTLASSVDSAHSDVASGMSDGNENVPSSSGRHEGRTTKRHYRKSVRSRSRHEKTSRPKLRILNVSNKGDRVVECQLETHNRKMVTFKFDLDGDNPEEIATIMVNNDFILAIERESFVDQVREIIEKADEMLSEDVSVEPEGDQGLESLQGKDDYGFSGSQKLEGEFKQPIPASSMPQQIGIPTSSLTQVVHSAGRRFIVSPVPESRLRESKVFPSEITDTVAASTAQSPGMNLSHSASSLSLQQAFSELRRAQMTEGPNTAPPNFSHTGPTFPVVPPFLSSIAGVPTTAAATAPVPATSSPPNDISTSVIQSEVTVPTEEGIAGVATSTGVVTSGGLPIPPVSESPVLSSVVSSITIPAVVSISTTSPSLQVPTSTSEIVVSSTALYPSVTVSATSASAGGSTATPGPKPPAVVSQQAAGSTTVGATLTSVSTTTSFPSTASQLCIQLSSSTSTPTLAETVVVSAHSLDKTSHSSTTGLAFSLSAPSSSSSPGAGVSSYISQPGGLHPLVIPSVIASTPILPQAAGPTSTPLLPQVPSIPPLVQPVANVPAVQQTLIHSQPQPALLPNQPHTHCPEVDSDTQPKAPGIDDIKTLEEKLRSLFSEHSSSGAQHASVSLETSLVIESTVTPGIPTTAVAPSKLLTSTTSTCLPPTNLPLGTVALPVTPVVTPGQVSTPVSTTTSGVKPGTAPSKPPLTKAPVLPVGTELPAGTLPSEQLPPFPGPSLTQSQQPLEDLDAQLRRTLSPEMITVTSAVGPVSMAAPTAITEAGTQPQKGVSQVKEGPVLATSSGAGVFKMGRFQVSVAADGAQKEGKNKSEDAKSVHFESSTSESSVLSSSSPESTLVKPEPNGITIPGISSDVPESAHKTTASEAKSDTGQPTKVGRFQVTTTANKVGRFSVSKTEDKITDTKKEGPVASPPFMDLEQAVLPAVIPKKEKPELSEPSHLNGPSSDPEAAFLSRDVDDGSGSPHSPHQLSSKSLPSQNLSQSLSNSFNSSYMSSDNESDIEDEDLKLELRRLRDKHLKEIQDLQSRQKHEIESLYTKLGKVPPAVIIPPAAPLSGRRRRPTKSKGSKSSRSSSLGNKSPQLSGNLSGQSAASVLHPQQTLHPPGNIPESGQNQLLQPLKPSPSSDNLYSAFTSDGAISVPSLSAPGQGTSSTNTVGATVNSQAAQAQPPAMTSSRKGTFTDDLHKLVDNWARDAMNLSGRRGSKGHMNYEGPGMARKFSAPGQLCISMTSNLGGSAPISAASATSLGHFTKSMCPPQQYGFPATPFGAQWSGTGGPAPQPLGQFQPVGTASLQNFNISNLQKSISNPPGSNLRTT

SEQ ID NO: 200786 - protein, 1975 aa, Artificial Sequence
  derived and/or modified sequence
MDIKKKDFCSVFVIINSHCCCCPQKDCINEGVKPASFDKVAIPEVKEIIEGCIRQNKDERYSIKDLLNHAFFQEETGVRVELAEEDDGEKIAIKLWLRIEDIKKLKGKYKDNEAIEFSFDLERDVPEDVAQEMVESGYVCEGDHKTMAKAIKDRVSLIKRKREQRQLVREEQEKKKQEESSLKQQVEQSSASQTGIKQLPSASTGIPTASTTSASVSTQVEPEEPEADQHQQLQYQQPSISVLSDGTVDSGQGSSVFTESRVSSQQTVSYGSQHEQAHSTGTVPGHIPSTVQAQSQPHGVYPPSSVAQGQSQGQPSSSSLTGVSSSQPIQHPQQQQGIQQTAPPQQTVQYSLSQTSTSSEATTAQPVSQPQAPQVLPQVSAGKQLPVSQPVPTIQGEPQIPVATQPSVVPVHSGAHFLPVGQPLPTPLLPQYPVSQIPISTPHVSTAQTGFSSLPITMAAGITQPLLTLASSATTAAIPGVSTVVPSQLPTLLQPVTQLPSQVHPQLLQPAVQSMGIPANLGQAAEVPLSSGDVLYQGFPPRLPPQYPGDSNIAPSSNVASVCIHSTVLSPPMPTEVLATPGYFPTVVQPYVESNLLVPMGGVGGQVQVSQPGGSLAQAPTTSSQQAVLESTQGVSQVAPAEPVAVAQTQATQPTTLASSVDSAHSDVASGMSDGNENVPSSSGRHEGRTTKRHYRKSVRSRSRHEKTSRPKLRILNVSNKGDRVVECQLETHNRKMVTFKFDLDGDNPEEIATIMVNNDFILAIERESFVDQVREIIEKADEMLSEDVSVEPEGDQGLESLQGKDDYGFSGSQKLEGEFKQPIPASSMPQQIGIPTSSLTQVVHSAGRRFIVSPVPESRLRESKVFPSEITDTVAASTAQSPGMNLSHSASSLSLQQAFSELRRAQMTEGPNTAPPNFSHTGPTFPVVPPFLSSIAGVPTTAAATAPVPATSSPPNDISTSVIQSEVTVPTEEGIAGVATSTGVVTSGGLPIPPVSESPVLSSVVSSITIPAVVSISTTSPSLQVPTSTSEIVVSSTALYPSVTVSATSASAGGSTATPGPKPPAVVSQQAAGSTTVGATLTSVSTTTSFPSTASQLCIQLSSSTSTPTLAETVVVSAHSLDKTSHSSTTGLAFSLSAPSSSSSPGAGVSSYISQPGGLHPLVIPSVIASTPILPQAAGPTSTPLLPQVPSIPPLVQPVANVPAVQQTLIHSQPQPALLPNQPHTHCPEVDSDTQPKAPGIDDIKTLEEKLRSLFSEHSSSGAQHASVSLETSLVIESTVTPGIPTTAVAPSKLLTSTTSTCLPPTNLPLGTVALPVTPVVTPGQVSTPVSTTTSGVKPGTAPSKPPLTKAPVLPVGTELPAGTLPSEQLPPFPGPSLTQSQQPLEDLDAQLRRTLSPEMITVTSAVGPVSMAAPTAITEAGTQPQKGVSQVKEGPVLATSSGAGVFKMGRFQVSVAADGAQKEGKNKSEDAKSVHFESSTSESSVLSSSSPESTLVKPEPNGITIPGISSDVPESAHKTTASEAKSDTGQPTKVGRFQVTTTANKVGRFSVSKTEDKITDTKKEGPVASPPFMDLEQAVLPAVIPKKEKPELSEPSHLNGPSSDPEAAFLSRDVDDGSGSPHSPHQLSSKSLPSQNLSQSLSNSFNSSYMSSDNESDIEDEDLKLELRRLRDKHLKEIQDLQSRQKHEIESLYTKLGKVPPAVIIPPAAPLSGRRRRPTKSKGSKSSRSSSLGNKSPQLSGNLSGQSAASVLHPQQTLHPPGNIPESGQNQLLQPLKPSPSSDNLYSAFTSDGAISVPSLSAPGQGTSSTNTVGATVNSQAAQAQPPAMTSSRKGTFTDDLHKLVDNWARDAMNLSGRRGSKGHMNYEGPGMARKFSAPGQLCISMTSNLGGSAPISAASATSLGHFTKSMCPPQQYGFPATPFGAQWSGTGGPAPQPLGQFQPVGTASLQNFNISNLQKSISNPPGSNLRTT

SEQ ID NO: 200787 - protein, 393 aa, Artificial Sequence
  derived and/or modified sequence
MSGGAAEKQSSTPGSLFLSPPAPAPKNGSSSDSSVGEKLGAAAADAVTGRTEEYRRRRHTMDKDSRGAAATTTTTEHRFFRRSVICDSNATALELPGLPLSLPQPSIPAAVPQSAPPEPHREETVTATATSQVAQQPPAAAAPGEQAVAGPAPSTVPSSTSKDRPVSQPSLVGSKEEPPPARSGSGGGSAKEPQEERSQQQDDIEELETKAVGMSNDGRFLKFDIEIGRGSFKTVYKGLDTETTVEVAWCELQDRKLTKSERQRFKEEAEMLKGLQHPNIVRFYDSWESTVKGKKCIVLVTELMTSGTLKTYLKRFKVMKIKVLRSWCRQILKGLQFLHTRTPPIIHRDLKCDNIFITGPTGSVKIGDLGLATLKRASFAKSVIGMFQVYLGA

SEQ ID NO: 200788 - DNA, 7149 bp, Artificial Sequence
  derived and/or modified sequence
atgagcggcggcgccgccgagaagcagagcagcacccccggcagcctgttcctgagcccccccgcccccgcccccaagaacggcagcagcagcgacagcagcgtgggcgagaagctgggcgccgccgccgccgacgccgtgaccggcagaaccgaggagtacagaagaagaagacacaccatggacaaggacagcagaggcgccgccgccaccaccaccaccaccgagcacagattcttcagaagaagcgtgatctgcgacagcaacgccaccgccctggagctgcccggcctgcccctgagcctgccccagcccagcatccccgccgccgtgccccagagcgccccccccgagccccacagagaggagaccgtgaccgccaccgccaccagccaggtggcccagcagccccccgccgccgccgcccccggcgagcaggccgtggccggccccgcccccagcaccgtgcccagcagcaccagcaaggacagacccgtgagccagcccagcctggtgggcagcaaggaggagcccccccccgccagaagcggcagcggcggcggcagcgccaaggagccccaggaggagagaagccagcagcaggacgacatcgaggagctggagaccaaggccgtgggcatgagcaacgacggcagattcctgaagttcgacatcgagatcggcagaggcagcttcaagaccgtgtacaagggcctggacaccgagaccaccgtggaggtggcctggtgcgagctgcaggacagaaagctgaccaagagcgagagacagagattcaaggaggaggccgagatgctgaagggcctgcagcaccccaacatcgtgagattctacgacagctgggagagcaccgtgaagggcaagaagtgcatcgtgctggtgaccgagctgatgaccagcggcaccctgaagacctacctgaagagattcaaggtgatgaagatcaaggtgctgagaagctggtgcagacagatcctgaagggcctgcagttcctgcacaccagaaccccccccatcatccacagagacctgaagtgcgacaacatcttcatcaccggccccaccggcagcgtgaagatcggcgacctgggcctggccaccctgaagagagccagcttcgccaagagcgtgatcggcacccccgagttcatggcccccgagatgtacgaggagaagtacgacgagagcgtggacgtgtacgccttcggcatgtgcatgctggagatggccaccagcgagtacccctacagcgagtgccagaacgccgcccagatctacagaagagtgaccagcggcgtgaagcccgccagcttcgacaaggtggccatccccgaggtgaaggagatcatcgagggctgcatcagacagaacaaggacgagagatacagcatcaaggacctgctgaaccacgccttcttccaggaggagaccggcgtgagagtggagctggccgaggaggacgacggcgagaagatcgccatcaagctgtggctgagaatcgaggacatcaagaagctgaagggcaagtacaaggacaacgaggccatcgagttcagcttcgacctggagagagacgtgcccgaggacgtggcccaggagatggtggagagcggctacgtgtgcgagggcgaccacaagaccatggccaaggccatcaaggacagagtgagcctgatcaagagaaagagagagcagagacagctggtgagagaggagcaggagaagaagaagcaggaggagagcagcctgaagcagcaggtggagcagagcagcgccagccagaccggcatcaagcagctgcccagcgccagcaccggcatccccaccgccagcaccaccagcgccagcgtgagcacccaggtggagcccgaggagcccgaggccgaccagcaccagcagctgcagtaccagcagcccagcatcagcgtgctgagcgacggcaccgtggacagcggccagggcagcagcgtgttcaccgagagcagagtgagcagccagcagaccgtgagctacggcagccagcacgagcaggcccacagcaccggcaccgtgcccggccacatccccagcaccgtgcaggcccagagccagccccacggcgtgtacccccccagcagcgtggcccagggccagagccagggccagcccagcagcagcagcctgaccggcgtgagcagcagccagcccatccagcacccccagcagcagcagggcatccagcagaccgcccccccccagcagaccgtgcagtacagcctgagccagaccagcaccagcagcgaggccaccaccgcccagcccgtgagccagccccaggccccccaggtgctgccccaggtgagcgccggcaagcagctgcccgtgagccagcccgtgcccaccatccagggcgagccccagatccccgtggccacccagcccagcgtggtgcccgtgcacagcggcgcccacttcctgcccgtgggccagcccctgcccacccccctgctgccccagtaccccgtgagccagatccccatcagcaccccccacgtgagcaccgcccagaccggcttcagcagcctgcccatcaccatggccgccggcatcacccagcccctgctgaccctggccagcagcgccaccaccgccgccatccccggcgtgagcaccgtggtgcccagccagctgcccaccctgctgcagcccgtgacccagctgcccagccaggtgcacccccagctgctgcagcccgccgtgcagagcatgggcatccccgccaacctgggccaggccgccgaggtgcccctgagcagcggcgacgtgctgtaccagggcttcccccccagactgcccccccagtaccccggcgacagcaacatcgcccccagcagcaacgtggccagcgtgtgcatccacagcaccgtgctgagcccccccatgcccaccgaggtgctggccacccccggctacttccccaccgtggtgcagccctacgtggagagcaacctgctggtgcccatgggcggcgtgggcggccaggtgcaggtgagccagcccggcggcagcctggcccaggcccccaccaccagcagccagcaggccgtgctggagagcacccagggcgtgagccaggtggcccccgccgagcccgtggccgtggcccagacccaggccacccagcccaccaccctggccagcagcgtggacagcgcccacagcgacgtggccagcggcatgagcgacggcaacgagaacgtgcccagcagcagcggcagacacgagggcagaaccaccaagagacactacagaaagagcgtgagaagcagaagcagacacgagaagaccagcagacccaagctgagaatcctgaacgtgagcaacaagggcgacagagtggtggagtgccagctggagacccacaacagaaagatggtgaccttcaagttcgacctggacggcgacaaccccgaggagatcgccaccatcatggtgaacaacgacttcatcctggccatcgagagagagagcttcgtggaccaggtgagagagatcatcgagaaggccgacgagatgctgagcgaggacgtgagcgtggagcccgagggcgaccagggcctggagagcctgcagggcaaggacgactacggcttcagcggcagccagaagctggagggcgagttcaagcagcccatccccgccagcagcatgccccagcagatcggcatccccaccagcagcctgacccaggtggtgcacagcgccggcagaagattcatcgtgagccccgtgcccgagagcagactgagagagagcaaggtgttccccagcgagatcaccgacaccgtggccgccagcaccgcccagagccccggcatgaacctgagccacagcgccagcagcctgagcctgcagcaggccttcagcgagctgagaagagcccagatgaccgagggccccaacaccgccccccccaacttcagccacaccggccccaccttccccgtggtgccccccttcctgagcagcatcgccggcgtgcccaccaccgccgccgccaccgcccccgtgcccgccaccagcagcccccccaacgacatcagcaccagcgtgatccagagcgaggtgaccgtgcccaccgaggagggcatcgccggcgtggccaccagcaccggcgtggtgaccagcggcggcctgcccatcccccccgtgagcgagagccccgtgctgagcagcgtggtgagcagcatcaccatccccgccgtggtgagcatcagcaccaccagccccagcctgcaggtgcccaccagcaccagcgagatcgtggtgagcagcaccgccctgtaccccagcgtgaccgtgagcgccaccagcgccagcgccggcggcagcaccgccacccccggccccaagccccccgccgtggtgagccagcaggccgccggcagcaccaccgtgggcgccaccctgaccagcgtgagcaccaccaccagcttccccagcaccgccagccagctgtgcatccagctgagcagcagcaccagcacccccaccctggccgagaccgtggtggtgagcgcccacagcctggacaagaccagccacagcagcaccaccggcctggccttcagcctgagcgcccccagcagcagcagcagccccggcgccggcgtgagcagctacatcagccagcccggcggcctgcaccccctggtgatccccagcgtgatcgccagcacccccatcctgccccaggccgccggccccaccagcacccccctgctgccccaggtgcccagcatcccccccctggtgcagcccgtggccaacgtgcccgccgtgcagcagaccctgatccacagccagccccagcccgccctgctgcccaaccagccccacacccactgccccgaggtggacagcgacacccagcccaaggcccccggcatcgacgacatcaagaccctggaggagaagctgagaagcctgttcagcgagcacagcagcagcggcgcccagcacgccagcgtgagcctggagaccagcctggtgatcgagagcaccgtgacccccggcatccccaccaccgccgtggcccccagcaagctgctgaccagcaccaccagcacctgcctgccccccaccaacctgcccctgggcaccgtggccctgcccgtgacccccgtggtgacccccggccaggtgagcacccccgtgagcaccaccaccagcggcgtgaagcccggcaccgcccccagcaagccccccctgaccaaggcccccgtgctgcccgtgggcaccgagctgcccgccggcaccctgcccagcgagcagctgccccccttccccggccccagcctgacccagagccagcagcccctggaggacctggacgcccagctgagaagaaccctgagccccgagatgatcaccgtgaccagcgccgtgggccccgtgagcatggccgcccccaccgccatcaccgaggccggcacccagccccagaagggcgtgagccaggtgaaggagggccccgtgctggccaccagcagcggcgccggcgtgttcaagatgggcagattccaggtgagcgtggccgccgacggcgcccagaaggagggcaagaacaagagcgaggacgccaagagcgtgcacttcgagagcagcaccagcgagagcagcgtgctgagcagcagcagccccgagagcaccctggtgaagcccgagcccaacggcatcaccatccccggcatcagcagcgacgtgcccgagagcgcccacaagaccaccgccagcgaggccaagagcgacaccggccagcccaccaaggtgggcagattccaggtgaccaccaccgccaacaaggtgggcagattcagcgtgagcaagaccgaggacaagatcaccgacaccaagaaggagggccccgtggccagcccccccttcatggacctggagcaggccgtgctgcccgccgtgatccccaagaaggagaagcccgagctgagcgagcccagccacctgaacggccccagcagcgaccccgaggccgccttcctgagcagagacgtggacgacggcagcggcagcccccacagcccccaccagctgagcagcaagagcctgcccagccagaacctgagccagagcctgagcaacagcttcaacagcagctacatgagcagcgacaacgagagcgacatcgaggacgaggacctgaagctggagctgagaagactgagagacaagcacctgaaggagatccaggacctgcagagcagacagaagcacgagatcgagagcctgtacaccaagctgggcaaggtgccccccgccgtgatcatcccccccgccgcccccctgagcggcagaagaagaagacccaccaagagcaagggcagcaagagcagcagaagcagcagcctgggcaacaagagcccccagctgagcggcaacctgagcggccagagcgccgccagcgtgctgcacccccagcagaccctgcacccccccggcaacatccccgagagcggccagaaccagctgctgcagcccctgaagcccagccccagcagcgacaacctgtacagcgccttcaccagcgacggcgccatcagcgtgcccagcctgagcgcccccggccagggcaccagcagcaccaacaccgtgggcgccaccgtgaacagccaggccgcccaggcccagccccccgccatgaccagcagcagaaagggcaccttcaccgacgacctgcacaagctggtggacaactgggccagagacgccatgaacctgagcggcagaagaggcagcaagggccacatgaactacgagggccccggcatggccagaaagttcagcgcccccggccagctgtgcatcagcatgaccagcaacctgggcggcagcgcccccatcagcgccgccagcgccaccagcctgggccacttcaccaagagcatgtgccccccccagcagtacggcttccccgccacccccttcggcgcccagtggagcggcaccggcggccccgccccccagcccctgggccagttccagcccgtgggcaccgccagcctgcagaacttcaacatcagcaacctgcagaagagcatcagcaacccccccggcagcaacctgagaaccacctag

SEQ ID NO: 200789 - DNA, 5928 bp, Artificial Sequence
  derived and/or modified sequence
atggacatcaagaagaaggacttctgcagcgtgttcgtgatcatcaacagccactgctgctgctgcccccagaaggactgcatcaacgagggcgtgaagcccgccagcttcgacaaggtggccatccccgaggtgaaggagatcatcgagggctgcatcagacagaacaaggacgagagatacagcatcaaggacctgctgaaccacgccttcttccaggaggagaccggcgtgagagtggagctggccgaggaggacgacggcgagaagatcgccatcaagctgtggctgagaatcgaggacatcaagaagctgaagggcaagtacaaggacaacgaggccatcgagttcagcttcgacctggagagagacgtgcccgaggacgtggcccaggagatggtggagagcggctacgtgtgcgagggcgaccacaagaccatggccaaggccatcaaggacagagtgagcctgatcaagagaaagagagagcagagacagctggtgagagaggagcaggagaagaagaagcaggaggagagcagcctgaagcagcaggtggagcagagcagcgccagccagaccggcatcaagcagctgcccagcgccagcaccggcatccccaccgccagcaccaccagcgccagcgtgagcacccaggtggagcccgaggagcccgaggccgaccagcaccagcagctgcagtaccagcagcccagcatcagcgtgctgagcgacggcaccgtggacagcggccagggcagcagcgtgttcaccgagagcagagtgagcagccagcagaccgtgagctacggcagccagcacgagcaggcccacagcaccggcaccgtgcccggccacatccccagcaccgtgcaggcccagagccagccccacggcgtgtacccccccagcagcgtggcccagggccagagccagggccagcccagcagcagcagcctgaccggcgtgagcagcagccagcccatccagcacccccagcagcagcagggcatccagcagaccgcccccccccagcagaccgtgcagtacagcctgagccagaccagcaccagcagcgaggccaccaccgcccagcccgtgagccagccccaggccccccaggtgctgccccaggtgagcgccggcaagcagctgcccgtgagccagcccgtgcccaccatccagggcgagccccagatccccgtggccacccagcccagcgtggtgcccgtgcacagcggcgcccacttcctgcccgtgggccagcccctgcccacccccctgctgccccagtaccccgtgagccagatccccatcagcaccccccacgtgagcaccgcccagaccggcttcagcagcctgcccatcaccatggccgccggcatcacccagcccctgctgaccctggccagcagcgccaccaccgccgccatccccggcgtgagcaccgtggtgcccagccagctgcccaccctgctgcagcccgtgacccagctgcccagccaggtgcacccccagctgctgcagcccgccgtgcagagcatgggcatccccgccaacctgggccaggccgccgaggtgcccctgagcagcggcgacgtgctgtaccagggcttcccccccagactgcccccccagtaccccggcgacagcaacatcgcccccagcagcaacgtggccagcgtgtgcatccacagcaccgtgctgagcccccccatgcccaccgaggtgctggccacccccggctacttccccaccgtggtgcagccctacgtggagagcaacctgctggtgcccatgggcggcgtgggcggccaggtgcaggtgagccagcccggcggcagcctggcccaggcccccaccaccagcagccagcaggccgtgctggagagcacccagggcgtgagccaggtggcccccgccgagcccgtggccgtggcccagacccaggccacccagcccaccaccctggccagcagcgtggacagcgcccacagcgacgtggccagcggcatgagcgacggcaacgagaacgtgcccagcagcagcggcagacacgagggcagaaccaccaagagacactacagaaagagcgtgagaagcagaagcagacacgagaagaccagcagacccaagctgagaatcctgaacgtgagcaacaagggcgacagagtggtggagtgccagctggagacccacaacagaaagatggtgaccttcaagttcgacctggacggcgacaaccccgaggagatcgccaccatcatggtgaacaacgacttcatcctggccatcgagagagagagcttcgtggaccaggtgagagagatcatcgagaaggccgacgagatgctgagcgaggacgtgagcgtggagcccgagggcgaccagggcctggagagcctgcagggcaaggacgactacggcttcagcggcagccagaagctggagggcgagttcaagcagcccatccccgccagcagcatgccccagcagatcggcatccccaccagcagcctgacccaggtggtgcacagcgccggcagaagattcatcgtgagccccgtgcccgagagcagactgagagagagcaaggtgttccccagcgagatcaccgacaccgtggccgccagcaccgcccagagccccggcatgaacctgagccacagcgccagcagcctgagcctgcagcaggccttcagcgagctgagaagagcccagatgaccgagggccccaacaccgccccccccaacttcagccacaccggccccaccttccccgtggtgccccccttcctgagcagcatcgccggcgtgcccaccaccgccgccgccaccgcccccgtgcccgccaccagcagcccccccaacgacatcagcaccagcgtgatccagagcgaggtgaccgtgcccaccgaggagggcatcgccggcgtggccaccagcaccggcgtggtgaccagcggcggcctgcccatcccccccgtgagcgagagccccgtgctgagcagcgtggtgagcagcatcaccatccccgccgtggtgagcatcagcaccaccagccccagcctgcaggtgcccaccagcaccagcgagatcgtggtgagcagcaccgccctgtaccccagcgtgaccgtgagcgccaccagcgccagcgccggcggcagcaccgccacccccggccccaagccccccgccgtggtgagccagcaggccgccggcagcaccaccgtgggcgccaccctgaccagcgtgagcaccaccaccagcttccccagcaccgccagccagctgtgcatccagctgagcagcagcaccagcacccccaccctggccgagaccgtggtggtgagcgcccacagcctggacaagaccagccacagcagcaccaccggcctggccttcagcctgagcgcccccagcagcagcagcagccccggcgccggcgtgagcagctacatcagccagcccggcggcctgcaccccctggtgatccccagcgtgatcgccagcacccccatcctgccccaggccgccggccccaccagcacccccctgctgccccaggtgcccagcatcccccccctggtgcagcccgtggccaacgtgcccgccgtgcagcagaccctgatccacagccagccccagcccgccctgctgcccaaccagccccacacccactgccccgaggtggacagcgacacccagcccaaggcccccggcatcgacgacatcaagaccctggaggagaagctgagaagcctgttcagcgagcacagcagcagcggcgcccagcacgccagcgtgagcctggagaccagcctggtgatcgagagcaccgtgacccccggcatccccaccaccgccgtggcccccagcaagctgctgaccagcaccaccagcacctgcctgccccccaccaacctgcccctgggcaccgtggccctgcccgtgacccccgtggtgacccccggccaggtgagcacccccgtgagcaccaccaccagcggcgtgaagcccggcaccgcccccagcaagccccccctgaccaaggcccccgtgctgcccgtgggcaccgagctgcccgccggcaccctgcccagcgagcagctgccccccttccccggccccagcctgacccagagccagcagcccctggaggacctggacgcccagctgagaagaaccctgagccccgagatgatcaccgtgaccagcgccgtgggccccgtgagcatggccgcccccaccgccatcaccgaggccggcacccagccccagaagggcgtgagccaggtgaaggagggccccgtgctggccaccagcagcggcgccggcgtgttcaagatgggcagattccaggtgagcgtggccgccgacggcgcccagaaggagggcaagaacaagagcgaggacgccaagagcgtgcacttcgagagcagcaccagcgagagcagcgtgctgagcagcagcagccccgagagcaccctggtgaagcccgagcccaacggcatcaccatccccggcatcagcagcgacgtgcccgagagcgcccacaagaccaccgccagcgaggccaagagcgacaccggccagcccaccaaggtgggcagattccaggtgaccaccaccgccaacaaggtgggcagattcagcgtgagcaagaccgaggacaagatcaccgacaccaagaaggagggccccgtggccagcccccccttcatggacctggagcaggccgtgctgcccgccgtgatccccaagaaggagaagcccgagctgagcgagcccagccacctgaacggccccagcagcgaccccgaggccgccttcctgagcagagacgtggacgacggcagcggcagcccccacagcccccaccagctgagcagcaagagcctgcccagccagaacctgagccagagcctgagcaacagcttcaacagcagctacatgagcagcgacaacgagagcgacatcgaggacgaggacctgaagctggagctgagaagactgagagacaagcacctgaaggagatccaggacctgcagagcagacagaagcacgagatcgagagcctgtacaccaagctgggcaaggtgccccccgccgtgatcatcccccccgccgcccccctgagcggcagaagaagaagacccaccaagagcaagggcagcaagagcagcagaagcagcagcctgggcaacaagagcccccagctgagcggcaacctgagcggccagagcgccgccagcgtgctgcacccccagcagaccctgcacccccccggcaacatccccgagagcggccagaaccagctgctgcagcccctgaagcccagccccagcagcgacaacctgtacagcgccttcaccagcgacggcgccatcagcgtgcccagcctgagcgcccccggccagggcaccagcagcaccaacaccgtgggcgccaccgtgaacagccaggccgcccaggcccagccccccgccatgaccagcagcagaaagggcaccttcaccgacgacctgcacaagctggtggacaactgggccagagacgccatgaacctgagcggcagaagaggcagcaagggccacatgaactacgagggccccggcatggccagaaagttcagcgcccccggccagctgtgcatcagcatgaccagcaacctgggcggcagcgcccccatcagcgccgccagcgccaccagcctgggccacttcaccaagagcatgtgccccccccagcagtacggcttccccgccacccccttcggcgcccagtggagcggcaccggcggccccgccccccagcccctgggccagttccagcccgtgggcaccgccagcctgcagaacttcaacatcagcaacctgcagaagagcatcagcaacccccccggcagcaacctgagaaccacctag

SEQ ID NO: 200790 - DNA, 8643 bp, Artificial Sequence
  derived and/or modified sequence
atgagcggcggcgccgccgagaagcagagcagcacccccggcagcctgttcctgagcccccccgcccccgcccccaagaacggcagcagcagcgacagcagcgtgggcgagaagctgggcgccgccgccgccgacgccgtgaccggcagaaccgaggagtacagaagaagaagacacaccatggacaaggacagcagaggcgccgccgccaccaccaccaccaccgagcacagattcttcagaagaagcgtgatctgcgacagcaacgccaccgccctggagctgcccggcctgcccctgagcctgccccagcccagcatccccgccgccgtgccccagagcgccccccccgagccccacagagaggagaccgtgaccgccaccgccaccagccaggtggcccagcagccccccgccgccgccgcccccggcgagcaggccgtggccggccccgcccccagcaccgtgcccagcagcaccagcaaggacagacccgtgagccagcccagcctggtgggcagcaaggaggagcccccccccgccagaagcggcagcggcggcggcagcgccaaggagccccaggaggagagaagccagcagcaggacgacatcgaggagctggagaccaaggccgtgggcatgagcaacgacggcagattcctgaagttcgacatcgagatcggcagaggcagcttcaagaccgtgtacaagggcctggacaccgagaccaccgtggaggtggcctggtgcgagctgcaggacagaaagctgaccaagagcgagagacagagattcaaggaggaggccgagatgctgaagggcctgcagcaccccaacatcgtgagattctacgacagctgggagagcaccgtgaagggcaagaagtgcatcgtgctggtgaccgagctgatgaccagcggcaccctgaagacctacctgaagagattcaaggtgatgaagatcaaggtgctgagaagctggtgcagacagatcctgaagggcctgcagttcctgcacaccagaaccccccccatcatccacagagacctgaagtgcgacaacatcttcatcaccggccccaccggcagcgtgaagatcggcgacctgggcctggccaccctgaagagagccagcttcgccaagagcgtgatcggcacccccgagttcatggcccccgagatgtacgaggagaagtacgacgagagcgtggacgtgtacgccttcggcatgtgcatgctggagatggccaccagcgagtacccctacagcgagtgccagaacgccgcccagatctacagaagagtgaccagcggcgtgaagcccgccagcttcgacaaggtggccatccccgaggtgaaggagatcatcgagggctgcatcagacagaacaaggacgagagatacagcatcaaggacctgctgaaccacgccttcttccaggaggagaccggcgtgagagtggagctggccgaggaggacgacggcgagaagatcgccatcaagctgtggctgagaatcgaggacatcaagaagctgaagggcaagtacaaggacaacgaggccatcgagttcagcttcgacctggagagagacgtgcccgaggacgtggcccaggagatggtggagagcggctacgtgtgcgagggcgaccacaagaccatggccaaggccatcaaggacagagtgagcctgatcaagagaaagagagagcagagacagctggtgagagaggagcaggagaagaagaagcaggaggagagcagcctgaagcagcaggtggagcagagcagcgccagccagaccggcatcaagcagctgcccagcgccagcaccggcatccccaccgccagcaccaccagcgccagcgtgagcacccaggtggagcccgaggagcccgaggccgaccagcaccagcagctgcagtaccagcagcccagcatcagcgtgctgagcgacggcaccgtggacagcggccagggcagcagcgtgttcaccgagagcagagtgagcagccagcagaccgtgagctacggcagccagcacgagcaggcccacagcaccggcaccgtgcccggccacatccccagcaccgtgcaggcccagagccagccccacggcgtgtacccccccagcagcgtgcccagaagaggcagaagcatgagcgtgtgcgtgcccatcttcctgctgctgcccctgtgccccgccagcctgcccgtgctgttccaccccaccgccagcaccgtgtgcaccagcttcagcttccccccccccgactgccccgaggagaccttcgccgagaagctgagcaaggccctggagagcgtgctgcccatgcacagcgccagccagagaaagcacagaagaagcagcctgcccagcctgttcgtgagcaccccccagagcatggcccacccctgcggcggcacccccacctaccccgagagccagatcttcttccccaccatccacgagagacccgtgagcttcagccccccccccacctgcccccccaaggtggccatcagccagagaagaaagagcaccagcttcctggaggcccagacccaccacttccagcccctgctgagaaccgtgggccagagcctgctgccccccggcggcagccccaccaactggacccccgaggccgtggtgatgctgggcaccaccgccagcagagtgaccggcgagagctgcgagatccaggtgcaccccatgttcgagcccagccaggtgtacagcgactacagacccggcctggtgctgcccgaggaggcccactacttcatcccccaggaggccgtgtacgtggccggcgtgcactaccaggccagagtggccgagcagtacgagggcatcccctacaacagcagcgtgctgagcagccccatgaagcagatccccgagcagaagcccgtgcagggcggccccaccagcagcagcgtgttcgagttccccagcggccaggccttcctggtgggccacctgcagaacctgagactggacagcggcctgggccccggcagccccctgagcagcatcagcgcccccatcagcaccgacgccaccagactgaagttccaccccgtgttcgtgccccacagcgcccccgccgtgctgacccacaacaacgagagcagaagcaactgcgtgttcgagttccacgtgcacacccccagcagcagcagcggcgagggcggcggcatcctgccccagagagtgtacagaaacagacaggtggccgtggacctgaaccaggaggagctgcccccccagagcgtgggcctgcacggctacctgcagcccgtgaccgaggagaagcacaactaccacgcccccgagctgaccgtgagcgtggtggagcccatcggccagaactggcccatcggcagccccgagtacagcagcgacagcagccagatcaccagcagcgaccccagcgacttccagagccccccccccaccggcggcgccgccgcccccttcggcagcgacgtgagcatgcccttcatccacctgccccagaccgtgctgcaggagagccccctgttcttctgcttcccccagggcaccaccagccagcaggtgctgaccgccagcttcagcagcggcggcagcgccctgcacccccaggcccagggccagagccagggccagcccagcagcagcagcctgaccggcgtgagcagcagccagcccatccagcacccccagcagcagcagggcatccagcagaccgcccccccccagcagaccgtgcagtacagcctgagccagaccagcaccagcagcgaggccaccaccgcccagcccgtgagccagccccaggccccccaggtgctgccccaggtgagcgccggcaagcagctgcccgtgagccagcccgtgcccaccatccagggcgagccccagatccccgtggccacccagcccagcgtggtgcccgtgcacagcggcgcccacttcctgcccgtgggccagcccctgcccacccccctgctgccccagtaccccgtgagccagatccccatcagcaccccccacgtgagcaccgcccagaccggcttcagcagcctgcccatcaccatggccgccggcatcacccagcccctgctgaccctggccagcagcgccaccaccgccgccatccccggcgtgagcaccgtggtgcccagccagctgcccaccctgctgcagcccgtgacccagctgcccagccaggtgcacccccagctgctgcagcccgccgtgcagagcatgggcatccccgccaacctgggccaggccgccgaggtgcccctgagcagcggcgacgtgctgtaccagggcttcccccccagactgcccccccagtaccccggcgacagcaacatcgcccccagcagcaacgtggccagcgtgtgcatccacagcaccgtgctgagcccccccatgcccaccgaggtgctggccacccccggctacttccccaccgtggtgcagccctacgtggagagcaacctgctggtgcccatgggcggcgtgggcggccaggtgcaggtgagccagcccggcggcagcctggcccaggcccccaccaccagcagccagcaggccgtgctggagagcacccagggcgtgagccaggtggcccccgccgagcccgtggccgtggcccagacccaggccacccagcccaccaccctggccagcagcgtggacagcgcccacagcgacgtggccagcggcatgagcgacggcaacgagaacgtgcccagcagcagcggcagacacgagggcagaaccaccaagagacactacagaaagagcgtgagaagcagaagcagacacgagaagaccagcagacccaagctgagaatcctgaacgtgagcaacaagggcgacagagtggtggagtgccagctggagacccacaacagaaagatggtgaccttcaagttcgacctggacggcgacaaccccgaggagatcgccaccatcatggtgaacaacgacttcatcctggccatcgagagagagagcttcgtggaccaggtgagagagatcatcgagaaggccgacgagatgctgagcgaggacgtgagcgtggagcccgagggcgaccagggcctggagagcctgcagggcaaggacgactacggcttcagcggcagccagaagctggagggcgagttcaagcagcccatccccgccagcagcatgccccagcagatcggcatccccaccagcagcctgacccaggtggtgcacagcgccggcagaagattcatcgtgagccccgtgcccgagagcagactgagagagagcaaggtgttccccagcgagatcaccgacaccgtggccgccagcaccgcccagagccccggcatgaacctgagccacagcgccagcagcctgagcctgcagcaggccttcagcgagctgagaagagcccagatgaccgagggccccaacaccgccccccccaacttcagccacaccggccccaccttccccgtggtgccccccttcctgagcagcatcgccggcgtgcccaccaccgccgccgccaccgcccccgtgcccgccaccagcagcccccccaacgacatcagcaccagcgtgatccagagcgaggtgaccgtgcccaccgaggagggcatcgccggcgtggccaccagcaccggcgtggtgaccagcggcggcctgcccatcccccccgtgagcgagagccccgtgctgagcagcgtggtgagcagcatcaccatccccgccgtggtgagcatcagcaccaccagccccagcctgcaggtgcccaccagcaccagcgagatcgtggtgagcagcaccgccctgtaccccagcgtgaccgtgagcgccaccagcgccagcgccggcggcagcaccgccacccccggccccaagccccccgccgtggtgagccagcaggccgccggcagcaccaccgtgggcgccaccctgaccagcgtgagcaccaccaccagcttccccagcaccgccagccagctgtgcatccagctgagcagcagcaccagcacccccaccctggccgagaccgtggtggtgagcgcccacagcctggacaagaccagccacagcagcaccaccggcctggccttcagcctgagcgcccccagcagcagcagcagccccggcgccggcgtgagcagctacatcagccagcccggcggcctgcaccccctggtgatccccagcgtgatcgccagcacccccatcctgccccaggccgccggccccaccagcacccccctgctgccccaggtgcccagcatcccccccctggtgcagcccgtggccaacgtgcccgccgtgcagcagaccctgatccacagccagccccagcccgccctgctgcccaaccagccccacacccactgccccgaggtggacagcgacacccagcccaaggcccccggcatcgacgacatcaagaccctggaggagaagctgagaagcctgttcagcgagcacagcagcagcggcgcccagcacgccagcgtgagcctggagaccagcctggtgatcgagagcaccgtgacccccggcatccccaccaccgccgtggcccccagcaagctgctgaccagcaccaccagcacctgcctgccccccaccaacctgcccctgggcaccgtggccctgcccgtgacccccgtggtgacccccggccaggtgagcacccccgtgagcaccaccaccagcggcgtgaagcccggcaccgcccccagcaagccccccctgaccaaggcccccgtgctgcccgtgggcaccgagctgcccgccggcaccctgcccagcgagcagctgccccccttccccggccccagcctgacccagagccagcagcccctggaggacctggacgcccagctgagaagaaccctgagccccgagatgatcaccgtgaccagcgccgtgggccccgtgagcatggccgcccccaccgccatcaccgaggccggcacccagccccagaagggcgtgagccaggtgaaggagggccccgtgctggccaccagcagcggcgccggcgtgttcaagatgggcagattccaggtgagcgtggccgccgacggcgcccagaaggagggcaagaacaagagcgaggacgccaagagcgtgcacttcgagagcagcaccagcgagagcagcgtgctgagcagcagcagccccgagagcaccctggtgaagcccgagcccaacggcatcaccatccccggcatcagcagcgacgtgcccgagagcgcccacaagaccaccgccagcgaggccaagagcgacaccggccagcccaccaaggtgggcagattccaggtgaccaccaccgccaacaaggtgggcagattcagcgtgagcaagaccgaggacaagatcaccgacaccaagaaggagggccccgtggccagcccccccttcatggacctggagcaggccgtgctgcccgccgtgatccccaagaaggagaagcccgagctgagcgagcccagccacctgaacggccccagcagcgaccccgaggccgccttcctgagcagagacgtggacgacggcagcggcagcccccacagcccccaccagctgagcagcaagagcctgcccagccagaacctgagccagagcctgagcaacagcttcaacagcagctacatgagcagcgacaacgagagcgacatcgaggacgaggacctgaagctggagctgagaagactgagagacaagcacctgaaggagatccaggacctgcagagcagacagaagcacgagatcgagagcctgtacaccaagctgggcaaggtgccccccgccgtgatcatcccccccgccgcccccctgagcggcagaagaagaagacccaccaagagcaagggcagcaagagcagcagaagcagcagcctgggcaacaagagcccccagctgagcggcaacctgagcggccagagcgccgccagcgtgctgcacccccagcagaccctgcacccccccggcaacatccccgagagcggccagaaccagctgctgcagcccctgaagcccagccccagcagcgacaacctgtacagcgccttcaccagcgacggcgccatcagcgtgcccagcctgagcgcccccggccagggcaccagcagcaccaacaccgtgggcgccaccgtgaacagccaggccgcccaggcccagccccccgccatgaccagcagcagaaagggcaccttcaccgacgacctgcacaagctggtggacaactgggccagagacgccatgaacctgagcggcagaagaggcagcaagggccacatgaactacgagggccccggcatggccagaaagttcagcgcccccggccagctgtgcatcagcatgaccagcaacctgggcggcagcgcccccatcagcgccgccagcgccaccagcctgggccacttcaccaagagcatgtgccccccccagcagtacggcttccccgccacccccttcggcgcccagtggagcggcaccggcggccccgccccccagcccctgggccagttccagcccgtgggcaccgccagcctgcagaacttcaacatcagcaacctgcagaagagcatcagcaacccccccggcagcaacctgagaaccacctag

SEQ ID NO: 200791 - DNA, 7149 bp, Artificial Sequence
  derived and/or modified sequence
atgtccggcggcgctgccgagaagcaatcttccactcccggttcactgttcctctcaccccctgcccctgccccaaagaatgggtcgagttcagacagcagtgtaggagaaaaactgggagccgctgccgcagatgcagtgacaggccggactgaagaataccgacgtagacgacatacgatggacaaggattctagaggggccgccgccacaactactacgacagaacacagattctttcgccgatctgttatttgcgactcaaatgcaacagctctcgagctgcccggccttccacttagcctcccacagccctcaatcccggcagctgtgccacagtctgctccaccagagccacatcgcgaagagactgtgacagcaactgccacctcccaggtggctcagcagccaccggccgccgccgccccaggtgagcaggccgttgccgggcccgctccatctaccgttccctcctccacgtctaaagaccggcccgttagtcagccctcactggtcggttcaaaagaggagcctccgccggcccgaagcggatcaggcgggggatccgccaaggagccccaagaggaacggtctcagcagcaggatgatattgaggaactagaaactaaagcagtcgggatgtctaacgatggtcgcttcctcaaatttgacattgaaattggcagggggagctttaagaccgtgtataaaggccttgacaccgaaaccactgtggaagtggcctggtgcgagttgcaagacaggaaactgactaaatccgaaagacagaggttcaaagaagaagccgaaatgctcaaagggctgcagcatccgaacatcgtcagattttatgattcgtgggaaagcactgtgaagggaaaaaaatgtattgtgctggttactgagctaatgacttcaggtactctgaagacctacctaaaaagattcaaagtcatgaagataaaggtcttgagatcttggtgtagacagatcctgaagggattgcaatttctgcatacaaggacaccccctatcattcaccgcgacctcaagtgtgacaacatcttcatcactggacccacaggttcagtcaaaatcggcgacttaggcctggccacccttaagcgtgctagcttcgctaaaagtgtgatcgggactccagagttcatggctccggagatgtatgaggaaaagtacgacgaaagtgttgatgtgtacgcattcggcatgtgcatgctagagatggctacaagcgagtacccatactctgaatgccagaatgctgctcagatatataggcgtgtcacctcaggggtgaagcctgcttcattcgacaaagtcgccatacccgaagtcaaggaaataattgagggctgtattcgacagaacaaagatgagaggtacagtataaaagacctgctcaaccatgcattcttccaggaggagaccggtgtccgggtagaattagccgaggaggacgatggagagaaaatcgccattaaactatggcttcggattgaggatatcaaaaagcttaagggtaaatataaagacaacgaagcaattgagttcagcttcgacctggagagggacgttcctgaagatgtggctcaagagatggtggaatctggctatgtgtgcgagggagatcataaaaccatggctaaagccatcaaggaccgggtcagcctcattaaacggaagcgggaacagagacagcttgtaagagaggaacaggagaaaaaaaagcaggaggagtcgtctttgaaacaacaggtggagcagtcctctgccagtcagacaggcattaagcagttacctagcgctagtacagggattccaaccgcatccactacgtccgcttcagtgtctacccaggtggaacccgaggaacccgaggctgaccaacatcaacagctgcagtaccagcagcccagcatttccgttttgtctgacggaacagttgatagtgggcaggggtcgagcgtgttcacagagtcacgggtttcctcccagcagacagtgtcctatggctcccagcacgagcaggcgcattccacagggactgttccaggacacattccttccaccgtccaggctcagtcacagccccatggagtgtacccaccttcaagcgtggctcaagggcagtctcaaggacagccttccagctcctccctaactggggtttcatctagtcaacctatccagcacccacaacagcagcaaggtattcagcaaacagcgcctccacaacagacggtccagtactctttgagtcaaactagtacgtccagcgaggcaactactgcacagcccgtgagtcagccccaggcacctcaggtcctcccacaggtgtcagccggaaagcagctacccgtttctcaaccggtgccaactatacagggggaacctcagatacctgttgcaactcagccgtccgtagtccctgtgcactccggagcccactttctgccagtggggcagccactgccaaccccactgctcccccagtaccctgtatcccaaatacccatttcaactccacacgttagcacagcgcagacaggcttttcatctttgccgattactatggcagcgggcatcactcagcccctgttaactctggcttccagcgcaacaacggccgctatccctggggtcagcactgttgtccccagtcagcttccaactctcctccagcctgtgactcagctgccgagtcaagttcatccccagctactgcagccagccgtgcagtcaatgggcatacctgcaaatctggggcaggccgccgaggttcccctttcatccggtgacgtgctgtaccaggggttccctccacgactgcctcctcaatacccaggcgatagtaatattgccccctcctctaacgtagcgagcgtttgtatccactctacagtgttgagccctccaatgccaacagaagttctggccactccggggtacttccccacagtggttcagccatacgttgagagcaatcttctcgtccccatgggtggtgtgggcggccaggtgcaggtttctcaacctggcggatctctagcacaggcaccgacaacctccagtcagcaggcggtactggaatcaactcagggagtgtcacaggttgctccggctgagccagttgccgtggcccaaacgcaggcaacccagcccactacactcgctagtagcgtagattccgctcacagtgacgtggcctcgggaatgtccgatgggaacgagaacgtgccatcatccagcggacgtcatgaggggcgtactactaagcgccattataggaagtcagtccgaagcaggtcccgccatgagaaaaccagccgcccaaaacttaggatcctcaatgtgtctaataaaggggaccgagttgtggagtgtcagctggagacccacaaccgaaagatggttacctttaagttcgatctggacggtgataatcctgaagagatcgctactatcatggtgaataacgatttcatacttgccattgaaagggagtctttcgtcgatcaggtgcgagagatcatcgaaaaggccgacgaaatgctgagcgaggacgtttccgttgaacccgagggcgaccaggggctggaatcattgcagggaaaagacgattacggattttctggcagccagaaactggaaggcgaatttaagcagccaatccccgctagttccatgccgcagcaaataggaattccaacctcctccctgacacaggttgtgcattccgccggcaggcgattcatcgtttctcccgtgcccgagtcgcgcctgcgggagagcaaggtgttccccagtgagatcacagatacagtggcagcctccacagcgcagtctcctggcatgaaccttagccacagcgctagcagcttgagtctgcagcaggcttttagcgaactgagaagagcccagatgaccgaaggaccgaatactgcacctcctaattttagccacaccggcccgaccttccccgtcgtgcctccctttttgagcagcattgccggggtgcctacaaccgctgctgctacagctccggtgccagcgacaagttcgccacctaatgatatctccacatccgtgatccagagcgaagtgacagtccccaccgaggagggtatcgccggagtggcaacttccactggcgttgtaacatccggtggactgcccatcccacccgtctctgagagtcccgtgttaagcagcgtggtctcctccatcaccatcccagctgttgttagcatcagcaccaccagtcccagccttcaagtcccaacatctacatccgagatcgtggtgagttccaccgccctgtatccctccgtcactgtgtctgccacctctgcctctgcgggcggctctaccgctacgccaggaccaaagccgccagctgtagtatcgcagcaggcagccggtagcactacagtgggggctaccctgacttccgtgtctaccaccacatcctttccaagtaccgcatcccagctatgtatccagttaagctcctctacttccacccccaccctggccgagacagtggtggtgtcggcacattcattggataaaacttctcactcaagcacaacaggactcgctttcagtcttagtgcaccttctagtagtagctctcctggagcaggggttagttcctatatctcacagcccggcggcttacatcccctggttattccttccgttatcgctagtacaccaattctcccacaagccgccggtcccacatctaccccgctcctcccacaagtgccgtccatacctccactcgttcagcctgtggcgaacgtcccagccgtgcagcaaaccctcatccacagtcagccacagccagcgctgctgcccaaccaaccccatacgcactgccccgaggtggacagcgacacacaaccgaaagcaccggggatcgatgacatcaaaaccctggaggaaaagctgcgatccctgttcagtgaacatagctcttctggggcacagcatgcatcggtttcactagagactagcctcgttatagaatcgaccgttacccccgggatcccaactacggcagtcgcacctagcaaattgctgacatcaacaacaagtacatgtttgcctcccaccaatctgcctcttgggactgtagcgctgcctgtgactccagtagtgacacctggtcaagtcagcacaccagtctcgaccaccacgtcaggtgtgaaacctggaacagcaccatccaagcctcctttaactaaagcgccagtactaccagtcggcacagagttacccgccggcaccttaccatccgaacaactgcctcctttcccagggccatcactgacacagtcgcagcaaccactggaagatcttgacgctcagctgaggagaaccctatctccagagatgattaccgtgactagcgctgtcggccctgtgtccatggctgctcccacagccataaccgaagccgggacccagccgcagaaaggggtgagccaagtgaaggagggtcctgttttagcgacctcttcaggtgctggggtgtttaaaatgggacgcttccaggtgtctgtcgcagccgatggtgctcagaaagaaggcaaaaataaatctgaagatgccaagtctgtgcactttgagagctcgacctccgaatcttctgtgctttcatcgtctagccctgagagcactttggtgaagccggaacccaacggcatcaccatccccggcatcagcagtgatgtgcccgagagcgcacacaagacgaccgcctctgaagccaagtccgatactgggcaacccaccaaggttggtcggtttcaagtgaccaccaccgcaaataaagtcggcagattcagcgtgtccaaaacagaggataaaattactgacacgaaaaaggagggtcccgtggccagtcccccattcatggatttggagcaggctgtactacctgccgttatccccaagaaggagaagccagagttatctgagccatcacatctaaacgggccctcttccgacccagaagccgcattcttaagtagagatgtcgacgacgggtcaggttcgccacacagccctcatcagttatcttccaagagcctgccatcgcaaaacctgagtcaaagcttgagcaattcatttaactcctcctatatgtctagtgataatgaaagcgacatcgaagacgaagacctcaaattagaattaaggcgactgcgggataaacatttaaaggagatccaggacctgcaaagtagacagaagcacgagatagagtctctttacaccaagctgggcaaagtccctcccgctgtcataatcccccctgcagcccccttgtcagggaggagacgacgccctacaaaatccaaggggagcaagtcttctaggtccagctccctgggaaataagtctccacagctgtcaggtaatctgtccggtcagagtgcagcctctgtactacatccgcagcagacgctgcacccccccggcaatattcccgagtcaggccagaaccagctcctgcagcccctgaagccctcgccatccagtgacaatctgtattccgcatttacttctgacggagccatatcggtgccaagcctgtcggctcctggccaagggacctcttctaccaataccgttggcgccacggttaactcacaggccgcacaagctcaaccccccgctatgacgtcatctcggaagggaacattcaccgacgacctccacaaactcgtggataattgggctcgcgatgccatgaatctcagtggacggcggggctccaaaggacacatgaactatgagggtcctgggatggcgaggaaattcagtgcacccgggcaactgtgcatttcaatgacgagcaatcttggcgggagtgcccccattagcgccgcttccgccacctcgttggggcacttcaccaaaagcatgtgcccgccgcagcagtacggtttccccgccaccccctttggggcacaatggagcggaactggcggacccgcacctcaacctctggggcagtttcagccagtgggaacagccagcctccagaacttcaatattagtaatcttcagaaatccatatctaatccccccggtagcaacctccggactacctag

SEQ ID NO: 200792 - DNA, 5928 bp, Artificial Sequence
  derived and/or modified sequence
atggatatcaaaaaaaaagacttctgctccgtgtttgtgatcataaatagccactgttgctgttgtccccaaaaggattgtatcaacgaaggggtcaagcctgctagctttgacaaggtcgcaatcccagaggtcaaggaaattatcgaaggttgtatcagacagaacaaggatgagcgctacagcatcaaggatcttctgaaccacgccttctttcaggaggagacaggcgtacgcgtggagctagcagaggaggatgatggcgaaaagatagcaatcaaactctggctcaggattgaggacattaagaagttgaaagggaaatacaaggacaatgaggctattgagtttagcttcgacttagagagagacgttccagaagatgtcgcccaagagatggtggagagcggatacgtctgcgaaggggaccataaaacaatggctaaggccataaaagatcgagtctccctgattaagagaaagagagaacagcggcaattggtgcgcgaggagcaggagaagaaaaaacaggaagagtcctctctgaagcagcaggtcgagcagtcttcggcttcccaaacgggcatcaagcaattaccttctgcgtctaccggcatcccgaccgcctcgaccacatccgcaagcgtgtccacccaggtggaacctgaggagcctgaggctgaccaacaccaacaacttcaataccagcagccctccatcagcgttctgtccgatgggaccgtagacagtggccaggggtcctctgtattcacagagagccgagtgtcaagccagcaaacagtgagctacggcagtcagcacgaacaagctcactcaaccggcaccgtcccaggacacataccttctaccgtgcaggcacaaagccagcctcatggagtttatcctcccagttccgtggcccagggtcagtcccaaggccaaccttcatcctcctctctgacaggtgtctctagtagtcagccaattcagcatcctcagcaacagcaggggatccagcaaacagctcctcctcagcagacggtacagtactctctctctcagaccagtaccagctctgaggcaacgactgcacagcccgtgagtcagccacaggcccctcaggtactaccccaagtcagcgcaggcaagcagctgcccgtgagccagcccgtaccaacgatacagggagagccgcagattccagtcgctacccagccctctgtagttccagtccattcaggtgcccattttctgccagtgggccagccacttcccacaccactactgccacagtaccccgtctcccagattccaatcagcacccctcacgtatccacagcccagactggtttttcctccctgccgatcacaatggcggcggggatcacccaacctctgctaacgctcgcctcctccgccacaaccgcagccattcctggggtctctaccgttgttccttcccagcttcccactcttttgcaacctgtgacacagctgccttctcaggtgcacccccagctccttcagcccgcggtccagtccatggggatcccagcaaacctgggacaggcagccgaggtccccctctcgagcggcgacgtgctctatcagggtttccctccacgcctgcctccacagtaccccggtgactctaacatcgccccctcctccaatgttgcctccgtctgcatccatagcacagtgctgagtccgcccatgccaaccgaagttttggccacacctggttatttccccaccgtcgtgcagccatatgtggaatcaaatcttctggtcccaatgggcggggtgggtggacaagtacaagtgagccagccagggggcagcctggcgcaagctccaacaactagttcgcagcaggccgtcctggagtcaacccagggggtaagtcaggtggcccctgccgagcctgtggccgtggctcagacacaagccactcagccaaccactctggcttcctccgtggattccgcacacagtgacgtagctagtggcatgagcgacggcaatgagaatgttccatcaagctcaggaagacacgagggtaggacaacaaagaggcattaccgcaagtcagtgcggagccgtagccgacacgagaagaccagcaggccaaaactgaggatcctgaacgtctcaaacaagggtgacagagtcgtggagtgtcagctggaaacacacaacaggaagatggtgactttcaagttcgatctggacggcgacaatcccgaagaaatcgccaccataatggttaacaatgactttatcttggctattgagagagagagcttcgtcgatcaagtgagggagattatcgaaaaagccgacgagatgctttcagaggacgtgtcggtagagcctgagggagatcaggggctggagtccttgcaaggcaaagatgactatggcttctccggcagccagaaactggagggcgaatttaagcagccaattccggcgtcttctatgccccaacaaatcgggattcccactagtagtctcacacaggtggtgcattccgctggtagacgatttatcgtttccccggttcccgaaagccggctgcgggaatctaaggtctttcccagcgaaattacagacaccgtggccgcctcaactgcccagtcacccggtatgaacctcagtcactccgcttcttccctctctctacaacaggccttcagcgaactgcggcgtgcacaaatgaccgaaggccctaacactgcacctccaaacttcagtcatacggggccgacctttccagtggtcccaccatttttgagctccatagctggcgtcccgactaccgccgccgccacagcgcctgtaccagctacatcctcccctcctaatgatatttcaaccagtgttatacagtccgaggttactgtgcctacagaggaaggtatcgccggcgttgcaacctccacaggcgttgttacatccggcggtctgcctattccgccggtctccgagtcccccgtcctcagtagcgtggtgtcgagtattacaatcccagctgttgtcagcatcagcactacgtctccctccctgcaagttcccacaagtacatccgagattgttgtgtcttctactgcgctgtacccatcagtcaccgtgtccgctacatccgcttctgccggtgggagtaccgcgacacctgggcccaaaccacctgcagtcgtctctcagcaagccgctgggtccactaccgtgggcgccactcttacctccgtctctactaccacaagctttccgtctaccgcctcccagctctgcatccaactgagtagcagcactagtacacccactttggctgagactgttgtagtttccgctcacagcctagacaaaacctcacattcatccacaacaggcctggccttcagtttaagcgcccctagctccagctccagccctggcgctggcgtttccagttatattagtcaaccaggcggcctgcaccccctggtgattccctctgtcattgcttctacaccaatactgccccaggcagctggacccacctctacccccttgctcccgcaggtgcctagcatcccaccgctagtgcagcccgtggccaacgtgcctgccgtccagcagacattgatccactcccagcctcaacccgcattacttcctaatcagccccatacccattgcccggaagtagattctgatactcaaccgaaggctcccggtattgacgatatcaagaccctcgaagaaaaactccggagcctgttctcagaacatagttcatcaggcgctcagcacgcctcagtgagtctcgaaacctccctcgtaatagagtcaactgtgacacctgggatcccaaccacggctgtggccccaagtaagttactgacgtccactacaagcacttgtcttccccccacaaacctgccgctgggtaccgtagctttgcccgtgacccctgtggttacccctggccaggtgagcacaccggtgtctacgaccacctccggagtcaagcctgggaccgctcctagcaagcctccccttacgaaagctccagttcttccagtgggaaccgaactgcctgccgggaccctcccaagtgagcaattgccaccatttccaggaccctcattaacacagtcgcagcagcccctcgaagatctcgacgcgcagctcaggcgcacactgagtccagaaatgataactgtgacttcagcagtcgggcctgtatctatggcagcgcccaccgcaattaccgaggccggaacacagcctcagaaaggcgtcagtcaggtaaaggaagggccagtgctggcgacctctagtggcgctggagtgtttaaaatgggaagattccaagtctccgtggcggcagatggcgcacagaaagagggaaaaaataaatcggaggacgccaagagtgtgcatttcgaaagttcgacctccgagagctcggttctctctagctcttcccccgaatccactctcgtgaaacccgaacccaatggcatcactatccctggaataagctctgatgtgcctgaatccgcgcataaaacaactgcatcagaagccaagagcgacactggccagcctaccaaagtaggccggtttcaggttactacgaccgctaacaaggtgggaaggttttccgttagcaaaaccgaagataaaattacggatactaagaaagaaggaccggtggctagcccccccttcatggatttagagcaggccgtattacctgccgtcatacctaagaaagaaaagcccgagctctcagaaccatctcatcttaacggcccatcctcggatcctgaagccgcctttctgagcagagatgtggacgacggctccggttctccgcacagcccacatcaattatcatcgaagtctcttcctagccagaatctgagccaaagcttatcaaactcattcaattcaagctacatgagtagcgacaacgagtccgacatcgaggacgaggacctgaagctggagttacgtcgacttcgtgataagcacttgaaggaaatacaagatctgcagagtaggcagaagcacgagattgaatccctctatacaaagttgggcaaagtgcctcctgccgtgataattcctcctgcagcccccctgagcggcagacggaggagacctacaaaatcgaaaggcagcaaatcaagccggtcatcctcacttggcaataaaagtccccagttgagtggaaacctgtccgggcagtcagccgctagtgtgcttcatcctcaacaaaccttgcatcccccgggaaatatccccgagagcggccagaaccagctgttacagccactcaaacccagcccctcctctgacaacctgtattctgccttcacatcagatggcgcgatctcagtgcctagtctgtctgctcccgggcagggcaccagctcaactaacactgtgggtgccaccgtgaatagccaagccgctcaagctcaaccgcccgctatgacctcatcccgtaagggcacgtttacagacgatcttcacaaattggtggataattgggctagagatgccatgaacctaagtggacggcggggtagtaagggacatatgaactacgaaggtccaggaatggcccgaaaattctccgctccgggccaactgtgcatttcgatgacatcgaacctggggggcagcgcccctatcagcgcagcgtccgccacgtcgctcggtcacttcacaaaaagtatgtgccccccccaacagtatggctttcccgctactccttttggggctcagtggagtggtaccggaggaccggctccccaaccacttggccagtttcagccagtgggaacggcttcccttcaaaattttaacatttccaatctgcaaaaatccatctcaaatccccccgggtccaatttgaggaccacttag

SEQ ID NO: 200793 - DNA, 8643 bp, Artificial Sequence
  derived and/or modified sequence
atgagcggtggcgccgccgagaaacagagcagcacgcccggcagcctgtttcttagtcctcctgcccctgcacccaaaaacgggtcaagctctgattcctcagttggggagaagctgggggcagcagctgctgacgcggtgacagggaggacagaggaatatcggcgccgcagacacacaatggacaaggattcccggggggccgcggccactacaaccacaaccgagcaccgattctttagacgtagtgtaatctgcgactcaaacgctactgcactcgagcttccaggactgcctctcagcctgccccagccaagtattccagccgcggtgccacagagtgcaccccccgagccgcaccgggaggagactgtcactgccactgcaacatcccaggttgcgcagcaacctccagcggcagccgctcctggagagcaggccgtggccgggcccgcaccttccaccgtgccctcaagcacttcaaaggaccggcccgtcagtcagccctcactggtaggaagcaaagaggagcccccccctgccaggtccgggagcggcggcgggagtgccaaggaaccccaggaggaacggagccagcagcaggacgatattgaggagttggaaacaaaggctgttggcatgtcgaatgatggccgatttctgaaatttgatatcgagattgggagaggcagctttaagaccgtgtacaagggccttgacaccgaaacgaccgtggaggtggcctggtgcgaactccaagatcgaaaactcacaaaatccgaacggcagcggtttaaagaagaagctgagatgcttaaagggcttcagcaccccaacatcgtgaggttttacgatagttgggaatctacggtgaagggaaaaaaatgtatcgtgctcgtaaccgaactgatgacctccggcactctgaaaacctatctgaagcgctttaaagtaatgaaaattaaggtgctccgatcctggtgtagacaaattctgaaagggctgcagttcttacatacacggacacccccgatcatacatcgggatttgaaatgcgataatatctttataaccggccccacaggtagcgtcaagatcggcgacctggggctggcaacacttaaaagagcatcattcgccaaatctgtaattggcacgcccgagtttatggcacccgagatgtacgaagaaaagtacgacgagtcagtggacgtgtacgctttcggaatgtgcatgctcgagatggctacaagtgagtatccatattcagagtgccaaaatgctgcacaaatttaccggcgtgtgactagtggggtgaagccagcgtcatttgacaaggtggctatcccagaggttaaagagattattgaaggatgtatacgacagaataaggacgaaaggtatagtatcaaagacctgctgaatcacgccttttttcaggaagagacgggcgtgcgggtggagctggcagaggaggatgatggtgagaaaatcgccatcaaactgtggctacggattgaggacattaaaaagctcaaagggaagtacaaagacaatgaagctattgagttctcctttgacttagagagagacgttcctgaggatgtagcacaggagatggtggaaagcgggtatgtctgtgagggcgatcacaagaccatggctaaggcaattaaggatcgcgtgtctctcattaagagaaagcgtgaacagcgccagctcgtgcgggaggaacaggaaaagaaaaagcaggaagagagcagcctgaagcagcaggtcgaacagagctctgccagtcagacgggtattaaacaactgccaagtgcctccacgggaatacccacagcctccacaacctcagcctctgtttcaacacaagtggagccagaagaacccgaagctgaccaacaccagcaactgcagtatcagcagccgagtatttctgtgctatccgatggcaccgtggacagcggacagggcagttccgtgtttaccgaatctagagtatcctcccagcagaccgtctcttatggctcgcagcacgaacaagcacacagcacaggaaccgtgcctggacacatcccaagcacagtgcaagcccaatcccaaccacatggggtgtaccctccctcttcggtcccccgaagaggacggtctatgagcgtgtgcgtgcctatatttctgctgctgcctctgtgccctgcatccctgcctgtgctgtttcaccccacagctagcactgtttgcacatctttttccttcccccctcccgattgtccagaggagacattcgcggaaaaattatccaaagctctcgaatccgtccttcccatgcattctgctagtcagcggaagcacaggcggtcaagcctgccatctctgttcgtgtccaccccacagagtatggcacacccctgtggggggacacctacataccccgaatcccagattttcttcccaactattcacgaaaggcctgtctctttttcacctccccctacttgcccgccaaaagtagctatctcccaaagaagaaaaagcacatcctttcttgaagctcagactcaccattttcagccactgctaaggacggtagggcagagcttgctgccccccggcggttcccccaccaattggactcccgaagccgtcgtaatgctggggactaccgcaagtcgagtgacaggagaatcttgcgaaattcaggtgcatcctatgtttgagcctagccaggtgtattcagactaccggccgggtctagtgctaccagaagaggctcattactttatccctcaggaagctgtgtatgtagccggagtacactaccaggcaagggtggccgagcaatatgagggaatcccgtacaattcttcggtactatcttctccaatgaaacagatccctgagcagaaacctgtccaaggcggccccacaagttcgtcagtattcgaattcccatccggccaagcattcctcgtaggccatctgcagaatttaaggctagactctgggcttgggccagggtctccactgagctccattagcgccccaatttcgacagacgctacgcgcctgaagttccatccagtgttcgttccacacagcgcccccgccgtcttaacacacaataacgaaagccgctcaaattgcgtgttcgaattccacgtgcacaccccgagctcaagttcaggagagggtggtggtattctgccccagcgggtttatcgaaaccgacaggttgcggtggacctcaatcaggaggaactgcctcctcaatctgttgggctgcacggatatttgcagccagtcacagaggaaaagcataactaccacgcccctgagcttactgttagtgtagtcgagcccataggccaaaactggccaatcggatcccccgaatactcctccgacagtagccagattacgagcagcgatccttctgactttcaatcacctccaccaactggcggcgcggcagccccctttggtagtgatgtgtctatgccctttattcatctgccccaaactgtactccaggaatccccactgttcttttgtttccctcagggcacaacgtcccagcaagtgctcaccgcctctttcagcagtggagggagcgccctgcacccccaagcccaaggacaatcccaggggcaaccatcgagcagcagtctgaccggtgtttcaagcagccagcccatacagcacccccagcagcaacagggtatacagcagacagcgccaccacagcagacagtgcagtacagccttagtcagacctctacttccagtgaagccactaccgcacagcccgtgagccagcctcaggctccccaggtgctccctcaagtctccgctggaaagcaactgccagtatcccagcccgtccctacgatccagggcgagcctcagattcccgttgctacacaaccttcagtggtccctgttcactcaggcgcacatttcctcccagtgggtcagcctctgccaactcctctattaccacagtaccctgtttctcagattcccatatcaactccccatgttagtacagcacaaactgggttctcctcactgcctattaccatggcagctggcatcacacagcccctgctgacattggcatcctcggctaccacagcagctattcctggtgtttccactgttgtgccatcacagctaccgactctcctgcagcccgtgacccagctgccgtctcaggtccacccccagctgctccagcccgcggtccagtcgatggggattccggccaatttaggccaggccgccgaggtgccacttagtagcggcgacgtgctgtatcaggggtttccgccaaggctcccgcctcaataccctggtgactctaatattgcacccagctctaacgtagccagcgtctgcattcactctactgtcttaagccctcccatgcctacagaggttctggcaacaccgggatactttccaacagtcgtacaaccatacgttgaatccaatctcctggtcccaatgggcggagtgggcgggcaagtgcaagtttctcagccgggtggctcgctcgcacaggcccccacaaccagcagccagcaagccgtcctggagagcacccagggtgtaagccaggtggctccagccgagcctgttgcagttgcgcagacacaagccacacagcccaccactctggcgtcatcagtggatagcgctcactctgacgttgcctcagggatgagtgacgggaacgaaaatgtcccgagttcttcagggaggcatgaagggagaacaactaagagacactacagaaagagcgttaggtctaggtcgaggcacgaaaaaacatctcggcccaaactgcgcatcctaaatgtctcaaacaagggggatcgggtagtggagtgtcagctggagacccacaatcggaagatggtcacctttaagttcgacctcgatggagacaaccccgaggagatagccacaatcatggtcaataatgattttatcctggctatcgaacgagaatccttcgtggaccaggttcgagagattatcgagaaagccgacgagatgctctccgaggacgttagtgtggaaccagaaggcgaccaaggtcttgagtccttacaaggcaaggatgattacgggtttagtggttctcagaaactggagggcgagttcaaacaaccgatcccagcgagcagcatgcctcagcagattggaattccaacatccagcctcacacaagtcgtgcactccgcgggccggcgattcatcgtgtcccccgtcccagaatcgaggctccgtgaatcaaaagtcttcccaagtgaaattactgacactgtggccgcaagcacagcccagtcaccgggcatgaacttatctcattcagcctcttccctgtccctgcagcaggcatttagcgagctcagaagggctcagatgacagaaggacccaataccgcccctcccaacttttcccataccgggccaacgtttcccgtggtccccccgtttcttagctctatcgccggcgtgcccactacggccgccgccacagctccagtgccggctacctcctccccgccgaacgatataagtacctccgtcatccagagcgaagtgaccgtgccaacggaggagggcattgctggagtggccacatctacaggagtcgtgacctcagggggactccctattccccctgtgtcggagtccccggttcttagcagtgtcgttagtagcatcaccataccagcggtggtgagcatcagcactacttctccgagcttgcaggtccccaccagcacatccgaaatcgtagtatctagcactgctctctaccctagcgtgactgtttctgctactagcgcctctgccggaggttccacggctacacccggcccaaagcccccagcggtagtttcccagcaggccgctggatcaactacagtcggggccaccctgactagcgtctcaactactaccagttttccatctacagccagccagttgtgtatccagcttagctcctctacatctactccgacgctcgcggagaccgtggtggtgtccgctcactccttagataagacttcacattctagcacaaccggtctcgcgttctctctttctgccccaagttccagtagcagtcctggagcaggagtgtcttcctacatttcccagcctggaggacttcacccactggtaatccccagcgtcatcgcctcaaccccaattctgccacaggccgccggccctacaagtaccccactgttgccacaggtcccctccattccgccgcttgttcaacctgtcgcaaatgtacctgccgtccaacagactcttattcacagccagccgcagccagcccttttacctaatcagcctcatacgcattgccctgaagtcgacagcgatacccaaccaaaagccccaggaattgatgacatcaagactctggaagaaaagctaaggagcttgttctccgagcattcctcatccggcgcacagcacgcatccgtgagcctcgaaaccagcctggtcattgaatcaacagtaaccccagggatcccgaccaccgcggtcgccccgtcgaaactgctgacctcaacaacctctacctgtctcccccctaccaaccttcccctcggcaccgtcgctctaccagtgaccccagtggtgacgcccgggcaagtgtccacccctgtcagcactactacatcaggagtgaagcccggaactgctccttcaaagccacccctaaccaaggctccagtactgcccgtcggtacagaattacctgctggtactctgccgtccgagcagttaccaccgttccctggcccctccctcacacagtctcagcaacctctggaggacttggatgcccagttgcgtagaaccctgtcacctgagatgattacagtaacttccgccgtcgggccagtatcaatggcagccccaacagctattaccgaagctggaacccagcctcagaaaggggttagccaggtgaaggaggggcccgttctggcaaccagctctggagccggggtgttcaagatgggacgttttcaagtgagtgtggccgcggacggtgcccagaaggaaggcaagaataagtctgaagatgccaagagtgttcatttcgagtcctcaacgtccgagtcctcggtcctttcgagttctagccccgaatcaacgctggtgaaacctgagcctaacggcataactatcccaggcatcagcagcgacgtccccgagagcgcccacaagactaccgcaagcgaggctaagtccgatacggggcagcccactaaggtaggccggttccaggtgaccactactgcaaacaaagttggtcggtttagcgtgtctaagactgaagataaaattaccgacaccaaaaaggaaggtccagtcgcttccccacctttcatggacctcgaacaagctgtcctgcctgcagtgatcccaaaaaaggagaagccagaactctctgaaccaagccatctgaacggaccctcttccgatcccgaggcggcttttctttcacgggacgttgacgacggatccgggtcaccacactctcctcaccagcttagcagcaaatccctgccgagccagaatctcagccagtctctgtccaactcttttaatagtagctacatgtcttctgataacgaatcagacatagaggatgaagatctgaagctcgaattgcgaagactaagggacaagcacctgaaagagattcaagacctccagagccgccagaagcatgagatcgagagcctgtacaccaagctgggaaaggtgccacccgcggtgatcatcccgcctgctgcgccactcagtggcaggaggaggaggccaacaaagtccaaagggtccaagagctctcgcagcagttccctcggcaacaagagtccgcagctgtctggtaacctctctggccagtccgccgcctccgtgctccatcctcaacaaaccctgcacccacccggtaacatacccgaatccggccagaaccagttgttgcagccgctcaaaccatcacccagtagcgacaacctgtattcagccttcactagtgatggggcaattagcgtcccatccctatccgcacccggccagggcacttcctcaaccaatacagtcggggctaccgtgaattcgcaggccgctcaagcacagccaccggctatgacctccagcagaaaagggacgttcacggacgacctccataagctggttgataactgggctcgggatgccatgaatctcagcgggcggcgtgggtcaaagggacatatgaactacgaaggaccaggcatggcaagaaagttttcggccccagggcagctttgcatcagcatgacctccaatttaggcggctcagcccctatcagtgccgctagtgctaccagcctgggccatttcacgaagtctatgtgcccaccccagcagtatggctttcctgcaacaccgttcggagctcaatggtctggtacaggggggcccgctcctcaaccacttggacagttccagccagtaggaaccgcgagcctgcagaacttcaatattagcaacttgcagaaaagcatttcaaaccctcccggttccaacctcaggacaacctag

SEQ ID NO: 200794 - DNA, 7149 bp, Artificial Sequence
  derived and/or modified sequence
atgtctgggggcgctgctgagaagcagagcagcaccccaggcagcctcttcctgagccccccagccccagcccccaagaatggcagcagcagtgacagctctgtgggggagaagctgggcgctgctgctgctgatgctgtgacaggccgcacagaggagtacagaagaagaagacacaccatggacaaggacagcagaggagctgctgccaccaccaccaccacagagcaccgcttcttcagaagaagtgtcatctgtgacagcaatgccacagccctggagctgcccggcctgcccctgagcctgccccagcccagcatcccagctgctgtgccccagagcgcccctcctgagccccaccgggaggagaccgtgacagccacagccaccagccaggtggcccagcagcccccagctgctgctgcccctggagagcaggccgtggccggccctgcccccagcacagtgcccagcagcaccagcaaggacaggcctgtgtcccagcccagcctggtgggcagcaaggaggagcccccaccagcccggagcggcagcggcggcggcagcgccaaggagccccaggaggagaggagccagcagcaggatgacatcgaggagctggagaccaaggctgtgggcatgagcaatgatggccgcttcctgaagtttgatattgaaattggccggggcagcttcaagacagtgtacaagggcctggacacagagaccaccgtggaggtggcctggtgtgagctgcaggacaggaagctgaccaagtctgagcggcagcgcttcaaggaggaggccgagatgctgaagggcctgcagcaccccaacatcgtgcgcttctatgacagctgggagagcacagtgaagggcaagaagtgcatcgtgctggtgacagagctgatgaccagcggcaccctgaagacctacctgaagcgcttcaaggtgatgaagatcaaggtgctgcgctcctggtgccggcagatcctgaagggcctgcagttcctgcacaccaggaccccacccatcatccaccgggacctgaagtgtgacaacatcttcatcaccggccccactggatctgtgaagatcggggacctgggcctggccaccctgaagagggccagctttgccaagagcgtcatcggcaccccagagttcatggcccctgagatgtatgaggagaagtatgatgagagcgtggatgtgtatgccttcggcatgtgcatgctggagatggccaccagcgagtacccctacagcgagtgccagaatgctgcccagatctacagaagagtgaccagcggcgtgaagccagccagctttgacaaggtggccatccctgaggtgaaggagatcatcgagggctgcatccggcagaacaaggatgagcgctacagcatcaaggacctgctgaaccacgccttcttccaggaggagactggagtgcgggtggagctggccgaggaggatgatggagagaagatcgccatcaagctgtggctgagaattgaggacatcaagaagctgaagggcaagtacaaggacaatgaggccatcgagttctcctttgacctggagagagatgtgcctgaagatgtggcccaggagatggtggagagcggctacgtgtgtgagggggaccacaagaccatggccaaggccatcaaggacagagtgtccctcatcaagaggaagcgggagcagaggcagctggtgcgggaggagcaggagaagaagaagcaggaggagagcagcctgaagcagcaggtggagcagagcagcgccagccagacaggcatcaagcagctgcccagcgccagcacaggcatccccacagccagcaccaccagcgcctctgtgtccacccaggtggagcctgaggagcctgaggccgaccagcaccagcagctgcagtaccagcagcccagcatctctgtgctgagtgatggcaccgtggacagcggccagggcagcagcgtcttcacagagagccgggtgagcagccagcagacagtgtcctatggcagccagcacgagcaggcccacagcactggaacagtgcccggccacatccccagcacagtgcaggcccagagccagccccatggagtgtacccacccagctctgtggcccagggccagagccagggccagcccagcagcagcagcctgactggagtgagcagcagccagcccatccagcacccccagcagcagcagggcatccagcagacagccccaccccagcagacagtgcagtacagcctgagccagaccagcaccagcagcgaggccaccacagcccagcctgtgtcccagccccaggccccccaggtgctgccccaggtgtctgctgggaagcagctgcctgtgtcccagcctgtgcccaccatccagggcgagccccagatccctgtggccacccagcccagcgtggtgcctgtgcacagcggggcccacttcctgcctgtgggccagcccctgcccacccccctgctgccccagtaccctgtgtcccagatccccatcagcaccccccacgtgtccacagcccagacaggcttcagcagcctgcccatcaccatggctgctggcatcacccagcccctgctgaccctggccagcagcgccaccacagctgccatccctggggtgtccacagtggtgcccagccagctgcccaccctgctgcagcctgtgacccagctgcccagccaggtgcacccccagctgctgcagcctgctgtgcagagcatgggcatcccagccaacctgggccaggccgctgaggtgcccctgagcagtggagatgtgctgtaccagggcttccccccccggctgcccccccagtacccaggggacagcaacatcgcccccagcagcaatgtggcctctgtgtgcatccacagcacagtgctgagcccccccatgcccacagaggtgctggccaccccaggctacttccccaccgtggtgcagccctacgtggagagcaacctgctggtgcccatgggcggcgtgggcggccaggtgcaggtgtcccagcccggcggcagcctggcccaggcccccaccaccagcagccagcaggccgtgctggagagcacccagggcgtgtcccaggtggccccagctgagcctgtggccgtggcccagacccaggccacccagcccaccaccctggccagctctgtggacagcgcccacagtgatgtggccagcggcatgtctgatggaaatgaaaatgtgcccagcagcagcggcagacatgagggccgcaccaccaagaggcactacaggaagtctgtgcgcagccgcagcagacatgagaagaccagccggcccaagctgcgcatcctgaatgtgagcaacaagggggacagagtggtggagtgccagctggagacccacaacaggaagatggtgaccttcaagtttgacctggatggagacaaccctgaggagatcgccaccatcatggtgaacaatgacttcatcctggccatcgagcgggagagctttgtggaccaggtgcgggagatcatcgagaaggcagatgagatgctgtctgaagatgtgtctgtggagcctgagggggaccagggcctggagagcctgcagggcaaggatgattatggcttcagcggcagccagaagctggagggggagttcaagcagcccatcccagccagctccatgccccagcagatcggcatccccaccagcagcctgacccaggtggtgcacagcgctggccgccgcttcatcgtgtcccctgtgcctgagagccggctgcgggagagcaaggtgttccccagcgagatcacagacacagtggccgccagcacagcccagagccctggcatgaacctgagccacagcgccagcagcctgagcctgcagcaggccttcagcgagctgcggcgggcccagatgacagagggccccaacacagccccacccaacttcagccacacaggccccaccttccctgtggtgccccccttcctgagcagcattgctggggtgcccaccacagctgctgccacagcccctgtgcctgccaccagcagccccccaaatgacatcagcaccagcgtcatccagagcgaggtgacagtgcccacagaggagggcattgctggggtggccaccagcactggagtggtgaccagcggcggcctgcccatcccccctgtgtctgagagccctgtgctgagctctgtggtgagcagcatcaccatcccagctgtggtgtccatcagcaccaccagccccagcctgcaggtgcccaccagcaccagcgagatcgtggtgagcagcacagccctgtaccccagcgtgacagtgtctgccaccagcgccagcgctgggggcagcacagccaccccaggccccaagcccccagctgtggtgtcccagcaggccgccggcagcaccaccgtgggcgccaccctgacctctgtgtccaccaccaccagcttccccagcacagccagccagctgtgcatccagctgagcagcagcaccagcacccccaccctggccgagaccgtggtggtgtctgcccacagcctggacaagaccagccacagcagcaccaccggcctggccttcagcctgagcgcccccagcagcagcagcagccctggagctggggtgtcctcctacatcagccagcccggcggcctgcaccccctggtgatccccagcgtcatcgccagcacccccatcctgccccaggccgccggccccaccagcacccccctgctgccccaggtgcccagcatcccccccctggtgcagcctgtggccaacgtgcctgctgtgcagcagaccctcatccacagccagccccagcctgccctgctgcccaaccagccccacacccactgcccagaggtggacagcgacacccagcccaaggcccctggcattgatgacatcaagaccctggaggagaagctgcggagcctcttcagcgagcacagcagcagcggggcccagcacgcctctgtgtccctggagaccagcctggtgattgagagcacagtgaccccaggcatccccaccacagctgtggcccccagcaagctgctgaccagcaccaccagcacctgcctgccccccaccaacctgcccctgggcaccgtggccctgcctgtgacccctgtggtgaccccaggccaggtgtccacccctgtgtccaccaccaccagcggcgtgaagccaggcacagcccccagcaagccacccctgaccaaggcccctgtgctgcctgtgggcacagagctgcctgctggcaccctgcccagcgagcagctgccccccttccctggccccagcctgacccagagccagcagcccctggaggacctggatgcccagctgcggaggaccctgagccctgagatgatcaccgtgaccagcgctgtgggccctgtgtccatggccgcccccacagccatcacagaagctggcacccagccccagaagggcgtgtcccaggtgaaggagggccctgtgctggccaccagcagcggggccggggtcttcaagatgggccgcttccaggtgtctgtggccgcagatggagcccagaaggagggcaagaacaagtcagaagatgccaagtctgtgcactttgagagcagcaccagcgagagctctgtgctgagcagcagcagccctgagagcaccctggtgaagccagagcccaacggcatcaccatccctggcatcagcagtgatgtgcctgagagcgcccacaagaccacagccagcgaggccaagagtgacaccggccagcccaccaaggtgggccgcttccaggtgaccaccacagccaacaaggtgggccgcttctctgtgtccaagacagaggacaagatcacagacaccaagaaggagggccctgtggccagcccccccttcatggacctggagcaggccgtgctgcctgctgtgatccccaagaaggagaagccagagctgtctgagcccagccacctgaatggccccagcagtgaccctgaggccgccttcctgagcagagatgtggatgatggcagcggcagcccccacagcccccaccagctgagcagcaagagcctgcccagccagaacctgagccagagcctgagcaacagcttcaacagcagctacatgagcagtgacaatgaaagtgacattgaagatgaggacctgaagctggagctgcggcggctgcgggacaagcacctgaaggagatccaggacctgcagagccggcagaagcatgaaattgagagcctgtacaccaagctgggcaaggtgcccccagctgtgatcatccccccagctgcccccctgtctggaagaagaagaagacccaccaagagcaagggcagcaagagcagccgcagcagcagcctgggcaacaagagcccccagctgagcggcaacctgagcggccagagcgctgcctctgtgctgcacccccagcagaccctgcaccccccaggcaacatccctgagagcggccagaaccagctgctgcagcccctgaagcccagccccagcagtgacaacctgtacagcgccttcaccagtgatggagccatctctgtgcccagcctgagcgcccctggccagggcaccagcagcaccaacacagtgggcgccaccgtgaacagccaggccgcccaggcccagcccccagccatgaccagcagcaggaagggcaccttcacagatgacctgcacaagctggtggacaactgggccagagatgccatgaacctgtctggaagaagaggcagcaagggccacatgaactatgagggccctggcatggccaggaagttcagcgcccctggccagctgtgcatctccatgaccagcaacctgggcggcagcgcccccatctctgctgccagcgccaccagcctgggccacttcaccaagtccatgtgccccccccagcagtatggcttccctgccaccccatttggagcccagtggagcggcaccggcggccctgccccccagcccctgggccagttccagcctgtgggcacagccagcctgcagaacttcaacatcagcaacctgcagaagagcatcagcaaccccccaggcagcaacctgcggaccacctag

SEQ ID NO: 200795 - DNA, 5928 bp, Artificial Sequence
  derived and/or modified sequence
atggacatcaagaagaaggacttctgcagcgtgtttgtgatcatcaacagccactgctgctgctgcccccagaaggactgcatcaatgaaggagtgaagccagccagctttgacaaggtggccatccctgaggtgaaggagatcatcgagggctgcatccggcagaacaaggatgagcgctacagcatcaaggacctgctgaaccacgccttcttccaggaggagaccggggtgcgggtggagctggccgaggaggatgatggagagaagatcgccatcaagctgtggctgagaattgaggacatcaagaagctgaagggcaagtacaaggacaatgaggccatcgagttctcctttgacctggagagagatgtgcctgaagatgtggcccaggagatggtggagagcggctacgtgtgtgagggggaccacaagaccatggccaaggccatcaaggacagagtgtccctcatcaagaggaagcgggagcagaggcagctggtgcgggaggagcaggagaagaagaagcaggaggagagcagcctgaagcagcaggtggagcagagcagcgccagccagacaggcatcaagcagctgcccagcgccagcacaggcatccccacagccagcaccaccagcgcctctgtgtccacccaggtggagcctgaggagcctgaggccgaccagcaccagcagctgcagtaccagcagcccagcatctctgtgctgagtgatggcaccgtggacagcggccagggcagctctgtgttcacagagagccgggtgagcagccagcagacagtgtcctatggcagccagcacgagcaggcccacagcacaggcaccgtgcccggccacatccccagcacagtgcaggcccagagccagccccacggcgtgtacccacccagctctgtggcccagggccagagccagggccagcccagcagcagcagcctgactggagtgagcagcagccagcccatccagcacccccagcagcagcagggcatccagcagacagccccaccccagcagacagtgcagtacagcctgagccagaccagcaccagcagcgaggccaccacagcccagcctgtgtcccagccccaggccccccaggtgctgccccaggtgtctgctgggaagcagctgcctgtgtcccagcctgtgcccaccatccagggcgagccccagatccctgtggccacccagcccagcgtggtgcctgtgcacagcggggcccacttcctgcctgtgggccagcccctgcccacccccctgctgccccagtaccctgtgtcccagatccccatcagcacccctcatgtgtccacagcccagacaggcttcagcagcctgcccatcaccatggccgccggcatcacccagcccctgctgaccctggccagcagcgccaccacagctgccatccctggggtgtccacagtggtgcccagccagctgcccaccctgctgcagcctgtgacccagctgcccagccaggtgcacccccagctgctgcagcctgctgtgcagagcatgggcatcccagccaacctgggccaggccgctgaggtgcccctgagcagtggagatgtgctgtaccagggcttccccccccggctgcccccccagtacccaggggacagcaacatcgcccccagcagcaatgtggcctctgtgtgcatccacagcacagtgctgagcccccccatgcccacagaggtgctggccaccccaggctacttccccaccgtggtgcagccctacgtggagagcaacctgctggtgcccatgggcggcgtgggcggccaggtgcaggtgtcccagcccggcggcagcctggcccaggcccccaccaccagcagccagcaggccgtgctggagagcacccagggcgtgtcccaggtggccccagctgagcctgtggccgtggcccagacccaggccacccagcccaccaccctggccagctctgtggacagcgcccacagtgatgtggccagcggcatgtctgatggaaatgaaaatgtgcccagcagcagcggcagacatgagggccgcaccaccaagaggcactacaggaagtctgtgcgcagccgcagcagacatgagaagaccagccggcccaagctgcgcatcctgaatgtgagcaacaagggggacagagtggtggagtgccagctggagacccacaacaggaagatggtgaccttcaagtttgacctggatggagacaaccctgaggagatcgccaccatcatggtgaacaatgacttcatcctggccatcgagcgggagagctttgtggaccaggtgcgggagatcatcgagaaggcagatgagatgctgtctgaagatgtgtctgtggagcctgagggggaccagggcctggagagcctgcagggcaaggatgattatggcttcagcggcagccagaagctggagggggagttcaagcagcccatcccagccagctccatgccccagcagatcggcatccccaccagcagcctgacccaggtggtgcacagcgctggaagacgcttcatcgtgtcccctgtgcctgagagccggctgcgggagagcaaggtgttccccagcgagatcacagacacagtggccgccagcacagcccagagccctggcatgaacctgagccacagcgccagcagcctgagcctgcagcaggccttcagcgagctgcggcgggcccagatgacagagggccccaacacagccccacccaacttcagccacacaggccccaccttccctgtggtgccccccttcctgagcagcattgctggggtgcccaccacagctgctgccacagcccctgtgcctgccaccagcagccccccaaatgacatcagcaccagcgtcatccagagcgaggtgacagtgcccacagaggagggcattgctggggtggccaccagcactggagtggtgaccagcggcggcctgcccatcccccctgtgtctgagagccctgtgctgagctctgtggtgagcagcatcaccatcccagctgtggtgtccatcagcaccaccagccccagcctgcaggtgcccaccagcaccagcgagatcgtggtgagcagcacagccctgtaccccagcgtgacagtgtctgccaccagcgccagcgctgggggcagcacagccaccccaggccccaagcccccagctgtggtgtcccagcaggccgccggcagcaccaccgtgggcgccaccctgacctctgtgtccaccaccaccagcttccccagcacagccagccagctgtgcatccagctgagcagcagcaccagcacccccaccctggccgagaccgtggtggtgtctgcccacagcctggacaagaccagccacagcagcaccaccggcctggccttcagcctgagcgcccccagcagcagcagcagccctggggccggcgtgagcagctacatcagccagcccggcggcctgcaccccctggtgatccccagcgtgattgccagcacccccatcctgccccaggccgccggccccaccagcacccccctgctgccccaggtgcccagcatcccccccctggtgcagcctgtggccaacgtgcctgctgtgcagcagaccctcatccacagccagccccagcctgccctgctgcccaaccagccccacacccactgcccagaggtggacagcgacacccagcccaaggcccctggcattgatgacatcaagaccctggaggagaagctgcggagcctcttcagcgagcacagcagcagcggggcccagcacgcctctgtgtccctggagaccagcctggtgattgagagcacagtgaccccaggcatccccaccacagctgtggcccccagcaagctgctgaccagcaccaccagcacctgcctgccccccaccaacctgcccctgggcaccgtggccctgcctgtgacccctgtggtgaccccaggccaggtgtccacccctgtgtccaccaccaccagcggcgtgaagccaggcacagcccccagcaagccacccctgaccaaggcccctgtgctgcctgtgggcacagagctgcctgctggcaccctgcccagcgagcagctgccccccttccctggccccagcctgacccagagccagcagcccctggaggacctggatgcccagctgcggaggaccctgagccctgagatgatcaccgtgaccagcgctgtgggccctgtgtccatggccgcccccacagccatcacagaggccggcacccagccccagaagggcgtgtcccaggtgaaggagggccctgtgctggccaccagcagtggagctggggtcttcaagatgggccgcttccaggtgtctgtggccgcagatggagcccagaaggagggcaagaacaagtcagaagatgccaagtctgtgcactttgagagcagcaccagcgagagctctgtgctgagcagcagcagccctgagagcaccctggtgaagccagagcccaacggcatcaccatccctggcatcagcagtgatgtgcctgagagcgcccacaagaccacagccagcgaggccaagagtgacaccggccagcccaccaaggtgggccgcttccaggtgaccaccacagccaacaaggtgggccgcttctctgtgtccaagacagaggacaagatcacagacaccaagaaggagggccctgtggccagcccccccttcatggacctggagcaggccgtgctgcctgctgtgatccccaagaaggagaagccagagctgtctgagcccagccacctgaatggccccagcagtgaccctgaggccgccttcctgagcagagatgtggatgatggcagcggcagcccccacagcccccaccagctgagcagcaagagcctgcccagccagaacctgagccagagcctgagcaacagcttcaacagcagctacatgagcagtgacaatgaaagtgacattgaagatgaggacctgaagctggagctgcggcggctgcgggacaagcacctgaaggagatccaggacctgcagagccggcagaagcatgaaattgagagcctgtacaccaagctgggcaaggtgcccccagctgtgatcatccccccagctgcccccctgagcggcagaagaagaagacccaccaagagcaagggcagcaagagcagccgcagcagcagcctgggcaacaagagcccccagctgagcggcaacctgagcggccagagcgctgcctctgtgctgcacccccagcagaccctgcaccccccaggcaacatccctgagagcggccagaaccagctgctgcagcccctgaagcccagccccagcagtgacaacctgtacagcgccttcaccagtgatggagccatctctgtgcccagcctgagcgcccctggccagggcaccagcagcaccaacacagtgggcgccaccgtgaacagccaggccgcccaggcccagcccccagccatgaccagcagcaggaagggcaccttcacagatgacctgcacaagctggtggacaactgggccagagatgccatgaacctgagcggccggcggggcagcaagggccacatgaactatgagggccctggcatggccaggaagttcagcgcccctggccagctgtgcatctccatgaccagcaacctgggcggcagcgcccccatctctgctgccagcgccaccagcctgggccacttcaccaagtccatgtgccccccccagcagtatggcttccctgccaccccatttggagcccagtggagcggcactggaggccctgccccccagcccctgggccagttccagcctgtgggcacagccagcctgcagaacttcaacatcagcaacctgcagaagagcatcagcaaccccccaggcagcaacctgcggaccacctag

SEQ ID NO: 200796 - DNA, 8643 bp, Artificial Sequence
  derived and/or modified sequence
atgtctgggggcgctgctgagaagcagagcagcaccccaggcagcctcttcctgagccccccagccccagcccccaagaatggcagcagcagtgacagctctgtgggggagaagctgggcgctgctgctgctgatgctgtgacaggccgcacagaggagtacagaagaagaagacacaccatggacaaggacagcagaggagctgctgccaccaccaccaccacagagcaccgcttcttcagaagaagtgtcatctgtgacagcaatgccacagccctggagctgcccggcctgcccctgagcctgccccagcccagcatcccagctgctgtgccccagagcgcccctcctgagccccaccgggaggagaccgtgacagccacagccaccagccaggtggcccagcagcccccagctgctgctgcccctggagagcaggccgtggccggccctgcccccagcacagtgcccagcagcaccagcaaggacaggcctgtgtcccagcccagcctggtgggcagcaaggaggagcccccaccagcccggagcggcagcggcggcggcagcgccaaggagccccaggaggagaggagccagcagcaggatgacatcgaggagctggagaccaaggctgtgggcatgagcaatgatggccgcttcctgaagtttgatattgaaattggccggggcagcttcaagacagtgtacaagggcctggacacagagaccaccgtggaggtggcctggtgtgagctgcaggacaggaagctgaccaagtctgagcggcagcgcttcaaggaggaggccgagatgctgaagggcctgcagcaccccaacatcgtgcgcttctatgacagctgggagagcacagtgaagggcaagaagtgcatcgtgctggtgacagagctgatgaccagcggcaccctgaagacctacctgaagcgcttcaaggtgatgaagatcaaggtgctgcgctcctggtgccggcagatcctgaagggcctgcagttcctgcacaccaggaccccacccatcatccaccgggacctgaagtgtgacaacatcttcatcaccggccccactggatctgtgaagatcggggacctgggcctggccaccctgaagagggccagctttgccaagagcgtcatcggcaccccagagttcatggcccctgagatgtatgaggagaagtatgatgagagcgtggatgtgtatgccttcggcatgtgcatgctggagatggccaccagcgagtacccctacagcgagtgccagaatgctgcccagatctacagaagagtgaccagcggcgtgaagccagccagctttgacaaggtggccatccctgaggtgaaggagatcatcgagggctgcatccggcagaacaaggatgagcgctacagcatcaaggacctgctgaaccacgccttcttccaggaggagactggagtgcgggtggagctggccgaggaggatgatggagagaagatcgccatcaagctgtggctgagaattgaggacatcaagaagctgaagggcaagtacaaggacaatgaggccatcgagttctcctttgacctggagagagatgtgcctgaagatgtggcccaggagatggtggagagcggctacgtgtgtgagggggaccacaagaccatggccaaggccatcaaggacagagtgtccctcatcaagaggaagcgggagcagaggcagctggtgcgggaggagcaggagaagaagaagcaggaggagagcagcctgaagcagcaggtggagcagagcagcgccagccagacaggcatcaagcagctgcccagcgccagcacaggcatccccacagccagcaccaccagcgcctctgtgtccacccaggtggagcctgaggagcctgaggccgaccagcaccagcagctgcagtaccagcagcccagcatctctgtgctgagtgatggcaccgtggacagcggccagggcagcagcgtcttcacagagagccgggtgagcagccagcagacagtgtcctatggcagccagcacgagcaggcccacagcactggaacagtgcccggccacatccccagcacagtgcaggcccagagccagccccatggagtgtacccacccagctctgtgccccggcggggccgctccatgtctgtgtgtgtgcccatcttcctgctgctgcccctgtgcccagccagcctgcctgtgctcttccaccccacagccagcacagtgtgcaccagcttctccttccccccaccagactgcccagaggagacctttgctgagaagctgagcaaggccctggagagcgtgctgcccatgcacagcgccagccagaggaagcacagaagaagcagcctgcccagcctgtttgtgtccaccccccagagcatggcccacccctgtggcggcacccccacctacccagagagccagatcttcttccccaccatccacgagaggcctgtgtccttcagccccccacccacctgcccccccaaggtggccatcagccagaggaggaagagcaccagcttcctggaggcccagacccaccacttccagcccctgctgaggacagtgggccagagcctgctgcccccaggcggcagccccaccaactggaccccagaggccgtggtgatgctgggcaccacagccagccgggtgactggagagagctgtgagatccaggtgcaccccatgtttgagcccagccaggtgtacagcgactaccggcccggcctggtgctgcctgaggaggcccactacttcatcccccaggaggccgtgtatgtggccggcgtgcactaccaggcccgggtggccgagcagtatgagggcatcccctacaacagctctgtgctgagcagccccatgaagcagatccctgagcagaagcctgtgcagggcggccccaccagcagctctgtgtttgagttccccagcggccaggccttcctggtgggccacctgcagaacctgcggctggacagcggcctgggccctggcagccccctgagcagcatcagcgcccccatcagcacagatgccacccggctgaagttccaccctgtgtttgtgccccacagcgccccagctgtgctgacccacaacaatgaaagccgcagcaactgtgtgtttgagttccacgtgcacacccccagcagcagcagtggagagggcggcggcatcctgccccagagggtgtacagaaaccggcaggtggccgtggacctgaaccaggaggagctgcccccccagagcgtgggcctgcacggctacctgcagcctgtgacagaggagaagcacaactaccacgcccctgagctgactgtgtctgtggtggagcccatcggccagaactggcccatcggcagccctgagtacagcagtgacagcagccagatcaccagcagtgaccccagcgacttccagagccccccacccactggaggagctgctgcccccttcggcagtgatgtgtccatgcccttcatccacctgccccagacagtgctgcaggagagccccctcttcttctgcttcccccagggcaccaccagccagcaggtgctgacagccagcttcagcagcggcggcagcgccctgcacccccaggcccagggccagagccagggccagcccagcagcagcagcctgactggagtgagcagcagccagcccatccagcacccccagcagcagcagggcatccagcagacagccccaccccagcagacagtgcagtacagcctgagccagaccagcaccagcagcgaggccaccacagcccagcctgtgtcccagccccaggccccccaggtgctgccccaggtgtctgctgggaagcagctgcctgtgtcccagcctgtgcccaccatccagggcgagccccagatccctgtggccacccagcccagcgtggtgcctgtgcacagcggggcccacttcctgcctgtgggccagcccctgcccacccccctgctgccccagtaccctgtgtcccagatccccatcagcaccccccacgtgtccacagcccagacaggcttcagcagcctgcccatcaccatggctgctggcatcacccagcccctgctgaccctggccagcagcgccaccacagctgccatccctggggtgtccacagtggtgcccagccagctgcccaccctgctgcagcctgtgacccagctgcccagccaggtgcacccccagctgctgcagcctgctgtgcagagcatgggcatcccagccaacctgggccaggccgctgaggtgcccctgagcagtggagatgtgctgtaccagggcttccccccccggctgcccccccagtacccaggggacagcaacatcgcccccagcagcaatgtggcctctgtgtgcatccacagcacagtgctgagcccccccatgcccacagaggtgctggccaccccaggctacttccccaccgtggtgcagccctacgtggagagcaacctgctggtgcccatgggcggcgtgggcggccaggtgcaggtgtcccagcccggcggcagcctggcccaggcccccaccaccagcagccagcaggccgtgctggagagcacccagggcgtgtcccaggtggccccagctgagcctgtggccgtggcccagacccaggccacccagcccaccaccctggccagctctgtggacagcgcccacagtgatgtggccagcggcatgtctgatggaaatgaaaatgtgcccagcagcagcggcagacatgagggccgcaccaccaagaggcactacaggaagtctgtgcgcagccgcagcagacatgagaagaccagccggcccaagctgcgcatcctgaatgtgagcaacaagggggacagagtggtggagtgccagctggagacccacaacaggaagatggtgaccttcaagtttgacctggatggagacaaccctgaggagatcgccaccatcatggtgaacaatgacttcatcctggccatcgagcgggagagctttgtggaccaggtgcgggagatcatcgagaaggcagatgagatgctgtctgaagatgtgtctgtggagcctgagggggaccagggcctggagagcctgcagggcaaggatgattatggcttcagcggcagccagaagctggagggggagttcaagcagcccatcccagccagctccatgccccagcagatcggcatccccaccagcagcctgacccaggtggtgcacagcgctggccgccgcttcatcgtgtcccctgtgcctgagagccggctgcgggagagcaaggtgttccccagcgagatcacagacacagtggccgccagcacagcccagagccctggcatgaacctgagccacagcgccagcagcctgagcctgcagcaggccttcagcgagctgcggcgggcccagatgacagagggccccaacacagccccacccaacttcagccacacaggccccaccttccctgtggtgccccccttcctgagcagcattgctggggtgcccaccacagctgctgccacagcccctgtgcctgccaccagcagccccccaaatgacatcagcaccagcgtcatccagagcgaggtgacagtgcccacagaggagggcattgctggggtggccaccagcactggagtggtgaccagcggcggcctgcccatcccccctgtgtctgagagccctgtgctgagctctgtggtgagcagcatcaccatcccagctgtggtgtccatcagcaccaccagccccagcctgcaggtgcccaccagcaccagcgagatcgtggtgagcagcacagccctgtaccccagcgtgacagtgtctgccaccagcgccagcgctgggggcagcacagccaccccaggccccaagcccccagctgtggtgtcccagcaggccgccggcagcaccaccgtgggcgccaccctgacctctgtgtccaccaccaccagcttccccagcacagccagccagctgtgcatccagctgagcagcagcaccagcacccccaccctggccgagaccgtggtggtgtctgcccacagcctggacaagaccagccacagcagcaccaccggcctggccttcagcctgagcgcccccagcagcagcagcagccctggagctggggtgtcctcctacatcagccagcccggcggcctgcaccccctggtgatccccagcgtcatcgccagcacccccatcctgccccaggccgccggccccaccagcacccccctgctgccccaggtgcccagcatcccccccctggtgcagcctgtggccaacgtgcctgctgtgcagcagaccctcatccacagccagccccagcctgccctgctgcccaaccagccccacacccactgcccagaggtggacagcgacacccagcccaaggcccctggcattgatgacatcaagaccctggaggagaagctgcggagcctcttcagcgagcacagcagcagcggggcccagcacgcctctgtgtccctggagaccagcctggtgattgagagcacagtgaccccaggcatccccaccacagctgtggcccccagcaagctgctgaccagcaccaccagcacctgcctgccccccaccaacctgcccctgggcaccgtggccctgcctgtgacccctgtggtgaccccaggccaggtgtccacccctgtgtccaccaccaccagcggcgtgaagccaggcacagcccccagcaagccacccctgaccaaggcccctgtgctgcctgtgggcacagagctgcctgctggcaccctgcccagcgagcagctgccccccttccctggccccagcctgacccagagccagcagcccctggaggacctggatgcccagctgcggaggaccctgagccctgagatgatcaccgtgaccagcgctgtgggccctgtgtccatggccgcccccacagccatcacagaagctggcacccagccccagaagggcgtgtcccaggtgaaggagggccctgtgctggccaccagcagcggggccggggtcttcaagatgggccgcttccaggtgtctgtggccgcagatggagcccagaaggagggcaagaacaagtcagaagatgccaagtctgtgcactttgagagcagcaccagcgagagctctgtgctgagcagcagcagccctgagagcaccctggtgaagccagagcccaacggcatcaccatccctggcatcagcagtgatgtgcctgagagcgcccacaagaccacagccagcgaggccaagagtgacaccggccagcccaccaaggtgggccgcttccaggtgaccaccacagccaacaaggtgggccgcttctctgtgtccaagacagaggacaagatcacagacaccaagaaggagggccctgtggccagcccccccttcatggacctggagcaggccgtgctgcctgctgtgatccccaagaaggagaagccagagctgtctgagcccagccacctgaatggccccagcagtgaccctgaggccgccttcctgagcagagatgtggatgatggcagcggcagcccccacagcccccaccagctgagcagcaagagcctgcccagccagaacctgagccagagcctgagcaacagcttcaacagcagctacatgagcagtgacaatgaaagtgacattgaagatgaggacctgaagctggagctgcggcggctgcgggacaagcacctgaaggagatccaggacctgcagagccggcagaagcatgaaattgagagcctgtacaccaagctgggcaaggtgcccccagctgtgatcatccccccagctgcccccctgtctggaagaagaagaagacccaccaagagcaagggcagcaagagcagccgcagcagcagcctgggcaacaagagcccccagctgagcggcaacctgagcggccagagcgctgcctctgtgctgcacccccagcagaccctgcaccccccaggcaacatccctgagagcggccagaaccagctgctgcagcccctgaagcccagccccagcagtgacaacctgtacagcgccttcaccagtgatggagccatctctgtgcccagcctgagcgcccctggccagggcaccagcagcaccaacacagtgggcgccaccgtgaacagccaggccgcccaggcccagcccccagccatgaccagcagcaggaagggcaccttcacagatgacctgcacaagctggtggacaactgggccagagatgccatgaacctgtctggaagaagaggcagcaagggccacatgaactatgagggccctggcatggccaggaagttcagcgcccctggccagctgtgcatctccatgaccagcaacctgggcggcagcgcccccatctctgctgccagcgccaccagcctgggccacttcaccaagtccatgtgccccccccagcagtatggcttccctgccaccccatttggagcccagtggagcggcaccggcggccctgccccccagcccctgggccagttccagcctgtgggcacagccagcctgcagaacttcaacatcagcaacctgcagaagagcatcagcaaccccccaggcagcaacctgcggaccacctag

SEQ ID NO: 200797 - DNA, 7149 bp, Artificial Sequence
  derived and/or modified sequence
atgagcggcggcgccgccgagaagcagagcagcacccccggcagcttgtttctcagcccacctgctcctgctccaaaaaatggctcctcatctgattctagcgttggagagaaactgggcgcagccgccgccgacgcagtaacaggacgcacagaggagtacagacgaagacgccataccatggataaagactcgcgcggggcagccgcgactaccactacaacagagcacaggttttttcggaggtctgtgatatgcgatagtaatgctacagccctcgagcttccggggctgccattgagcctcccccagccgagcatcccagcggccgttcctcaatcagcccctcccgaaccacacagagaagaaactgtgactgctaccgcaacgtcccaagtagctcagcagccacccgctgctgctgccccaggagagcaagcagtggccggccctgccccctcaaccgtgccgtcgtccacctcaaaagaccgcccagtgagtcagccctcccttgtcggcagcaaagaggaaccgccccccgccaggtcgggctctggaggtggaagcgctaaagagccccaagaggaaagatctcagcagcaggacgatatagaagagttggaaaccaaggcagtgggcatgtccaatgacggacgtttcttgaaattcgatattgagatcggacggggaagctttaagaccgtgtacaagggactggacacagagactactgtggaagtggcctggtgcgaactgcaggacagaaagctcactaaatctgagagacagcggtttaaagaggaggcagagatgctgaagggtctgcagcacccaaatatcgttcggttttacgacagttgggagagcaccgtgaagggtaaaaaatgtatcgtgctggtgactgagcttatgacaagtggcacactgaaaacctacctgaagcgatttaaggtcatgaaaataaaggtgttaaggtcatggtgccggcagatccttaaaggcctccagtttctccacacacgcaccccaccaatcatccatcgggatctcaagtgcgataacatcttcatcacaggccctaccggctccgtgaagatcggcgacttgggtctggctaccctgaagcgggcttcattcgcaaaatccgttattggtacacccgagttcatggccccagagatgtacgaggaaaaatatgacgagtcagtggacgtctacgcctttggaatgtgtatgctcgagatggcaacgtccgagtacccatactccgagtgtcaaaatgccgcgcagatatacagacgagtgacatccggcgtgaagccggccagtttcgataaggtcgcgattccggaggttaaggaaatcatcgaaggatgcatccgccaaaataaagacgagcgttattctatcaaagatcttctcaatcacgcctttttccaggaggagacgggagtgcgcgtggaactcgctgaggaggatgatggggagaagatagccatcaagctctggctgcgcatcgaagacatcaaaaagctgaagggcaagtacaaggataatgaagccattgaattttccttcgacctggaaagagacgtgcctgaggatgtagcccaggagatggtggagtcagggtacgtgtgcgaaggtgatcacaaaacgatggctaaggctattaaggaccgagtgtccctcatcaagaggaagcgagagcagcgccaactcgtccgcgaagaacaggaaaagaagaaacaagaggaaagctccctcaagcaacaggtcgagcagtcatccgccagccagaccggcattaaacaactgccctctgcgtctacaggaattcctacagcttcaacgacttcagcgtctgtgtctacccaggtggagcctgaagaacccgaagccgaccagcaccagcaactccagtaccagcagccaagtatcagtgtactgagtgatggcacagtggatagtgggcaaggatctagcgtgttcaccgagtctagagttagtagccagcagactgtcagctacggatcacagcatgaacaggcacactcaacaggaaccgtgcccggccacatcccttctaccgtacaagctcagagtcagccccacggggtgtaccctccgagctccgtcgcacaagggcagtcacagggccaaccctcctcttctagccttacgggcgtgtcgtcgtctcagccgattcagcatcctcagcagcagcaggggatacagcagacagctcctccacaacagacagtgcagtactcgctgagccagacatcgacgtcttctgaagcgaccacagctcagccggtttcccagccacaagctccacaagtattgccgcaggtgagtgcaggcaagcagttacccgtttcccagccagtaccaacaatccagggagaacctcagatccctgtcgcaacacagccctccgtcgttccagtgcattctggagctcattttctcccagtggggcagcctctccccaccccactactcccacaatatccagtgagtcaaatacctatctcaactccgcacgtttccacagcccagacaggattcagcagcctgcccattacaatggcggctggaatcacacagcccctgctcacactggcttcgtccgcaacaaccgctgctataccaggggtgtctaccgtggtgccatcccagctgcccaccctgttgcagcctgtaacacagctgccttcacaggttcaccctcagcttctgcagcctgcagtacagtctatgggcattcctgctaacctgggtcaggctgcagaagtgcccctcagctccggcgacgtcctctaccaggggtttccccctagactccccccgcagtatcctggcgactccaatatagcccccagtagcaacgtagcttctgtctgcattcatagtacagtactgagtccaccgatgccgacagaagtactagcaactcccggatattttcctacagtagttcagccctatgtcgaatccaatttgttggtcccaatgggcggtgtgggcggccaggtgcaagttagccaaccaggtgggtcactggcacaggcacccacaactagttctcaacaagcagtcctggagtccacccagggagttagtcaggtggcccccgccgagcctgtggccgttgcacagacccaggctacgcagccgaccactctggctagctccgttgatagcgcgcactccgatgtggcttccggcatgtcggatggaaatgagaacgtgccatctagctcaggacgtcacgagggccgcactactaaacggcattatcgtaagtctgtcaggtctaggtcaaggcacgaaaagactagccggcccaagttgaggatactgaacgtctctaacaaaggcgaccgagtagttgaatgccaattagagactcacaaccggaaaatggtaacctttaagttcgacctggatggagacaatccagaggagatagccacaatcatggttaacaatgatttcattctcgccatcgagcgagaatcctttgtcgaccaagtgcgggaaattattgagaaggcagatgagatgctgagcgaggatgtgagtgttgagcccgaaggggaccagggattggagtcgttacagggcaaagatgattacggcttctccggaagtcagaaattagaaggcgaattcaagcaacctatccctgccagcagtatgccccagcaaataggcatcccgacatcctccttaacccaagtcgttcatagcgcagggcgcaggttcatcgtctcacccgtgcctgagagtaggctcagagaatctaaggtgtttccttccgagataacagacacagtcgccgcttccaccgctcaaagtcccggaatgaacctctcccacagcgccagctcgctcagcctccaacaggcgttttctgaactcaggagggcacagatgactgagggcccaaacactgcccccccaaacttttctcatactgggccgacttttcccgtggtgcctccctttctgagctccatagccggcgtgcctactaccgccgcagccaccgccccggtgcccgcaaccagtagtccccctaacgatatcagtacgagcgttatacagtcagaagtgacggtgccaaccgaggagggtatcgctggcgtcgcaacttctacgggggtggtcacctccggaggtctcccgattccacccgtgagcgagagcccagttctctcgtcagtcgtctctagcattaccatcccagcggtagtgtcgatcagcacgacgtccccctctctgcaggtgcccacatctacaagcgaaattgttgtcagttccactgccctgtatccctctgtgactgttagcgctacgtcggccagcgctggaggatccaccgcaacccccggccctaagccaccagcagtggtctcccagcaggcggcgggcagcaccaccgtgggggctaccctcacaagcgtttcaacaaccaccagctttccatctactgcgtctcagttatgtattcagctctcatcctcgacttccaccccgactctggcagaaacagtcgtggtgtcagcccactcactcgacaaaaccagtcactcttcaactacaggtctggctttcagcctgtcggcccctagcagctcatcttcccccggcgctggagtgtccagttacatctctcagcctggaggtctccatcctctggtcataccttctgtgattgctagtaccccaatcttaccacaggccgctggtccaaccagtacacctcttctgccacaggttccctctatacctcccctggtccagcctgtggccaatgtgcctgctgtgcagcagactctgatacattcacagcctcagcctgcgctcctaccaaatcaaccccacacacattgccccgaagttgatagcgacactcagcctaaagcccccgggattgacgatattaagactctcgaggaaaaactgagaagtctcttcagtgaacacagctccagtggggctcagcacgcaagcgtgagcctggagacttctctggttattgaatcaacggtaactcctggaatccctacaactgccgttgcaccgtcaaagctcctgacttctacaaccagtacttgtctgccgccaaccaacctgcccctggggacagtcgccctgcctgttaccccagtcgtcacacccggccaggtttcaacaccagtgtcaactaccaccagcggagtgaaacctggcacggctcctagtaagccccctttgaccaaagcaccagtgctccctgtcggaactgagctaccagccggcactctcccaagtgagcaactcccgccgttcccgggtccgtccctaacccaatcccagcagccgttggaggacctggacgcacaattgagacggaccttatcaccagagatgatcaccgtgaccagtgccgtgggtccagtcagcatggccgctccaaccgctataactgaggcggggactcagcctcaaaaaggtgtgtcccaagtcaaagaaggtccagttctggctacttcctcaggcgccggcgtgtttaaaatgggacgcttccaggtgtccgtggctgccgatggggctcagaaggaggggaaaaacaagagcgaggacgccaagagcgtgcactttgaatcatctaccagcgagtcatctgtattgtctagcagcagtccagaaagtacattggttaagcctgaacctaatggtatcactatacccgggattagctccgatgtgcctgagtccgcccacaaaaccactgcgtccgaggctaaaagtgacacaggacaacccaccaaagtaggccggtttcaagtgactaccactgcaaacaaggtcggacggtttagcgtcagcaagacggaggacaagattacagacaccaaaaaagagggacctgttgcttctcccccctttatggacctcgaacaagccgtactgcctgcggtgattcccaagaaggagaagccagagttaagtgaaccaagccatctcaacggaccttccagcgaccctgaagcagcctttttgtctcgggatgtagacgacggttccggaagcccacatagcccccatcagttgtcatcaaaatcacttccgtcgcaaaacttatcccagagcctgtctaactctttcaactcaagttacatgagttccgacaatgagtcggatatcgaagatgaggatctgaagctggagttgcgacgcctaagagataaacatctgaaagaaattcaggacctgcagagcagacagaaacacgaaatagagagtttgtataccaaacttgggaaggtccctcccgccgtcatcatccccccagctgctccacttagcggcaggcggcgacgccccacaaagagcaagggctctaagagttcacgcagcagctcattgggaaataaatccccgcagttatcaggtaacctctccggtcagtccgctgcttctgtgttgcatccccaacaaacactgcacccgccggggaacatcccagaatcagggcagaatcaattgttgcagcccttaaagccgtcaccaagctcagacaacctgtatagtgcctttacatccgacggcgcgatttccgtcccttcgctgagcgcacccggccaggggaccagctcaacaaatactgtgggcgctacagttaactctcaggccgcccaggcccagcccccagccatgacgagttccaggaagggcactttcaccgacgacctccacaaactcgtggacaactgggctagggatgccatgaatctgtccggaagaaggggtagcaaaggacacatgaattatgaaggtccgggcatggcgagaaagttctccgcaccaggacagctgtgcataagcatgactagcaatttggggggaagcgctcccattagtgccgcctcggcgacatccctgggccactttaccaagagcatgtgccccccacagcagtatggctttccagccacccccttcggggcccagtggtcaggtaccgggggccccgctccgcagcctttgggtcagttccagccagtcggcacagcaagcctgcagaattttaatatctctaaccttcagaagtcaataagtaatcccccgggctctaacttgaggacaacatag

SEQ ID NO: 200798 - DNA, 5928 bp, Artificial Sequence
  derived and/or modified sequence
atggacatcaagaagaaggacttctgcagcgtgttcgtgatcatcaacagtcactgctgctgttgcccacagaaggactgcatcaatgagggagtaaagcccgcctctttcgacaaggtggcaatcccggaagtgaaagaaataatagagggttgcatcagacaaaataaggacgagagatactctatcaaggatctgcttaatcatgccttcttccaggaagagaccggtgttcgcgtggagctggcggaagaagatgacggagaaaagatcgccatcaaactgtggctgcgcatcgaagatataaagaaactgaagggcaagtacaaagataatgaggccattgagttttccttcgatttggaacgggacgtgccagaagacgtggcccaggagatggttgaatctggatacgtttgtgagggagaccacaaaacaatggctaaagctatcaaagatcgtgtgagcctgattaagcggaagagggaacagaggcagctggttcgggaggagcaggagaagaaaaaacaggaagaaagttcactcaaacagcaggtggaacagtccagtgcatcgcagaccggtatcaaacagcttccttctgcttccacaggaatccccactgcctcaaccacttccgctagtgttagcacccaggtggagcccgaagagccggaagctgaccagcatcaacaactgcaataccagcaaccttcgatctctgtgctgtcggacggcaccgtagactctggtcagggttcttcagttttcactgagtctagggtgtcctcccagcaaaccgtgagctacgggtcccaacacgaacaggctcattctacgggaaccgtcccagggcatatcccatctaccgtgcaagcccagagccagcctcatggggtgtaccccccatcctcggtcgcccaggggcagagtcaggggcagccttcttccagcagcctgaccggggtgtccagctctcaacctattcaacacccacagcagcaacaggggattcagcagactgctccaccacaacagacagtccagtactccctgtcgcagactagcacctcaagtgaggctaccaccgcacaacctgtgagccagccccaggcaccccaagtgctgcctcaggtgagcgccggaaagcagctgcccgtgagtcagccggtccccactatccagggagaaccgcaaattccggtagctacccaaccctcagttgtgcctgtacactccggggcacatttccttccagtgggtcagccactgcctacaccgttgctgcctcagtaccccgtctcccagatacctatctctactcctcacgtctcaaccgcccaaacaggcttctcaagcctgccaattaccatggccgccggaatcactcagcccctcctgacacttgcctccagtgccacaaccgcagctatacccggcgtctcgaccgttgtgcccagccagctacctacccttctacagccggtcacccagcttccctcgcaggtgcacccacaacttctgcagcccgccgttcagtctatgggtattcccgctaatttgggccaggccgcagaggtcccactgagttcaggggatgtgctctatcagggcttccctccacgcctacccccccagtatcctggggattcaaacattgctccttcgtctaatgtggccagcgtatgcattcattctacagtcttaagccctcccatgccaactgaggtgctcgccactccaggttactttccaacagtcgtgcagccttatgtcgagagtaatctactggtacccatgggaggcgtgggcggccaggtccaggtgtcacagcccggaggaagtctggcccaggcgccaaccactagtagccagcaggcagtgctggagagcacgcaaggcgtttcccaagttgctcccgccgagcctgtggctgttgcacagactcaggccacccaacctaccaccctcgcgtcctccgttgatagcgcccactctgacgtcgcaagcggcatgtcagatggcaacgaaaatgtaccatcttcctccggacgacatgagggaaggactacaaagagacactatagaaagtcagttaggagtagatcccgccacgaaaaaactagtcgtccaaaacttcgaattctcaatgtctccaacaaaggcgaccgggtggtggaatgtcaactcgaaacccacaaccgaaaaatggtgacctttaagtttgaccttgacggcgataaccctgaagaaatagctacgatcatggtgaataacgactttatcctcgcgattgagcgggagagctttgtggatcaggtccgggagataatagagaaagccgacgagatgctatctgaggacgtgtccgtcgagccagagggcgatcaggggttagagtccctgcagggcaaagacgattacggttttagcggaagccagaagctggaaggcgagtttaagcagccaattcccgcttcctcgatgccacaacagattgggatacctacatcatcgctcacgcaggtcgttcacagtgcgggcagacgattcatcgtgtcccccgtgcccgagtcgagattacgagaatccaaagtcttccctagtgagatcaccgacactgtcgccgcttctacagcacaaagtccagggatgaacctctcccatagcgcatccagccttagcctccagcaagctttttccgaattaagacgcgcacaaatgaccgaaggccccaataccgcacctcctaatttctcccacacaggccctacgttccccgttgtcccacctttcctgtcctcaatcgccggggtacccaccactgccgcagcaaccgcgccagtgccagctacatcctcaccaccaaatgatatttccacaagcgtgatccagtctgaggttaccgtgcccaccgaagaaggaatcgccggcgttgcaacttccaccggcgtagtgacttctgggggactgccaattccacccgtgtctgagagccccgtcttgtcctcagtggtatcttctatcacaatccctgcagtggtgtccatatctacgacctccccttctttgcaggtccctacatccacatcagagattgtggtgtcttctactgcactgtacccctcggttactgtgtcggctacttctgcttctgcagggggtagcacggccacccccggcccgaagccacctgctgtggtttcgcaacaggccgccggatctactacggtaggggccaccctcacttccgtctcaaccaccaccagtttccctagcactgcctcccagctctgtatccagctctcctcctccacttcaacccctacactggccgagacagtagttgtttctgctcattctctggataaaacttcgcactcctcaacgaccggactggctttttcgttgtcagcccctagctccagcagctcacccggagctggcgtcagcagttacatctcccagccgggaggtttgcaccctctggttattcctagtgtaatcgccagtacgccaattctgccgcaggctgcaggccccaccagcaccccactgctgccccaggttccaagtataccccctttggtacagcctgtggccaatgttccagccgttcagcagacactcatccatagccagcctcagcctgcactgctgcctaaccagccccacacacactgcccggaagttgattctgatacacagccaaaggcacctggaattgacgacattaagacattggaggaaaagctgcgcagcctgttttctgaacacagttcgtccggggcacagcacgcctctgtgtccctggagaccagtttagtgatcgaatcaacagtgacccccggaatccctaccactgccgtggcaccgtccaaactcttaacctctaccacctccacgtgtctgccacctacaaatctgccacttggcaccgttgccctgccagtgactccggttgttaccccaggacaggtgagcacacccgtcagcacgactacatctggcgtgaagcctgggacggctccctcaaaaccgccgctgacaaaagcccctgtactgcccgtaggtaccgagctccccgcaggaaccttgccttcagagcagcttcctcctttccccggcccatcgctcacccaatcccagcaacccctggaagacctcgacgcacagctccggcgaaccctgtctcccgaaatgataacagtcaccagtgctgtgggccctgtttccatggcagcgccaactgcaattacggaagccggcacccaaccacagaagggcgtgagtcaggtcaaagaggggcctgtgctggcaacatcatccggcgcgggagtttttaagatgggtagatttcaggtttctgtcgcagccgacggagctcagaaagaaggtaagaacaagtcagaggatgcgaagtcggtccattttgaatctagtacgagtgaatcatcagtcctgtcatcgagttccccagagagcactctggtgaagcccgagccaaatggaattactattcctggtatttccagtgacgtgcccgaatccgcacacaagaccaccgcttcagaggcgaagtcggataccggccagccaacaaaggtcggacggttccaagtaactacgacagctaataaggttgggaggttcagcgtgtcgaagacggaagacaaaataactgacacgaaaaaggaagggcctgtggcctccccacctttcatggatcttgagcaggccgtcctgcctgcggttatacccaaaaaagagaagcctgagctttctgaaccatcacatctgaatggacctagttccgatcctgaagctgcatttctttcacgagacgtcgacgacggctcagggagcccccatagcccgcaccagttgtcttcgaagagcctgccttctcaaaacctgtctcaatcactctcaaactcatttaacagttcatacatgagctctgataatgaaagtgatatagaagacgaggatctaaaactcgagctgcgccgtctgcgagataagcatctcaaagagattcaagatctgcaaagcagacagaagcacgagatcgagtccctgtacactaaacttggcaaagttccccctgccgtaatcatcccccctgcggcccctctaagtgggagacggcgtcgccccacaaagtccaaggggtccaaatcgtctagatctagcagtctgggcaataagagccctcagctgagtggaaatctgagtgggcagtccgctgccagtgtgctccatccacaacagacccttcaccctccaggaaacattccagaaagtgggcagaatcagctgctgcagccactcaaaccaagtcctagctcggacaatctttactcagcgtttacatctgatggtgctatttccgtgccttcgttgagtgcgcctggacagggaactagttcaaccaacacagtgggagcaaccgtgaatagccaggcggctcaggctcagccgccagctatgacctcttcaaggaaagggaccttcactgatgaccttcataagctggtggataattgggcccgcgacgctatgaacctcagcgggaggcgtggctctaagggtcatatgaattatgaagggccaggaatggcgagaaagtttagcgctcctgggcagctatgtatttcaatgacatccaatctgggcggcagcgcgcccatctctgccgcatcagctacgtccctaggccacttcaccaaatcgatgtgtcctcctcagcagtatggcttccccgccacacctttcggcgcccaatggagtgggacagggggccctgccccccagcccctcgggcagttccagcctgtggggactgccagcctgcagaactttaatatctccaatctccagaagtctattagtaatcccccaggttccaaccttcgcaccacctag

SEQ ID NO: 200799 - DNA, 8643 bp, Artificial Sequence
  derived and/or modified sequence
atgagcggcggcgccgccgagaagcagagcagcacccccggcagcctgtttttatcaccacccgcacctgcacccaagaacgggtcctcgtccgactcttccgtcggagagaagctgggtgccgccgctgccgacgccgtcactggaagaaccgaggaataccgtaggagaaggcataccatggacaaagattccaggggggcagcagctactaccacaaccactgagcacagattttttcgacgaagcgtcatatgcgatagcaacgcgactgcgttggagctgccaggcctccccctgagcctgcctcaacctagcatccctgcagccgttccgcagagcgccccccccgagcctcatagagaagaaacggtgaccgcgaccgcaacctcacaggttgcacagcagccacccgcagccgcggctcccggggagcaggccgtggctggccccgccccgtcaacggtgccatcaagtaccagtaaagatagacccgtctcccagccctcactggttggatctaaggaggagcccccgcctgcccggtctggaagcgggggaggctccgccaaagagccgcaggaggaacgttcacagcaacaggatgacatcgaggaacttgagacgaaggcagtgggtatgagcaatgacgggcggttcctcaagtttgacattgaaattggcagaggcagcttcaagactgtttacaagggattggatacggaaaccactgtggaggtggcttggtgcgagctccaggaccgcaaacttactaaatccgagcgacaaaggttcaaggaggaagccgaaatgctgaaagggctccagcaccctaatatcgttcggttctacgacagctgggagtccacggttaaaggtaagaagtgcatcgtgcttgttacagaactgatgacatcaggaaccctcaaaacttacctgaagagattcaaggtgatgaagattaaggtactgcgctcatggtgtagacagatcctcaaggggctgcaattccttcacacaagaactccaccaatcatacaccgcgacctgaaatgtgacaatatttttatcacggggccaaccggcagcgtaaagataggcgatctcggccttgccacgttaaagagagccagtttcgctaagtcagttatcgggactcccgaattcatggcgccggaaatgtacgaggaaaagtatgacgaatcagtggacgtgtacgctttcgggatgtgtatgctcgagatggccacgagcgagtatccctactcagagtgccagaatgcagcccagatttatcgccgcgtcacatccggagttaagccggccagcttcgacaaagtggcaatacccgaagtcaaggaaatcatagagggctgcatccgccaaaataaggatgagaggtatagtatcaaggatctcctgaatcatgccttcttccaggaggagactggggtgcgagttgagctcgcagaggaagatgatggagagaagatcgcaatcaagctctggttgaggatcgaggatataaagaaactgaaagggaagtacaaagacaatgaggccattgaattcagctttgacttggaacgggacgttccggaagacgtggcacaagagatggtcgaatccggatatgtgtgtgaaggcgaccacaaaaccatggccaaagctatcaaagacagagtttctctcatcaaacggaagcgggagcagaggcagctggtgcgggaagagcaagagaaaaagaagcaagaagaatcttccctcaagcaacaagtagaacaatcctcggcgtcgcagaccggcattaaacagctaccgagtgccagcactggcatacccaccgcgtccacgacatctgctagcgtgtccacacaggtggagccagaggaacccgaggcagaccagcatcagcagctccagtatcaacagccaagcatcagcgttctcagcgatggtaccgtcgatagtggccagggtagtagcgtattcactgaatctagagtaagctctcaacagacagtgtcatacggcagtcaacacgagcaggcccattccacggggacggtgccaggccacatccctagtaccgtgcaggcccagagccagcctcatggcgtgtacccccccagttctgtgccacgacgcggaaggtctatgagcgtttgcgtgcccatctttctcttactgcccttatgccctgcatcactccctgtgttgtttcacccaaccgcctccaccgtttgcaccagcttcagttttcccccaccagactgccccgaagaaacttttgcggaaaagttatccaaagctctggaatctgtgctgcctatgcactccgccagtcagcgcaagcaccgccgaagcagtttgccgagcctgtttgtgtcgactccgcagagtatggcccatccctgtggcggtacccccacatacccagagagtcagatattttttccaactatacacgagagaccggttagctttagtccaccacccacgtgcccccccaaggtggctatttctcagagacgtaaaagcacatcatttctagaggctcaaacacaccattttcagcctctgctgcgtaccgttgggcagagtcttcttcccccgggcggatctccaacaaattggacccccgaagccgtggtcatgctgggtacaaccgcatcaagagtgaccggcgaatcctgcgagatccaggtccatccgatgttcgagccctcacaggtctactctgattaccgacccggtctcgtgctgcccgaggaggctcattatttcatacctcaagaagcagtctatgttgccggggtgcattatcaggcccgggtggcagagcagtatgagggaatcccctacaatagttccgtgctatcttctcctatgaagcagattccagagcagaaaccagtgcagggcggtcctacgtcctctagcgttttcgaatttccatcgggtcaggcgtttctcgtcggacacctgcagaacctgcgcttagattccgggctcggccctgggtcacctctgtcatcaatatctgcccccatatccactgacgcaacgcgattgaagttccatccagtatttgtaccccattcagcaccggctgtcctgacccacaataatgagagtcggagtaattgcgtgttcgagtttcacgttcacaccccatcgtccagttccggggagggtgggggaatactcccccagagggtgtatagaaaccgacaggtcgcagtcgacctgaaccaggaggagctgccaccccaaagtgtcggactccacggctacctgcagcctgttaccgaagaaaagcataactatcatgctccagaactgactgtctcggtggtggagccaatcggccagaattggccaattggtagtcctgaatactccagtgattcctcgcagataaccagctctgacccctctgattttcagagtccccctcccaccggcggagccgctgcccccttcggctctgacgtatccatgcctttcattcacttaccgcagacagtcttacaagaatctcctctatttttctgcttccctcaggggaccaccagccagcaggtgttgaccgcatccttctcgtctggtggctctgccttgcaccctcaggcccagggtcagagtcaagggcagccctcaagttcaagcctcaccggagtctcctcaagtcagcctatccagcatcctcagcagcagcaaggcattcagcaaaccgcccccccacaacagacggttcagtacagcctgagtcagacctctacctcttcggaagcgaccacagcccagcctgtgtcccagcctcaggcccctcaggtgctccctcaggtgagtgctgggaagcaattaccggtcagtcagcctgtgccaaccatccagggggagcctcagattccggttgcaactcagccttcggtggtgccagtgcactccggcgcgcactttttacctgttggtcagcctctcccaacgcctctccttccacagtatcctgtaagtcaaatcccaataagcacgcctcatgtgagcaccgcccagacaggattcagctccctgcctattacgatggcggccgggatcacccagcctcttctcactttggccagctcagcgacgaccgctgctataccaggtgtgtccaccgtggtccccagtcaactgccaacactgttacagcctgtgacccaattgccaagtcaggtccacccccaactgctccagcctgccgtacagtccatgggcatccccgctaatttgggccaggccgctgaggtcccactgagtagcggagacgttctgtaccagggattcccacctagattaccaccgcagtaccccggcgacagtaatattgcgcccagctctaacgtggccagcgtgtgcatccatagcaccgtgttgtcaccacccatgcctacagaagtgctggctacaccaggttattttccaacagtggtgcagccctatgtcgaaagcaatctgctggtgcccatggggggtgtgggagggcaggtgcaggttagccagccggggggctccctggctcaagcacccacgacaagtagtcagcaggcagtgctggagtcgacccagggggtgtctcaggtggctcccgctgaacccgtcgcagtggcccaaacccaggccacccaacccaccacgctcgcctctagcgttgactctgcccacagcgacgtcgccagtgggatgagtgacgggaacgaaaacgtgccaagcagcagtggcaggcacgaaggaagaacaacaaaacgacattatagaaaaagcgtgagatctcggtcaaggcatgagaaaacttcacggcctaaacttcggatcttaaacgtgtccaataaaggcgatagagtggttgaatgccaactggagacccacaacaggaaaatggtaactttcaagtttgatttggacggtgataacccggaggaaattgccacaatcatggttaacaacgacttcattctggccatcgaaagagaatccttcgttgaccaggtccgtgagattatcgagaaggcagacgagatgctgagtgaagacgtgtccgtggagcctgaaggtgaccagggacttgagagcctgcagggtaaggatgactacgggttcagtgggtcgcagaagctggagggtgagttcaagcaacctattcccgcctcctctatgcctcagcaaatcggaatcccaacttcgtcccttacccaggtagtccactccgctgggagaaggttcattgtgtcaccagtgcccgagtcccgcttgcgggaaagcaaagtctttccttcagaaattacggacactgtggctgctagcacggcacaaagtccaggcatgaacttaagtcatagtgcttcttctctgtccttgcaacaggccttttccgagctacggcgtgcacaaatgaccgaaggcccaaacacagcaccaccaaatttcagccatactggaccaacgtttcccgtggtacccccttttctatccagcatcgccggggtgccaactaccgctgccgccaccgcacccgtgccagcaacatcttctcctcctaacgatatttctactagcgttatccagtcagaggtcactgttccgactgaagaggggatcgctggcgtggcgacgtctactggggtggtaacttcagggggactcccaattccacctgtgagcgaaagcccagtgcttagctcagtggtgtcctccataactatccctgccgttgtgtccatttctactaccagtcccagcctccaggttccaacatctactagcgagatcgtggtcagtagtactgccttatacccatcagtgaccgtgagcgctactagcgcctctgccggtgggtccaccgctacacctggtcctaaaccacccgccgtagtaagtcagcaggccgccggctccacaacagtcggagcaacactcacttccgtctcaacaactacttcattcccttcaactgcctcacaactctgtatacagctgtcgagctcaacaagcaccccgacactggccgaaactgtagtagtatctgctcattctttggataaaactagtcacagctctactacagggttggcgttctctctctcagctccgagttcaagctccagtcctggcgcaggggtctcgtcatacatatcgcagcctggaggactgcacccactggtaatcccctctgtcatcgcaagtacccctatcctccctcaagcggcagggcccacatctacgccactactgcctcaggtgccttcaatcccacccctggtccagccagtagccaacgtccctgccgtccaacagaccctgatccacagtcagccccagcctgccttattacctaaccagccccacacccactgtccagaagttgattccgacacccagcccaaggcccccggcatcgatgacattaaaacactcgaggagaagcttcgtagcctttttagtgaacactctagttccggtgcgcagcacgccagcgtgagcctggagaccagtctcgtgatcgagtctacagttaccccgggaattcctactactgctgtagccccatcgaaactactgactagcacaactagcacatgtctaccacctactaacctgccactcggaacagtggcactgcccgtgactccggtggtgactcctggccaggtgtccactccagtaagcactacgaccagcggcgtaaagcccggtactgccccatctaagcctcctctgactaaggcccctgtgcttccggtcggaaccgaactgcccgccgggaccttgcccagcgagcagcttcctccgtttccaggcccgtccctgacccagtctcagcagcctctggaagaccttgacgcgcagctcagacgcacgttatcccccgaaatgataactgttaccagcgctgtggggcctgttagtatggctgcaccaacagccatcaccgaagccgggactcaaccccagaagggtgtatcccaggtcaaagagggacccgtgttggctacatctagcggagctggcgtgtttaagatggggagattccaagtgagtgtcgcagcagatggcgctcagaaggaggggaaaaataaaagcgaggacgccaagagcgtacactttgaatcatccacaagtgaatcaagcgtgttgagctctagctcaccggagagcacactggtgaagccagagccaaacggcatcacaatcccaggcatatcttcagatgtgcccgagtctgctcacaagacaaccgcatctgaggccaagagcgacaccgggcaacctaccaaggtggggagatttcaggtgacaaccacagcaaacaaagtcggcagattttctgttagcaagacagaggacaaaatcaccgatacgaaaaaggagggtcctgtggccagtccccccttcatggacctggaacaggcagtcctacccgccgtcatccccaagaaagagaagccagaactatccgagccatcgcatctgaatggcccatctagtgaccctgaagccgcttttttgtcccgggacgtcgacgatggctctgggagtcctcacagtcctcatcagctttcctctaagagcctccctagccaaaacctttcccagtctctgagcaatagttttaactcttcatatatgtcttcagacaacgaatcagatattgaagacgaagatctaaagcttgaacttcgtaggttacgggataaacacctcaaggagatccaggatctgcagtcccgtcaaaaacacgagatcgagtctttgtatacgaagctcgggaaagtgcctccagctgtcatcatccctcccgcagcacccctgagcgggagaagaagacggccgactaagagcaagggttcaaaaagcagtcgctcatcatctctggggaacaaatccccacaattgtcaggtaatctatctggccaatctgcagctagcgtgctgcacccgcagcagacactgcaccccccgggaaatatccccgaaagcggacagaatcaactattgcagcccctgaaaccgtccccctccagcgacaatttgtatagtgctttcaccagtgacggagcaatcagcgttccttctctatctgcccctggacaggggacgagcagtactaataccgttggtgccactgttaacagtcaggctgctcaggctcaaccccctgccatgactagcagtagaaaaggaacttttacagatgacctgcataaactcgtggataattgggcccgcgatgctatgaacctgtccgggcgccgcggctccaagggccacatgaactatgaaggaccagggatggcgaggaagtttagtgcaccaggacagctctgcatttccatgacctctaatttggggggcagcgcccccatatctgccgcctccgccactagcctggggcatttcacaaagagtatgtgtccacctcagcagtatggatttccggccactccattcggcgcacaatggtcaggcacaggtggtccagccccacagcctctcggacagtttcaaccggtcggaaccgcttccctacagaacttcaacatatcaaacttgcagaaatctatatcgaaccctccaggatctaatctgagaactacatag

SEQ ID NO: 200800 - DNA, 7148 bp, Artificial Sequence
  derived and/or modified sequence
atgtccgggggagccgcagagaaacagtcgagcactcctggatcgttatttctgagtcctccagcccctgctccaaagaacggaagtagctctgatagttcagtgggggaaaagctcggagccgcagccgctgacgcagttacagggagaaccgaggaatacagacgccgtcggcatacgatggacaaggacagccgaggagcagcagccaccactacaaccaccgaacatagattttttaggaggtcggtcatttgtgacagtaatgccaccgctctagagctgccaggcttacctctttctctcccacagccttctattcctgccgcagtgccccaaagcgccccaccagagcctcaccgggaggaaaccgtgacagccacggctaccagtcaggtggcccagcagcccccagccgctgccgcacccggagaacaggccgtggccggtccagctccaagcacagtgcctagctccacctccaaggaccgtcccgtatcacaacctagcctcgttggaagtaaggaggagccacccccagctcgcagtggctctggagggggatccgctaaggaaccacaggaagagcggtcccaacagcaggatgacatcgaggaactcgagacgaaagcggtgggcatgtctaacgatggacgctttctgaagttcgacattgagattggccgagggtccttcaagaccgtatacaagggtctcgacaccgagacaaccgtggaggttgcctggtgtgagctgcaggaccgaaaactgacaaaatccgaaaggcagagattcaaagaggaagccgaaatgcttaaagggctgcagcacccaaatattgtgcggttctatgatagttgggagtctacagttaagggcaaaaaatgcattgtactcgtcacagagctcatgacatccggcaccctgaagacctatctgaagagattcaaagtaatgaaaataaaggttcttcgctcgtggtgcaggcagattctgaagggcctgcagttcctccatacaaggactcctcccataattcatagagacctcaaatgcgataatatttttataacaggtcctacagggtcggtcaaaatcggagatcttggtcttgccaccctcaaaagagcgtcttttgctaaatccgtgataggcacgccagaattcatggccccagagatgtacgaagaaaaatatgacgagagcgtagacgtgtatgcctttggcatgtgtatgctggagatggctacctctgaatacccttactcagaatgtcagaatgctgctcagatctatcgtcgtgttacatcaggtgtaaaacccgcttcattcgacaaagttgccatcccagaagttaaggagataatcgagggttgtatcaggcagaataaggacgaacgatacagcattaaagaccttttaaatcatgctttcttccaagaagaaaccggggtccgggtggagctggctgaggaggatgacggtgaaaagatagccattaagctctggctccgaattgaggatatcaagaagttgaagggaaaatacaaagataatgaggccatcgagttttcattcgatttggaaagagatgtgccggaggacgtggcgcaggaaatggtggaaagcggctacgtctgtgaaggcgaccacaagaccatggccaaagccatcaaagatagggtgagcttgatcaaacgaaagagggagcagaggcagttggtgagagaagaacaggagaagaaaaagcaagaggaatctagcctcaaacaacaggtcgaacagtcttctgcctcccagaccggcatcaagcaactgccctcagcctctactggtatccccacagctagcaccaccagcgcaagcgtttctacacaggtggaaccagaggaacctgaagctgatcagcaccagcaacttcagtaccagcagccgtcgatttctgtcttgagtgacggcaccgtggactctgggcagggatcgtccgtgttcactgaaagccgcgtctctagccagcagactgtgagctatggaagtcagcacgagcaagcgcattctaccggaactgtgcccggtcacatcccttccactgttcaggcacagtctcagccacacggagtatacccaccttcaagtgtggcccaggggcaatcccaggggcagcccagtagctcttccttaaccggcgtgtcgtcctctcagcccatccagcaccctcagcaacagcagggcattcagcagacagccccaccgcagcagaccgtccaatacagcctaagccagacaagcacttcttcggaggcaactactgcgcaaccagtcagccagccccaggccccacaggtgttgcctcaggtttcagccggtaaacagttaccagtgtctcagcccgtgccaacaattcagggagagccacagatccccgtggcaacacagccatccgtagtccctgtccattctggtgcgcacttcttaccagtgggccagccactgccgactcccttgctcccccagtacccagttagccaaatccctattagcacacctcatgtgtctaccgcccagaccggtttcagctcgctgcctattacaatggctgcaggcatcacccagcctctgctgacgctagcttccagtgctaccaccgcagcaataccaggagtctcaactgtcgtgcctagtcagctaccgacactgttgcagcctgtcacccagctgccttcccaggtgcaccctcaacttctgcagcccgctgtgcagtctatgggtattcccgctaatctgggccaagccgctgaggtgccgctgtcctcaggcgatgtcctgtaccaggggtttccacccaggttgccaccgcagtatcctggcgactcaaacattgcaccctcctcaaacgtggcatctgtatgcatccattcaaccgtcctgtcaccccctatgcctacagaggtgcttgccactccaggctacttcccaactgtcgttcagccttacgtagagtccaacctactggttcccatgggtggagtgggtgggcaagtgcaggtgtcacaaccaggaggctccctcgcgcaggcgcctactacttcctctcagcaggctgtgctcgaatctactcagggagtctctcaggtggcgcctgccgaacccgttgccgtagcccaaacacaggccacccagcccacgacacttgccagctctgtcgacagtgcccatagtgatgttgcatctggaatgtccgatggcaacgagaacgtcccaagttcctcagggcgacacgagggaagaaccaccaagcgccactaccggaagtctgtgcggtcccgctcccgccacgagaagaccagccgcccaaagctgcggattcttaatgttagtaacaagggagaccgcgtggtggagtgtcaactggaaacccacaataggaagatggtaacttttaaatttgaccttgatggcgataatccggaggagatcgctaccattatggttaacaatgactttatcttggccatagagcgggagtccttcgtcgatcaggttcgggagatcattgagaaggcagatgagatgctatctgaggacgtaagcgtggagcccgagggcgaccaggggcttgagtcactgcagggcaaggacgattatggcttctccggttcgcagaagctcgagggggaatttaaacagcctatccctgctagctccatgccacagcagatcggtatccctacatcaagtctgacacaggtcgtgcattctgcaggcagaaggttcattgtgtccccggtgcctgagtccaggctgcgcgaatcaaaggtgttcccaagtgaaataactgacacagtcgccgcatcgactgcacaatcacccggtatgaatctaagccattcggcttctagcctgtctttacagcaggctttctctgaactcaggagggcccagatgacagagggcccaaatacggcgcctcccaacttctcccatactggtcccacttttccagttgtgccaccatttctgagttctattgcgggagtgcccaccactgcagccgcaacagcaccagtccccgctacttccagtccacccaacgatataagtacatctgtcatccaatccgaggtcacagtccccactgaggaagggattgccggtgtggccactagcacgggcgtagtgacctccggaggactccccattcctcccgttagtgaatccccagttctctcatcagttgtgtcgtccattacaattcccgcagtggttagcatctccactacatctccatctctccaggtgccaacaagcacgtcagaaatcgtcgtgtcctccacagctctatacccctctgtcacggtgtctgccacctccgcttccgccggaggtagtacagccacacctggacccaagccacccgcagtggtgtctcagcaggctgctggatctactaccgtaggcgctactttgacttccgttagcacaacgacttcctttcccagcaccgcctcccagctctgcatccagctctcatcgtcaacttctacgcctacacttgctgaaaccgttgtcgttagcgcccattctctagataagacttcccactcctcaactacggggttagccttctccctttcggcccctagttcctccagctcacctggagctggggtgtcatcttatatttcccagcctggtgggcttcaccccctggtcattccaagcgtcattgcctctaccccaatcttgccacaagccgcaggacctacatctacccctttgctgccacaggtcccctccattcccccactggtgcagccagtggcaaacgtacctgccgtacagcaaacactgatccacagtcagccacaaccagcattgctgcccaaccagccacacacacactgccccgaagtggactcagacacacagcccaaagctcccggaattgatgatatcaaaaccctggaagagaagctaagaagccttttctccgagcattcgtcctcaggtgctcaacatgcctccgtctctcttgagacttccctagtcattgaatccaccgtaacacccggtatcccaacaaccgctgtggcaccttctaagctgctgacgtcgactactagtacctgcctaccgcctactaatttacctctcggaaccgtcgccctgcccgtcactcccgtggtgacccctggacaggtgtcaacgcccgttagcaccaccacctcaggcgtcaagcctggaaccgcacccagtaagccccctttaacaaaggcaccagtcctcccagtgggaaccgagctccccgctggcactttacctagtgaacagctccctcctttccctgggccaagcttaacccagagtcaacagcctttggaagacctggacgcacagctgcggagaacactatctcctgagatgattacagtcacctccgcagtcggacccgtgtcaatggcagccccaaccgcaatcaccgaagcaggaacacagccccagaaaggcgtttctcaggtcaaagaaggtccagtgctggccacctcctctggggcaggcgtctttaaaatggggcgatttcaggtgagtgttgccgcagatggcgcacagaaagagggaaaaaataaatccgaagatgccaagtccgtgcattttgagtcaagcacttcagaaagctctgtgctaagtagttcctctcctgagtccactctggttaaacctgagcccaacggcattacaatccctggtatcagcagcgacgtgccagaaagcgctcacaaaaccacagcctcggaggcgaaaagcgacactgggcagcccacaaaggtgggccgattccaagtaaccacaacagcaaacaaagtaggaaggttttccgtctcaaagactgaggataagatcacagacactaagaaggaaggacccgtcgccagccccccttttatggatctagaacaagctgtcctgccagctgtaattccgaagaaggagaagccggagctgtctgagcccagccatctgaacgggccaagctccgatccagaagcagcctttctaagcagggacgtggatgacggcagcgggtctccccatagtccacatcagctgagctctaagagtctcccttctcagaatctgtcccaatccctctctaatagtttcaactcgagttacatgtcatccgacaatgaaagtgatatcgaggatgaagacctcaagctggaattaaggcgcctccgcgataagcacctgaaggaaatccaagacctgcagtctaggcagaaacatgaaatagagtccttgtataccaaactgggcaaagtgcccccagctgtgataatcccgccagcagccccactctccggcaggcgaaggaggccaactaaaagcaaagggagcaagagttcccggtcatcatccctcggaaacaaaagtccccagctctcgggcaacctctctgggcagtctgctgcatcagtgctgcacccacagcagactcttcaccctccagggaacatcccagaaagtggacagaaccagctgctacagccgcttaagccttccccatccagcgacaatttatactccgctttcacttctgatggagctatttccgtgccttctttgagtgcccctggtcagggcacctcgagtaccaacactgtcggggctaccgtaaatagtcaggctgcccaggcccagcctcctgctatgacatcgtcgcgtaaaggaacatttactgacgatctgcataagcttgttgataactgggccagggacgcaatgaatctgtctggtaggagaggtagcaaaggccatatgaactacgaagggcctggcatggccaggaaatttagtgcacctggccaactgtgcatctctatgacatccaatctcggtggcagtgctcccatttcagcagcttcagcaacatcactgggccactttaccaaatccatgtgtccccctcagcagtatggatttccagctactccatttggtgcccagtggagtggaactggaggcccagcccctcagcccctgggccagttccagcctgttggtacagctagtctccagaactttaacatctccaaccttcagaaaagcatctctaatccaccaggaagcaatttgaggacgactta

SEQ ID NO: 200801 - DNA, 5927 bp, Artificial Sequence
  derived and/or modified sequence
atggatatcaagaagaaggacttttgcagcgtatttgtgataattaactcccactgttgttgctgcccacagaaagactgcattaacgagggcgtgaaaccagcctcattcgataaggtggccatccctgaggttaaagagatcatagaagggtgcatcaggcagaacaaggacgagcgatactcaatcaaggacctgttaaatcacgccttcttccaggaggagacgggtgtgagagtggaacttgcagaagaggatgacggagagaaaatcgcaattaaactttggctgaggatcgaagacatcaaaaaattaaagggaaaatataaggataatgaggccattgaatttagctttgatctggagagggacgtgcccgaggacgttgcacaggagatggtggagtcaggatacgtgtgcgagggggaccacaagacaatggccaaggctatcaaagaccgagtcagccttatcaagagaaagagagagcagcgacagcttgtgagggaggagcaagagaaaaaaaagcaggaagagtcttcacttaagcaacaggtcgagcagtcttccgcatcacaaacagggatcaagcaacttccctccgcaagtaccgggatccccaccgcctctacaacatcagccagtgtctctactcaggtcgaacccgaagaacctgaggctgatcagcaccagcagctccagtatcagcagcccagcatttcagttctgtctgatggcacagtggactcaggacaagggtcctctgtctttaccgaatctcgggtgtcctcacagcaaacagtgagttatgggtcccagcatgagcaggcgcattctaccggcacagtgccaggccacataccttccacagttcaagcacagagtcagccacatggtgtgtatcccccatctagcgtggcacagggccagagtcagggtcagccatctagctcctcactgaccggggtatcttcttcccagcccatacagcatccccagcaacagcaggggatccagcagacagcccctccgcagcagactgttcagtattcattatctcagacttccacatccagcgaagcgacgacagcacagccggtgtcacagccacaggccccacaagtcttgcctcaggtcagtgcagggaagcaactacccgtctcacagcctgtccctacaatccagggggaaccacagatcccagtggccacccagccatcagtggttcccgtgcactccggcgcacactttctgccagtcggtcagccactcccaacccctctcttgccccagtatccagtgtcccagatcccaatttcgaccccgcatgttagcaccgcccagacaggattttctagtctcccgattaccatggccgctgggattactcagccactgctgacattggccagtagcgccaccaccgctgctattcccggtgtctcaacagttgtgccttcccagctgccgaccctgctgcagccagtgacccagctgcccagccaggtccacccgcagctattgcaacccgctgtgcagtcaatggggatacccgctaatctgggccaggctgcagaagtgcctctctcgtccggtgacgttttataccagggcttcccccctcggctgccaccccagtatccgggagactctaacatcgctccatcctctaatgtagcatccgtctgcattcactctactgtgctttcgcctccgatgcccaccgaggtgctagcaacacccggatactttccaaccgttgtgcagccctacgttgagtccaacctactcgtgccaatgggaggagtgggcggacaggtccaggtctcgcagcctggaggtagtttagcccaggcacccaccacctcctctcagcaggctgttctggagtccacacagggggtcagccaagtagcaccagcggagcctgtcgcggtcgcacagacccaggccacgcagccaacaactcttgcctcatctgtcgactcagcccactccgatgtggcctcgggcatgtctgacgggaatgaaaacgtgccctcatcttcaggtcggcacgagggaaggaccactaaaaggcactatcgcaagtcagtgcgaagcagatcccgccatgaaaagacttctaggccaaaattaaggatcctgaatgtgagcaataagggggaccgggttgtggagtgccagctcgagacacacaatcgtaagatggtgacatttaaattcgacctggatggggataatcccgaagagatcgccaccattatggtgaacaacgattttattctcgccatagagcgagaatcatttgtcgaccaggtgagggaaattatcgaaaaagccgatgaaatgctgtcggaagatgtaagcgtggaaccagagggcgatcagggacttgagtctctccaggggaaggacgactacggattcagtggaagtcagaaactcgagggggagtttaaacaacctattcctgcaagcagcatgccacagcagataggaatccccacaagtagtttaacacaggtggtacatagtgctggcagaaggttcattgtcagccccgtgcctgaaagtaggttgcgcgagtctaaagtgttccccagcgagattaccgatactgtggctgccagtaccgcgcagtcacccggaatgaacctttcccattctgcaagctcgctctctttacaacaagctttctccgagttgaggcgggctcagatgaccgaaggtccgaacaccgctcctccaaatttctcccatacggggcctacgttccccgtagtaccacccttcctgagttccatcgctggagttccaactacagctgccgcaacagcacccgtccctgccactagcagccctccaaatgacatatccacatcagtaattcaatcagaggtgacagtccctacggaggagggcatcgccggtgtggcaactagtacaggtgtcgtgacttctggaggactccccattcccccagtgagtgagtccccagttctgagttcggtggtatcctcaatcacaatccctgcggtcgtgtccatctctacaacatcaccatctctgcaggtgcccacttcaacaagtgagattgtcgtgtctagcaccgctctgtacccttccgttaccgtctccgcaacttccgcaagcgctggagggagcacggcaactccaggcccaaagccgccagcagtcgtcagtcagcaggcagctggatcaactaccgtcggggctaccctcaccagcgtgagtactacaacatcttttccgtccaccgcttcccagctatgcatccagctgagctcctcaacttcaacacccacactggctgagacggttgtggtaagtgctcacagcctggataagacatcccattccagtacgactggattagcctttagtctgtccgccccatccagttctagctcgccgggtgccggagtcagctcttacattagccagcctggcggtctgcacccactggtaatcccaagcgtaatcgcctcaacccctatcttacctcaggcagcaggtcccactagcacacccctgctgccccaggtcccatcaatccccccactagtccagcctgtcgccaatgtgcccgcagtccagcagactctgattcactctcaaccacagcctgcactcctacccaatcagccccatactcattgtcccgaagtagactccgacacacagcccaaagcacccggaattgacgacatcaaaacactggaagagaagctgagaagtctcttttcagagcactcttctagcggagctcaacacgctagcgtgtccctcgaaacatcccttgtgatcgagagtaccgttacaccgggtatccccacgaccgcggtggcccctagtaagttgcttaccagcactacatctacctgtctgccaccaacaaacttacctttaggaacggtggctttgcctgtgactcccgtcgtgacccctgggcaagtctcaaccccagtttcaactaccacaagcggggtaaaacctggcaccgcgccttctaagcctcccttgaccaaggcacctgtgctgccggtcgggacagagttgcccgcaggaacattgccctcggaacagctcccaccatttccaggtccctccttaacccagagccagcaaccgctcgaagacctcgacgcgcagttgaggcggactttatcacccgagatgatcaccgttacttcggccgttggacccgtctctatggctgcacccaccgcgattacagaagccggtacccagccccaaaaaggcgtttcccaggtcaaggagggtccagtgttggcaactagttcgggggctggcgtcttcaaaatgggcaggttccaagtgtctgtggcagctgacggagctcaaaaagagggtaaaaataaatcggaggatgcaaaaagtgtgcatttcgaatctagtacgagcgagtctagcgtgctctcatcgagctcccctgagtctacacttgtgaaacctgaaccaaatggcatcaccataccgggaatttcgagtgacgttccagagtctgcgcataaaacgactgcgtcagaggctaaaagcgacaccgggcagccaactaaagtcggacgttttcaggttacaacaaccgccaacaaagtcgggagattttccgtaagcaagactgaagacaaaatcacagatacaaaaaaggaggggcctgttgcttcaccccctttcatggatctggagcaggctgtgctgccagctgtgatcccaaaaaaggagaaacctgagttaagcgagccctcacatcttaacggaccttcttcagaccccgaggctgcatttctttctagagatgtagacgatggatctggatcccctcattcgccacaccagctcagctccaagtcactgccatcacagaacctgtcccagtccctgtctaactcattcaactcgagctacatgagctccgacaacgagagcgatattgaggacgaggatctgaagctcgaactgcggcgtctgcgggataagcacttaaaggagattcaggaccttcagtcccgtcagaagcatgagatcgaaagtctgtatacgaagctgggcaaggtaccacccgcagttatcatcccgccagctgctcccttaagtggccgacgaaggcgccctaccaaatcaaagggatcaaaatcctcccgtagcagctcgctgggcaacaaatctccacagctgtcggggaatctatcaggacagtccgccgctagcgtgctgcacccccaacaaacactgcatcctcctggaaacatccctgaaagcggacaaaatcaacttctccaacccctgaagccttcgccatcttctgataatctttattccgctttcactagcgatggcgcaatatcggtcccaagcttgagtgcgccagggcaggggacatccagcacgaacaccgtaggagctacggtgaattctcaggcggctcaagcacagccccctgcaatgactagttcaaggaaggggacatttaccgacgatctgcacaaacttgtcgacaactgggcgcgagacgccatgaacctgtcaggcagacgtggttctaaaggccatatgaattatgagggtccaggcatggcaaggaaattctctgcaccaggacaactatgtattagcatgacctctaacctgggaggtagcgcacccatctcggctgcctcagccaccagcctggggcacttcacaaaatcgatgtgcccaccccagcagtacggctttcctgctacacccttcggcgcacagtggtccggcaccgggggacccgcaccacagcccctgggtcaatttcagcccgtggggactgcctcactacagaatttcaacatctctaacctgcagaaaagcatctccaatccgcctgggagtaacctccgtaccaccta

SEQ ID NO: 200802 - DNA, 8642 bp, Artificial Sequence
  derived and/or modified sequence
atgtccggaggggcagccgaaaagcaatcctccactccaggcagcttgtttttatcacctcccgcacctgctcccaaaaacggcagcagcagcgacagctcagtgggcgagaaattgggggcagctgctgccgatgcagttacagggagaacggaggaatatcggaggcgtcgacacaccatggataaggattctcgcggagctgccgctaccactactacaacagagcaccgattttttagacggtctgtgatctgtgatagcaatgctaccgcgctagagctgccagggctccccctgtctctcccacagccttctatccctgcagccgttccgcaatctgcacctcctgagcctcatagagaggaaactgtgactgccaccgctacgtcacaggtcgcccagcagccccctgccgcagccgcaccaggcgaacaagccgtggctggaccagcaccatcaaccgtcccatcgtcaacctctaaggacaggcccgttagtcagcctagcctggtgggaagcaaagaggagcctccaccagcccgttccggttcaggtggagggtccgctaaggagccccaggaggagagaagtcagcagcaagacgatattgaagagctagagaccaaagctgtgggaatgtctaacgacggcaggttcttgaagttcgacatcgagatcggacggggttcttttaagacggtttacaaaggcttggacactgagactacggtggaggttgcgtggtgtgagttgcaggatcggaagctgaccaagagtgagcggcagcgctttaaggaagaggccgaaatgttgaagggtcttcaacatccaaatatcgtgagattctacgatagttgggagagcacagtgaagggcaaaaaatgtatcgttctcgtcacagagctgatgacctccgggaccctcaagacatatctgaaaaggttcaaagttatgaagataaaggtgctccgcagctggtgcagacaaatattaaaggggctgcaattcctgcatactcggactccacccatcatccaccgagacctgaaatgtgataatatatttattacaggacctactggatcggtgaagattggcgacctgggcctggccactctgaaacgagcttcatttgccaaatcagtgataggcaccccagagttcatggccccagagatgtatgaggaaaaatacgacgagtccgtggatgtgtacgcattcggaatgtgcatgctggagatggccacgagcgaatacccgtactctgaatgtcaaaacgcagcgcagatatatcgccgagtcaccagcggcgtcaaaccagcctcctttgataaggttgccattccagaggtcaaggaaattatagaaggatgtatcagacagaataaggacgagcgatattccattaaggacctgctcaatcacgcttttttccaggaggaaaccggagttcgagtggagctggccgaggaagacgacggcgagaagattgcaatcaagttatggctgaggatcgaggatataaaaaaactgaaaggcaaatataaggacaacgaagctattgagttttcttttgatttagagagagatgtgcctgaagatgtggcgcaggaaatggtcgaatcgggttacgtctgcgaaggagatcacaagactatggccaaagccatcaaggaccgcgtgtctcttatcaagcgaaaacgggagcagcgacagttggtccgagaggagcaagaaaagaagaaacaggaggagtcttccctgaaacagcaggtggagcagtcatctgcaagtcagacaggcatcaaacagctgccttcagcatctactggaattcccactgctagcaccactagtgcctcggtgagtactcaggtcgaacctgaagagcccgaagccgatcaacaccagcagttgcagtatcaacaaccgtcgatatccgtgttgtcagacgggactgtagattccggacagggctcatctgtgtttacagagagtcgtgtttcatcacagcagaccgtttcatacggttcacagcatgaacaggctcactctactgggactgtacccggtcacatcccctctacagtgcaagcacagagtcagccccatggcgtctacccccctagctcagtgccaaggcgtggaaggtccatgtccgtgtgcgtgccaatcttcctgctgctgccgctgtgccccgcaagtctaccggtcctgtttcatcccacagccagcaccgtatgtacctccttctcgtttcccccaccagattgtcccgaagagacttttgcggaaaaactcagcaaagcacttgagtctgttctcccaatgcactccgcctcccagcggaagcaccgccgaagctcactcccaagtctattcgtaagtaccccacaatctatggcccatccctgtggcggaactccaacttacccagagagccagatcttctttccaacaattcacgagcgcccagtctccttttcaccccctccaacctgtcctcctaaggtcgccataagtcagcgtcggaagtctacatcattcctggaagctcagacgcaccattttcagccattgttgagaaccgtggggcagtccctgctgcctccaggtggcagtccaaccaactggacaccagaggccgtggtaatgcttgggactactgcatcccgtgtcaccggggagagttgtgagatccaagtgcacccaatgtttgagccctcgcaggtttactctgactatcggccaggacttgtgctccccgaagaagcacactactttataccacaggaagctgtgtacgtcgccggagtgcactaccaggccagggtagctgagcaatatgagggtataccctacaattcctcagtcctgtcatcgcccatgaagcaaattccggagcagaaacccgtgcagggcggtcccacctcttcttcggtctttgaatttccatctggccaggcattcctagtcggccatctgcaaaacctccgactcgattccggcctagggcctggatccccacttagctccattagcgctccaattagtacggatgccactaggcttaaatttcatccagtatttgtgcctcactctgcacccgcagtgctcactcataacaatgaaagcagaagtaactgtgtcttcgagttccacgttcacaccccaagttccagttctggcgaaggcggaggtatcttgccccagcgggtgtaccgcaatcggcaggtcgccgtcgatctgaaccaagaggagcttcctccccaaagcgtaggtcttcacggttacctccagccagttactgaggagaaacacaattatcatgctccagaattgacggtcagcgtggtcgaacccatcgggcagaattggcctataggatccccggaatactcctccgattcctcccagattacgagtagtgacccctccgattttcagtcacccccaccgactggcggagctgccgcaccatttggcagcgatgtgagtatgcctttcatccaccttcctcagacggtcctgcaggagagcccactcttcttttgcttccctcagggtaccacatcccagcaggtacttaccgccagcttctcttcgggcggatccgcattacatcctcaggcccaggggcagtcacagggccagccctccagcagctcgctcactggcgtctcaagtagccagccaatccaacatccacagcagcaacaggggatccaacagacagcccctccccaacagacagttcagtactcactatcgcaaacctctaccagctccgaggccaccaccgcccagccagtgagtcagccccaagccccacaggtactccctcaggtctcggctggtaagcagctacctgttagtcagcctgtccctactattcagggggaacctcagatccccgtcgcaacacaaccatctgtagtaccagtacattctggagcgcattttctgccagtgggccaaccccttcctactccgttgcttccacagtatcccgtgtcccaaattcccatttcgaccccacacgtaagtaccgcccagaccggcttttccagtctgcccatcaccatggcagccggaatcactcagcccctgttgacgttagcaagcagcgctaccacggcggcaatcccaggggtctcgaccgtggttccaagtcaactgcctactctcctgcagcccgtgacccagctccctagccaggtgcatccacagctacttcagcccgcagtgcagagcatggggatcccagctaatctgggtcaggccgctgaggttcctttatcttcaggtgatgtgttataccaaggcttcccgccacggctccccccacagtatcccggtgattcaaacatcgcaccttcaagtaatgtcgcaagtgtgtgcattcactctacggtgctttctccaccgatgccaacagaggtgctcgccacccctgggtatttcccaaccgtagtccagccctacgttgaatccaacctcctcgtccctatggggggtgtggggggtcaagtgcaggtttcccagcccggtgggagcctggcccaagcacccactacgagctctcagcaagctgtgttggagtctacgcagggtgtgagccaggtggccccagcagagccagtggcagtggcccaaactcaggccactcagcctacaaccctcgccagcagcgttgactctgcccatagcgacgtggctagtgggatgagcgatgggaacgaaaacgtaccatcttcttcgggaaggcatgaaggcaggacgacaaagcggcactatcgcaaaagtgttcgcagcagaagcaggcatgagaagaccagtaggccaaagctgcgcatcctgaacgtgagcaacaagggcgatagggtggtcgagtgccagctggaaacccacaataggaagatggtgacctttaagtttgacttggacggagacaacccagaggagatcgccactataatggtgaacaacgacttcatcctagccatcgagagagagtcattcgtggaccaagtcagggagataatcgagaaagctgatgagatgctatcggaggacgtctcagtcgagccagaaggcgatcagggactggagagtttacaaggtaaagacgactacggcttttcaggctctcagaagctggaaggggagtttaagcagccaattccggcttcctcgatgccccagcaaatcggtattccgacctccagcctcacacaggttgtccacagtgctgggaggcggtttattgtgtccccagtgcccgagtcaaggctcagggagtcaaaggtgtttccctcagaaatcaccgatacagtcgctgcctctacggcccaaagcccaggaatgaacctcagtcactccgcttctagtctctcgctccagcaagcattctcagaattgcgccgagcacagatgactgaggggccaaatactgctccacctaattttagccatactgggccaacgttcccggtagttcccccattcctatcatcaatcgccggagtacctacaaccgctgccgctaccgcacctgtgcccgctacatcttctccaccaaacgatattagcacatccgtgatccaatccgaggttacggttccgacggaggaagggatcgccggtgtcgcaaccagcactggcgtcgtgacttccggcggactgccaataccaccagtctctgagagccctgtactgtctagcgtggttagctcgatcaccatccccgcagtagtatctatttctaccacaagcccctcgctccaggtcccgacttctacctcagaaatcgtcgtgtcctctaccgccctgtacccgagcgttactgtcagtgcgaccagtgcgtctgctgggggtagcaccgcaacccctggtccgaagccacccgcagtggttagccagcaggcagcgggaagcacaaccgtcggggctaccctgacctcagtaagtactactaccagtttcccaagcacggcatctcaactctgtatccaactgagctcttcaaccagtacccctaccctggcagaaacagtagtggtctcagcccacagtctggacaagacatctcacagcagtaccactggcctagctttttcactcagcgcgccatccagtagttcttcccctggggctggggtctcgtcttacatcagtcagccgggaggattacatcccctggtgatcccatcagtgattgctagtacgccaattttacctcaggctgctggacctacctcaacgcctctgctccctcaagtcccatcgatcccgcctctcgtgcagcccgttgcgaatgtgcctgcagtccagcagacccttatacactcacagccccaaccagctctgctgcctaatcagccccacacacattgtcccgaggttgactccgatacacagccaaaggccccagggatcgatgacataaagaccctggaagagaagctgagatcattgttttctgagcatagcagcagcggagcacagcatgcctcggttagtctggaaacaagcctggtcatcgagtccacagtaacgcctggtatccctaccacggccgtggccccatccaaattgctgacctccactacctccacttgcctgccgccaaccaatctgcccctcgggacagttgctctacccgtgactcccgtcgtcactcccggtcaagtctcgacacccgtgagcacaacaacgtccggcgtgaagccaggaaccgcaccttcaaaacctcccctgacgaaggcccctgtcctaccggtgggaaccgagttgcccgctggcacgctgcccagtgaacagcttccaccatttccaggcccttccctgacccaaagtcagcagccactggaagacctggacgctcaactgagacgaaccttatctcctgaaatgattacggtcacttctgcagtcggccctgtgagtatggccgctccgacagccatcactgaggccggtacccagcctcagaaaggtgttagccaggtcaaggaagggcctgtactggcaacctcaagcggcgctggcgtgttcaagatgggtcggttccaagtgagcgtggccgcagacggcgcacagaaggagggcaaaaataagtcagaggatgccaagagcgtgcattttgagtccagcaccagtgaatccagtgttctgagctcttcctcacccgagagcactctcgtcaaacccgagccaaatggcatcactatccccggtatttctagcgacgtgcccgagtctgcgcacaaaacgactgctagtgaagccaaaagcgacacaggccagccgaccaaagtgggacggtttcaggtcacaactactgctaataaagtcggcaggttctctgtatctaagactgaagacaagattaccgacaccaagaaagagggtcccgtagcctccccacccttcatggatctggaacaggcagtgctgcccgcagtcattcccaagaaagagaaaccggaactctcagagccaagtcacctcaatggtccctcctccgaccccgaagcagccttcctgtctcgtgacgtagatgacggctcgggcagcccgcactctccacaccagttgagttccaagagtttaccctcccagaatttaagtcaaagcctgtccaacagcttcaattctagttacatgtccagcgacaatgagtctgatatcgaagatgaagatctcaaactggagcttagaaggctccgggataaacacctcaaagagattcaggacctgcagagcagacagaaacacgaaatcgagtctctctacacaaaattaggcaaggtgcccccagcggtgataatacccccagctgccccattgagtggaaggcgcaggcgacctacaaagtcgaaggggtccaagtcctcccgcagctcctcattgggcaacaagtctccccagctgtctgggaacctaagcggacaatcggcagccagcgttttgcacccgcaacagacattacaccccccaggtaacatccctgagtctggtcagaatcaacttctccagccactgaagccatccccaagcagtgacaacctgtacagtgcattcacgtctgacggcgctattagcgtaccgagcctcagcgcccctggacagggcacctccagtaccaacactgtcggggctaccgtgaactcccaggccgctcaggcacagcctcctgccatgacatcatctagaaaaggtacattcaccgatgacctgcacaaactggtggacaactgggctagggatgctatgaacctgtccggccgacgcggttctaaagggcatatgaattacgagggacccggaatggccagaaagttcagcgcgccagggcaactttgtatcagcatgacgtccaatctgggtggcagcgcccctattagtgcggcatccgccacttcactcggacacttcactaagtccatgtgtccccctcagcagtacggctttccagcgactcccttcggggcacagtggagtggcacggggggtcccgctccccagccccttggacagtttcagcctgtggggaccgcatctctccaaaactttaatatctcgaatctgcagaagtccataagcaacccccctgggtccaatttgaggaccactta

SEQ ID NO: 200803 - DNA, 10452 bp, Artificial Sequence
  derived and/or modified sequence
ccggcccttcgcctctgggcgatgggcgacctgtgaggccggtccccatcgctgggggcgcgtgtgggaggaggcggccgcccgagtgaccgggagccgggccgcggccttccctcgcccgcctcggcccctcccactcctctgccccggggccgccaccgcccgggcgtcggacctggtcccgtgctcgcggtgccgccgccctctgggcctagcccgcccagctcggcgagcggcggcagtgggagccgcgtccgccgcatccgcctcgactcggtgccggcccctggccctcccctcatgactgcggcgcctctgctgccaccgcccgcccggccgccgctcgccgcaggatggatgcggaccgtgcggcgctaacccccgtggctcagctcccgaatcgcccgccttcgagccctcctcgtgagccgcagcagcctcggtgccagcccccgccgcagctgggcccagcggtccgcctgtccctcgttgcggcttgtcggtgctgagtgaggcgtcgtccgggtcggcgcgaacccgcccggccgcggttccctgcagacctctgcgcgggcggctcggcccttcacgcccttttcgttcacgaatccgagcccgctcgcctctctccagcgaaccgaccatgtctggcggcgccgcagagaagcagagcagcactcccggttccctgttcctctcgccgccggctcctgcccccaagaatggctccagctccgattcctccgtgggggagaaactgggagccgcggccgccgacgctgtgaccggcaggaccgaggagtacaggcgccgccgccacactatggacaaggacagccgtggggcggccgcgaccactaccaccactgagcaccgcttcttccgccggagcgtcatctgtgactccaatgccactgcactggagcttcccggccttcctctttccctgccccagcccagcatccccgcggctgtcccgcagagtgctccaccggagccccaccgggaagagaccgtgaccgccaccgccacttcccaggtagcccagcagcctccagccgctgccgcccctggggaacaggccgtcgcgggccctgccccctcgactgtccccagcagtaccagcaaagaccgcccagtgtcccagcctagccttgtggggagcaaagaggagccgccgccggcgagaagtggcagcggcggcggcagcgccaaggagccacaggaggaacggagccagcagcaggatgatatcgaagagctggagaccaaggccgtgggaatgtctaacgatggccgctttctcaagtttgacatcgaaatcggcagaggctcctttaagacggtctacaaaggtctggacactgaaaccaccgtggaagtcgcctggtgtgaactgcaggatcgaaaattaacaaagtctgagaggcagagatttaaagaagaagctgaaatgttaaaaggtcttcagcatcccaatattgttagattttatgattcctgggaatccacagtaaaaggaaagaagtgcattgttttggtgactgaacttatgacgtctggaacacttaaaacgtatctgaaaaggtttaaagtgatgaagatcaaagttctaagaagctggtgccgtcagatccttaaaggtcttcagtttcttcatactcgaactccacctatcattcaccgcgatcttaaatgtgacaacatctttatcaccggccctactggctcagtcaagattggagacctcggtctggcaaccctgaagcgggcttcttttgccaagagtgtgataggtaccccagagttcatggcccctgagatgtatgaggagaaatatgatgaatccgttgacgtttatgcttttgggatgtgcatgcttgagatggctacatctgaatatccttactcggagtgccaaaatgctgcacagatctaccgtcgcgtgaccagtggggtgaagccagccagttttgacaaagtagcaattcctgaagtgaaggaaattattgaaggatgcatacgacaaaacaaagatgaaagatattccatcaaagaccttttgaaccatgccttcttccaagaggaaacaggagtacgggtagaattagcagaagaagatgatggagaaaaaatagccataaaattatggctacgtattgaagatattaagaaattaaagggaaaatacaaagataatgaagctattgagttttcttttgatttagagagagatgtcccagaagatgttgcacaagaaatggtagagtctgggtatgtctgtgaaggtgatcacaagaccatggctaaagctatcaaagacagagtatcattaattaagaggaaacgagagcagcggcagttggtacgggaggagcaagaaaaaaaaaagcaggaagagagcagtctcaaacagcaggtagaacaatccagtgcttcccagacaggaatcaagcagctcccttctgctagcaccggcatacctactgcttctaccacttcagcttcagtttctacacaagtagaacctgaagaacctgaggcagatcaacatcaacaactacagtaccagcaacccagtatatctgtgttatctgatgggacggttgacagtggtcagggatcctctgtcttcacagaatctcgagtgagcagccaacagacagtttcatatggttcccaacatgaacaggcacattctacaggcacagtcccagggcatataccttctactgtccaagcacagtctcagccccatggggtatatccaccctcaagtgtggcacaggggcagagccagggtcagccatcctcaagtagcttaacaggggtttcatcttcccaacccatacaacatcctcagcagcagcagggaatacagcagacagcccctcctcaacagacagtgcagtattcactttcacagacatcaacctccagtgaggccactactgcacagccagtgagtcagcctcaagctccacaagtcttgcctcaagtatcagctggaaaacagcttccagtttcccagccagtaccaactatccaaggcgaacctcagatcccagttgcgacacaaccctcggttgttccagtccactctggtgctcatttccttccagtgggacagccgctccctactcccttgctccctcagtaccctgtctctcagattcccatatcaactcctcatgtgtctacggctcagacaggtttctcatcccttcccatcacaatggcagctggcattactcagcctctgctcacgttggcttcatctgctacaacagctgcgatcccgggggtatcaactgtggttcctagtcagcttccaacccttctgcagcctgtgactcagctgccaagtcaggttcacccacagctcctacaaccagcagttcagtccatgggaataccagctaaccttggacaagctgctgaggttccactttcctctggagatgttctgtaccagggcttcccacctcgactgccaccacagtacccaggagattcaaatattgctccctcttccaacgtggcttctgtttgcatccattctacagtcctatcccctcccatgccgacagaagtactggctacacctgggtactttcccacagtggtgcagccttatgtggaatcaaatcttttagttcctatgggtggtgtaggaggacaggttcaagtgtcccagccaggagggagtttagcacaagcccccactacatcctcccagcaagcagttttggagagtactcagggagtctctcaggttgctcctgcagagccagttgcagtagcacagacccaagctacccagccgaccactttggcttcctctgtagacagtgcacattcagatgttgcttcaggtatgagtgatggcaatgagaacgtcccatcttccagtggaaggcatgaaggaagaactacaaaacggcattaccgaaaatctgtaaggagtcgctctcgacatgaaaaaacttcacgcccaaaattaagaattttgaatgtttcaaataaaggagaccgagtagtagaatgtcaattagagactcataataggaaaatggttacattcaaatttgacctagatggtgacaaccccgaggagatagcaacaattatggtgaacaatgactttattctagcaatagagagagagtcgtttgtggatcaagtgcgagaaattattgaaaaagctgatgaaatgctcagtgaggatgtcagtgtggaaccagagggtgatcagggattggagagtctacaaggaaaggatgactatggcttttcaggttctcagaaattggaaggagagttcaaacaaccaattcctgcgtcttccatgccacagcaaataggcattcctaccagttctttaactcaagttgttcattctgcgggaaggcggtttatagtgagtcctgtgccagaaagccgattacgagaatcaaaagttttccccagtgaaataacagatacagttgctgcctctacagctcagagccctggaatgaacttgtctcactctgcatcatcccttagtctacaacaggccttttctgaacttagacgtgcccaaatgacagaaggacccaacacagcacctccaaactttagtcatacaggaccaacatttccagtagtacctcctttcttaagtagcattgctggagtcccaaccacagcagcagccacagcaccagtccctgcaacaagcagccctcctaatgacatttccacatcagtaattcagtctgaggttacagtgcccactgaagaggggattgctggagttgccaccagcacaggtgtggtaacttcaggtggtctccccataccacctgtgtctgaatcaccagtactttccagcgtagtttcaagtatcacaatacctgcagttgtctcaatatctactacatccccgtcacttcaagtccccacatccacatctgagatcgttgtttctagtacagcactgtatccttcagtaacagtttcagcaacttcagcctctgcagggggcagtactgctaccccaggtcctaagcctccagctgtagtatctcagcaggcagcaggcagcactactgtgggagccacattaacatcagtttctaccaccacttcattcccaagcacagcttcacagctgtgcattcagcttagcagcagtacttctactcctactttagctgaaaccgtggtagttagcgcacactcactagataagacatctcatagcagtacaactggattggctttctccctctctgcaccatcttcctcttcctctcctggagcaggagtgtctagttatatttctcagcctggtgggctgcatcctttggtcattccatcagtgatagcttctactcctattcttccccaagcagcaggacctacttctacacctttattaccccaagtacctagtatcccacccttggtacagcctgttgccaatgtgcctgctgtacagcagacactaattcatagtcagcctcaaccagctttgcttcccaaccagccccatactcattgtcctgaagtagattctgatacacaacccaaagctcctggaattgatgacataaagactctagaagaaaagctgcggtctctgttcagtgaacacagctcatctggagctcagcatgcctctgtctcactggagacctcactagtcatagagagcactgtcacaccaggcatcccaactactgctgttgcaccaagcaaactcctgacttctaccacaagtacttgcttaccaccaaccaatttaccactaggaacagttgctttgccagttacaccagtggtcacacctgggcaagtttctaccccagtcagcactactacatcaggagtgaaacctggaactgctccctccaagccacctctaactaaggctccggtgctgccagtgggtactgaacttccagcaggtactctacccagcgagcagctgccaccttttccaggaccttctctaacccagtcccagcaacctctagaggatcttgatgctcaattgagaagaacacttagtccagagatgatcacagtgacttctgcggttggtcctgtgtccatggcggctccaacagcaatcacagaagcaggaacacagcctcagaagggtgtttctcaagtcaaagaaggccctgtcctagcaactagttcaggagctggtgtttttaagatgggacgatttcaggtttctgttgcagcagacggtgcccagaaagagggtaaaaataagtcagaagatgcaaagtctgttcattttgaatccagcacctcagagtcctcagtgctatcaagtagtagtccagagagtaccttggtgaaaccagagccgaatggcataaccatccctggtatctcttcagatgtgccagagagtgcccacaaaactactgcctcagaggcaaagtcagacactgggcagcctaccaaggttggacgttttcaggtgacaactacagcaaacaaagtgggtcgtttctctgtatcaaaaactgaggacaagatcactgacacaaagaaagaaggaccagtggcatctcctccttttatggatttggaacaagctgttcttcctgctgtgataccaaagaaagagaagcctgaactgtcagagccttcacatctaaatgggccgtcttctgacccggaggccgcttttttaagtagggatgtggatgatggttccggtagtccacactcgccccatcagctgagctcaaagagccttcctagccagaatctaagtcaaagccttagtaattcatttaactcctcttacatgagtagcgacaatgagtcagatatcgaagatgaagacttaaagttagagctgcgacgactacgagataaacatctcaaagagattcaggacctgcagagtcgccagaagcatgaaattgaatctttgtataccaaactgggcaaggtgccccctgctgttattattcccccagctgctcccctttcagggagaagacgacgacccactaaaagcaaaggcagcaaatctagtcgaagcagttccttggggaataaaagcccccagctttcaggtaacctgtctggtcagagtgcagcttcagtcttgcacccccagcagaccctccaccctcctggcaacatcccagagtccgggcagaatcagctgttacagccccttaagccatctccctccagtgacaacctctattcagccttcaccagtgatggtgccatttcagtaccaagcctttctgctccaggtcaaggaaccagcagcacaaacactgttggggcaacagtgaacagccaagccgcccaagctcagcctcctgccatgacgtccagcaggaagggcacattcacagatgacttgcacaagttggtagacaattgggcccgagatgccatgaatctctcaggcaggagaggaagcaaagggcacatgaattacgagggccctggaatggcaaggaagttctctgcacctgggcaactgtgcatctccatgacctcgaacctgggtggctctgcccccatctctgcagcatcagctacctctctaggtcacttcaccaagtctatgtgccccccacagcagtatggctttccagctaccccatttggcgctcaatggagtgggacgggtggcccagcaccacagccacttggccagttccaacctgtgggaactgcctccttgcagaatttcaacatcagcaatttgcagaaatccatcagcaaccccccaggctccaacctgcggaccacttagacctagagacattaactgaatagatctgggggcaggagatggaatgctgagggggtgggtgggggtgggaagtagcctatatactaactactagtgctgcatttaactggttatttcttgccagaggggaatgtttttaatactgcattgagccctcagaatggagagtctcccccgctccagttattggaatgggagaggaaggaaagaacagcttttttgtcaaggggcagcttcagaccatgctttcctgtttatctatactcagtaatgaggatgagggctaggaaagtcttgttcataaggaagctggagaactcaatgtaaaatcaaacccatctgtaatttcgagtgggtggagctcttgcttttggtacatgccctgaatccctcactccctcaagaatccgaaccacaggacaaaaaccacctactgggctctctcctaccctgccctcctcccttttttttacccctctcttttttattttttctttgctctttagaacccagtgaaaaataccagggtactggggtgcaactctttcttatgataggtcattagtgctttaagcaaaagatattagcagctttgactgcagcattagcaattaggaaaaaaaaaaaattaagttccctgcggacatgtaactttgccatcagttttgatgtggaaacactgtgatatataaaatgttgttggacaacagtagttttaagagtaaaatatgaaacgtttaaaaagttccaaaaaaagctagctctgtcctttacttattgagacactttaactttttcctttgtatttccattgtattagataaataaatgtgaatgtaaaattgtataaattactgtacttgaatacttctgtttcccagtgttgcttgctggacattttagtgccttggacttctattgcttctgccattagcatcaacttaccagaccccagatcaataaagggcatgtggaaggaaatcgtaggtccatgtgaccccagcagtccagcagtggttatgccaaagggaaattgaaaaagtatttttttaagtcattcaacaactttgtctagagcaggtgtaagatgagtagggtgggaagttaggttggcatcagtggttaaaaacagaaagttctgtttcgggaatagtgaggagggggtgttgtaacaaaattggacaacttaaaagaatggtgtgtgctgggtgaaagacaaagactaaagaatgaggaaacaaacgtgatgcctggccagtgactgtcatataaacctttcttatttgagctaggcttgaacagacgtgacctagaagaaactgaacataaagagaagggggtggggggctagttttcaagttggggaacctgatagtgaaaagtcacagatggagaaaattgctctcagaaaaactgtttggattgctttcctcttgttgcacatgtaccatgcatttctcagcttggggtactacattttgtggaaagttaatctatctatctttccacatctgaattaatcattctaggaaagaatacttattcctactcatttcctttatgatgtccaaatggttgcaggatcataatctattgtgccacctttatttctagaagtacaactaatatgttcacattttcaaataaataatactccccgtaagtaataactgcaaccaatcagtgttattcagtgctatgcctccttgtaatgggtagttattaattattttcagagctttccggaaatactgtcctaactggctatgtttaggatctttgttatctctgaagacaaagaaagaagctaggactcttaattttggggtgcttcttgactcttagttgggaaactgaaaatatttccaaccttttacccacgtcaatggcatattctgggaatcaccaccaccaccaccactaccacagaaagaggctggaggctcctgtaccctgttcattccttaagggccctgcttcccttagtaagtaagtaagttggtctacggccctaaatatgcaaatgagagctgaaggtttttaaaaggtagaaaggaaaagggcaagggcttccacccctgctttaaaatgatttatttattctctgcttgtatttcttgtggagagagtaaggatagaaccaacaaggggctgagtagctgagaaaggggccacccaagagtgaaacatactttataccagaggagcagtggagcctcatgcagcacattatcatttgttatttgggtttaataataattttgacatcttttcactcatacacaaaaaaagtcagaactggtgttatttactgttgatttcatcctcctgtgtatgaaataacaagcctagaggaatgaactagtgctactgaactgtttaaattatttttgtgttaatagtacactttgagtatctttttccacattaaaaactttctgaattataaatgttttccttacattatttaacaatgtacactgttaaaaataaaaataaaaattcaaactttgggggtttctcagcagccgttaattgtacattttgcactaactctgggtgttgcgcttcttgtaagattgcgctttgtgcttcagtttgttacctttgtagacttatttaatgaaaccattcaaataaaccaaacttgcttttgttga

SEQ ID NO: 200804 - DNA, 8588 bp, Artificial Sequence
  derived and/or modified sequence
atggatattaaaaagaaagatttttgctcagtatttgtcatcataaattctcattgctgctgctgccctcaaaaggattgtataaatgagggggtgaagccagccagttttgacaaagtagcaattcctgaagtgaaggaaattattgaaggatgcatacgacaaaacaaagatgaaagatattccatcaaagaccttttgaaccatgccttcttccaagaggaaacaggagtacgggtagaattagcagaagaagatgatggagaaaaaatagccataaaattatggctacgtattgaagatattaagaaattaaagggaaaatacaaagataatgaagctattgagttttcttttgatttagagagagatgtcccagaagatgttgcacaagaaatggtagagtctgggtatgtctgtgaaggtgatcacaagaccatggctaaagctatcaaagacagagtatcattaattaagaggaaacgagagcagcggcagttggtacgggaggagcaagaaaaaaaaaagcaggaagagagcagtctcaaacagcaggtagaacaatccagtgcttcccagacaggaatcaagcagctcccttctgctagcaccggcatacctactgcttctaccacttcagcttcagtttctacacaagtagaacctgaagaacctgaggcagatcaacatcaacaactacagtaccagcaacccagtatatctgtgttatctgatgggacggttgacagtggtcagggatcctctgtcttcacagaatctcgagtgagcagccaacagacagtttcatatggttcccaacatgaacaggcacattctacaggcacagtcccagggcatataccttctactgtccaagcacagtctcagccccatggggtatatccaccctcaagtgtggcacaggggcagagccagggtcagccatcctcaagtagcttaacaggggtttcatcttcccaacccatacaacatcctcagcagcagcagggaatacagcagacagcccctcctcaacagacagtgcagtattcactttcacagacatcaacctccagtgaggccactactgcacagccagtgagtcagcctcaagctccacaagtcttgcctcaagtatcagctggaaaacagcttccagtttcccagccagtaccaactatccaaggcgaacctcagatcccagttgcgacacaaccctcggttgttccagtccactctggtgctcatttccttccagtgggacagccgctccctactcccttgctccctcagtaccctgtctctcagattcccatatcaactcctcatgtgtctacggctcagacaggtttctcatcccttcccatcacaatggcagctggcattactcagcctctgctcacgttggcttcatctgctacaacagctgcgatcccgggggtatcaactgtggttcctagtcagcttccaacccttctgcagcctgtgactcagctgccaagtcaggttcacccacagctcctacaaccagcagttcagtccatgggaataccagctaaccttggacaagctgctgaggttccactttcctctggagatgttctgtaccagggcttcccacctcgactgccaccacagtacccaggagattcaaatattgctccctcttccaacgtggcttctgtttgcatccattctacagtcctatcccctcccatgccgacagaagtactggctacacctgggtactttcccacagtggtgcagccttatgtggaatcaaatcttttagttcctatgggtggtgtaggaggacaggttcaagtgtcccagccaggagggagtttagcacaagcccccactacatcctcccagcaagcagttttggagagtactcagggagtctctcaggttgctcctgcagagccagttgcagtagcacagacccaagctacccagccgaccactttggcttcctctgtagacagtgcacattcagatgttgcttcaggtatgagtgatggcaatgagaacgtcccatcttccagtggaaggcatgaaggaagaactacaaaacggcattaccgaaaatctgtaaggagtcgctctcgacatgaaaaaacttcacgcccaaaattaagaattttgaatgtttcaaataaaggagaccgagtagtagaatgtcaattagagactcataataggaaaatggttacattcaaatttgacctagatggtgacaaccccgaggagatagcaacaattatggtgaacaatgactttattctagcaatagagagagagtcgtttgtggatcaagtgcgagaaattattgaaaaagctgatgaaatgctcagtgaggatgtcagtgtggaaccagagggtgatcagggattggagagtctacaaggaaaggatgactatggcttttcaggttctcagaaattggaaggagagttcaaacaaccaattcctgcgtcttccatgccacagcaaataggcattcctaccagttctttaactcaagttgttcattctgcgggaaggcggtttatagtgagtcctgtgccagaaagccgattacgagaatcaaaagttttccccagtgaaataacagatacagttgctgcctctacagctcagagccctggaatgaacttgtctcactctgcatcatcccttagtctacaacaggccttttctgaacttagacgtgcccaaatgacagaaggacccaacacagcacctccaaactttagtcatacaggaccaacatttccagtagtacctcctttcttaagtagcattgctggagtcccaaccacagcagcagccacagcaccagtccctgcaacaagcagccctcctaatgacatttccacatcagtaattcagtctgaggttacagtgcccactgaagaggggattgctggagttgccaccagcacaggtgtggtaacttcaggtggtctccccataccacctgtgtctgaatcaccagtactttccagcgtagtttcaagtatcacaatacctgcagttgtctcaatatctactacatccccgtcacttcaagtccccacatccacatctgagatcgttgtttctagtacagcactgtatccttcagtaacagtttcagcaacttcagcctctgcagggggcagtactgctaccccaggtcctaagcctccagctgtagtatctcagcaggcagcaggcagcactactgtgggagccacattaacatcagtttctaccaccacttcattcccaagcacagcttcacagctgtgcattcagcttagcagcagtacttctactcctactttagctgaaaccgtggtagttagcgcacactcactagataagacatctcatagcagtacaactggattggctttctccctctctgcaccatcttcctcttcctctcctggagcaggagtgtctagttatatttctcagcctggtgggctgcatcctttggtcattccatcagtgatagcttctactcctattcttccccaagcagcaggacctacttctacacctttattaccccaagtacctagtatcccacccttggtacagcctgttgccaatgtgcctgctgtacagcagacactaattcatagtcagcctcaaccagctttgcttcccaaccagccccatactcattgtcctgaagtagattctgatacacaacccaaagctcctggaattgatgacataaagactctagaagaaaagctgcggtctctgttcagtgaacacagctcatctggagctcagcatgcctctgtctcactggagacctcactagtcatagagagcactgtcacaccaggcatcccaactactgctgttgcaccaagcaaactcctgacttctaccacaagtacttgcttaccaccaaccaatttaccactaggaacagttgctttgccagttacaccagtggtcacacctgggcaagtttctaccccagtcagcactactacatcaggagtgaaacctggaactgctccctccaagccacctctaactaaggctccggtgctgccagtgggtactgaacttccagcaggtactctacccagcgagcagctgccaccttttccaggaccttctctaacccagtcccagcaacctctagaggatcttgatgctcaattgagaagaacacttagtccagagatgatcacagtgacttctgcggttggtcctgtgtccatggcggctccaacagcaatcacagaagcaggaacacagcctcagaagggtgtttctcaagtcaaagaaggccctgtcctagcaactagttcaggagctggtgtttttaagatgggacgatttcaggtttctgttgcagcagacggtgcccagaaagagggtaaaaataagtcagaagatgcaaagtctgttcattttgaatccagcacctcagagtcctcagtgctatcaagtagtagtccagagagtaccttggtgaaaccagagccgaatggcataaccatccctggtatctcttcagatgtgccagagagtgcccacaaaactactgcctcagaggcaaagtcagacactgggcagcctaccaaggttggacgttttcaggtgacaactacagcaaacaaagtgggtcgtttctctgtatcaaaaactgaggacaagatcactgacacaaagaaagaaggaccagtggcatctcctccttttatggatttggaacaagctgttcttcctgctgtgataccaaagaaagagaagcctgaactgtcagagccttcacatctaaatgggccgtcttctgacccggaggccgcttttttaagtagggatgtggatgatggttccggtagtccacactcgccccatcagctgagctcaaagagccttcctagccagaatctaagtcaaagccttagtaattcatttaactcctcttacatgagtagcgacaatgagtcagatatcgaagatgaagacttaaagttagagctgcgacgactacgagataaacatctcaaagagattcaggacctgcagagtcgccagaagcatgaaattgaatctttgtataccaaactgggcaaggtgccccctgctgttattattcccccagctgctcccctttcagggagaagacgacgacccactaaaagcaaaggcagcaaatctagtcgaagcagttccttggggaataaaagcccccagctttcaggtaacctgtctggtcagagtgcagcttcagtcttgcacccccagcagaccctccaccctcctggcaacatcccagagtccgggcagaatcagctgttacagccccttaagccatctccctccagtgacaacctctattcagccttcaccagtgatggtgccatttcagtaccaagcctttctgctccaggtcaaggaaccagcagcacaaacactgttggggcaacagtgaacagccaagccgcccaagctcagcctcctgccatgacgtccagcaggaagggcacattcacagatgacttgcacaagttggtagacaattgggcccgagatgccatgaatctctcaggcaggagaggaagcaaagggcacatgaattacgagggccctggaatggcaaggaagttctctgcacctgggcaactgtgcatctccatgacctcgaacctgggtggctctgcccccatctctgcagcatcagctacctctctaggtcacttcaccaagtctatgtgccccccacagcagtatggctttccagctaccccatttggcgctcaatggagtgggacgggtggcccagcaccacagccacttggccagttccaacctgtgggaactgcctccttgcagaatttcaacatcagcaatttgcagaaatccatcagcaaccccccaggctccaacctgcggaccacttagacctagagacattaactgaatagatctgggggcaggagatggaatgctgagggggtgggtgggggtgggaagtagcctatatactaactactagtgctgcatttaactggttatttcttgccagaggggaatgtttttaatactgcattgagccctcagaatggagagtctcccccgctccagttattggaatgggagaggaaggaaagaacagcttttttgtcaaggggcagcttcagaccatgctttcctgtttatctatactcagtaatgaggatgagggctaggaaagtcttgttcataaggaagctggagaactcaatgtaaaatcaaacccatctgtaatttcgagtgggtggagctcttgcttttggtacatgccctgaatccctcactccctcaagaatccgaaccacaggacaaaaaccacctactgggctctctcctaccctgccctcctcccttttttttacccctctcttttttattttttctttgctctttagaacccagtgaaaaataccagggtactggggtgcaactctttcttatgataggtcattagtgctttaagcaaaagatattagcagctttgactgcagcattagcaattaggaaaaaaaaaaaattaagttccctgcggacatgtaactttgccatcagttttgatgtggaaacactgtgatatataaaatgttgttggacaacagtagttttaagagtaaaatatgaaacgtttaaaaagttccaaaaaaagctagctctgtcctttacttattgagacactttaactttttcctttgtatttccattgtattagataaataaatgtgaatgtaaaattgtataaattactgtacttgaatacttctgtttcccagtgttgcttgctggacattttagtgccttggacttctattgcttctgccattagcatcaacttaccagaccccagatcaataaagggcatgtggaaggaaatcgtaggtccatgtgaccccagcagtccagcagtggttatgccaaagggaaattgaaaaagtatttttttaagtcattcaacaactttgtctagagcaggtgtaagatgagtagggtgggaagttaggttggcatcagtggttaaaaacagaaagttctgtttcgggaatagtgaggagggggtgttgtaacaaaattggacaacttaaaagaatggtgtgtgctgggtgaaagacaaagactaaagaatgaggaaacaaacgtgatgcctggccagtgactgtcatataaacctttcttatttgagctaggcttgaacagacgtgacctagaagaaactgaacataaagagaagggggtggggggctagttttcaagttggggaacctgatagtgaaaagtcacagatggagaaaattgctctcagaaaaactgtttggattgctttcctcttgttgcacatgtaccatgcatttctcagcttggggtactacattttgtggaaagttaatctatctatctttccacatctgaattaatcattctaggaaagaatacttattcctactcatttcctttatgatgtccaaatggttgcaggatcataatctattgtgccacctttatttctagaagtacaactaatatgttcacattttcaaataaataatactccccgtaagtaataactgcaaccaatcagtgttattcagtgctatgcctccttgtaatgggtagttattaattattttcagagctttccggaaatactgtcctaactggctatgtttaggatctttgttatctctgaagacaaagaaagaagctaggactcttaattttggggtgcttcttgactcttagttgggaaactgaaaatatttccaaccttttacccacgtcaatggcatattctgggaatcaccaccaccaccaccactaccacagaaagaggctggaggctcctgtaccctgttcattccttaagggccctgcttcccttagtaagtaagtaagttggtctacggccctaaatatgcaaatgagagctgaaggtttttaaaaggtagaaaggaaaagggcaagggcttccacccctgctttaaaatgatttatttattctctgcttgtatttcttgtggagagagtaaggatagaaccaacaaggggctgagtagctgagaaaggggccacccaagagtgaaacatactttataccagaggagcagtggagcctcatgcagcacattatcatttgttatttgggtttaataataattttgacatcttttcactcatacacaaaaaaagtcagaactggtgttatttactgttgatttcatcctcctgtgtatgaaataacaagcctagaggaatgaactagtgctactgaactgtttaaattatttttgtgttaatagtacactttgagtatctttttccacattaaaaactttctgaattataaatgttttccttacattatttaacaatgtacactgttaaaaataaaaataaaaattcaaactttgggggtttctcagcagccgttaattgtacattttgcactaactctgggtgttgcgcttcttgtaagattgcgctttgtgcttcagtttgttacctttgtagacttatttaatgaaaccattcaaataaaccaaacttgcttttgttga

SEQ ID NO: 200805 - DNA, 8643 bp, Artificial Sequence
  derived and/or modified sequence
atgtctggcggcgccgcagagaagcagagcagcactcccggttccctgttcctctcgccgccggctcctgcccccaagaatggctccagctccgattcctccgtgggggagaaactgggagccgcggccgccgacgctgtgaccggcaggaccgaggagtacaggcgccgccgccacactatggacaaggacagccgtggggcggccgcgaccactaccaccactgagcaccgcttcttccgccggagcgtcatctgtgactccaatgccactgcactggagcttcccggccttcctctttccctgccccagcccagcatccccgcggctgtcccgcagagtgctccaccggagccccaccgggaagagaccgtgaccgccaccgccacttcccaggtagcccagcagcctccagccgctgccgcccctggggaacaggccgtcgcgggccctgccccctcgactgtccccagcagtaccagcaaagaccgcccagtgtcccagcctagccttgtggggagcaaagaggagccgccgccggcgagaagtggcagcggcggcggcagcgccaaggagccacaggaggaacggagccagcagcaggatgatatcgaagagctggagaccaaggccgtgggaatgtctaacgatggccgctttctcaagtttgacatcgaaatcggcagaggctcctttaagacggtctacaaaggtctggacactgaaaccaccgtggaagtcgcctggtgtgaactgcaggatcgaaaattaacaaagtctgagaggcagagatttaaagaagaagctgaaatgttaaaaggtcttcagcatcccaatattgttagattttatgattcctgggaatccacagtaaaaggaaagaagtgcattgttttggtgactgaacttatgacgtctggaacacttaaaacgtatctgaaaaggtttaaagtgatgaagatcaaagttctaagaagctggtgccgtcagatccttaaaggtcttcagtttcttcatactcgaactccacctatcattcaccgcgatcttaaatgtgacaacatctttatcaccggccctactggctcagtcaagattggagacctcggtctggcaaccctgaagcgggcttcttttgccaagagtgtgataggtaccccagagttcatggcccctgagatgtatgaggagaaatatgatgaatccgttgacgtttatgcttttgggatgtgcatgcttgagatggctacatctgaatatccttactcggagtgccaaaatgctgcacagatctaccgtcgcgtgaccagtggggtgaagccagccagttttgacaaagtagcaattcctgaagtgaaggaaattattgaaggatgcatacgacaaaacaaagatgaaagatattccatcaaagaccttttgaaccatgccttcttccaagaggaaacaggagtacgggtagaattagcagaagaagatgatggagaaaaaatagccataaaattatggctacgtattgaagatattaagaaattaaagggaaaatacaaagataatgaagctattgagttttcttttgatttagagagagatgtcccagaagatgttgcacaagaaatggtagagtctgggtatgtctgtgaaggtgatcacaagaccatggctaaagctatcaaagacagagtatcattaattaagaggaaacgagagcagcggcagttggtacgggaggagcaagaaaaaaaaaagcaggaagagagcagtctcaaacagcaggtagaacaatccagtgcttcccagacaggaatcaagcagctcccttctgctagcaccggcatacctactgcttctaccacttcagcttcagtttctacacaagtagaacctgaagaacctgaggcagatcaacatcaacaactacagtaccagcaacccagtatatctgtgttatctgatgggacggttgacagtggtcagggatcctctgtcttcacagaatctcgagtgagcagccaacagacagtttcatatggttcccaacatgaacaggcacattctacaggcacagtcccagggcatataccttctactgtccaagcacagtctcagccccatggggtatatccaccctcaagtgtgcctcgtcgtggccgtagcatgtcggtttgtgttcccatctttctgctgttgcctctgtgtcccgcatctctcccagtgctcttccaccccaccgccagtactgtctgcacctctttctccttccctcctccggactgccccgaggaaacttttgccgaaaagctttctaaagcattggagagtgtcctgcctatgcactctgcctctcagcgcaagcaccgacgctccagcctgccttccctctttgtcagtactcctcagtccatggcgcatccgtgtggggggaccccaacatacccagaatcacagatatttttcccaactattcatgaacgtccagtttctttttcaccacctcccacctgcccaccgaaagtagccatttcccagcggcgtaagagcacctccttcctggaagcccaaactcaccacttccaacccctgctgaggactgttggccaaagtcttcttccacctggtggcagcccaactaactggacaccagaggccgtagttatgttgggtactacagccagtagagtaactggagagtcatgtgagatacaggtccatcctatgtttgaaccatctcaagtttacagtgactatagacctggactagtacttccagaagaagctcactattttattcctcaggaagcagtgtatgtagctggggtacattaccaggcccgggtggcagaacagtatgagggcattccatacaactcatcagtactgtcaagtcctatgaaacagatacctgaacagaagccagtacaagggggccctacttcaagttctgtctttgaatttccatctggacaggctttcctggtaggacaccttcagaatctaagattagattctggattgggtccgggatctcccctctctagtatttctgcacctatcagtacagatgctacacgtttgaaatttcaccctgtctttgttcctcattctgcgcctgctgtgttaactcataacaatgagagcagaagcaactgtgtatttgaatttcatgttcacacaccaagctcctcttcaggagaaggaggtggaattttacctcagcgtgtttaccgaaatcggcaggttgcagtggacttgaatcaagaagaactgcctcctcaatcagttggattacatggctacttgcagcctgtgactgaagaaaagcataattaccatgccccagaattgaccgtttctgtggtagagcctatcggacagaactggccaataggaagcccagaatattccagtgattcctcacaaatcacttcttcagaccccagtgattttcagtcacctccccctacagggggagcagctgcaccttttggctctgacgtctcaatgccctttatccatctgcctcagacagtgttacaagaatccccacttttcttctgtttcccccaaggaaccacatctcagcaggtcttaactgcctcattttcttcaggaggatctgcacttcatccacaggcacaggggcagagccagggtcagccatcctcaagtagcttaacaggggtttcatcttcccaacccatacaacatcctcagcagcagcagggaatacagcagacagcccctcctcaacagacagtgcagtattcactttcacagacatcaacctccagtgaggccactactgcacagccagtgagtcagcctcaagctccacaagtcttgcctcaagtatcagctggaaaacagcttccagtttcccagccagtaccaactatccaaggcgaacctcagatcccagttgcgacacaaccctcggttgttccagtccactctggtgctcatttccttccagtgggacagccgctccctactcccttgctccctcagtaccctgtctctcagattcccatatcaactcctcatgtgtctacggctcagacaggtttctcatcccttcccatcacaatggcagctggcattactcagcctctgctcacgttggcttcatctgctacaacagctgcgatcccgggggtatcaactgtggttcctagtcagcttccaacccttctgcagcctgtgactcagctgccaagtcaggttcacccacagctcctacaaccagcagttcagtccatgggaataccagctaaccttggacaagctgctgaggttccactttcctctggagatgttctgtaccagggcttcccacctcgactgccaccacagtacccaggagattcaaatattgctccctcttccaacgtggcttctgtttgcatccattctacagtcctatcccctcccatgccgacagaagtactggctacacctgggtactttcccacagtggtgcagccttatgtggaatcaaatcttttagttcctatgggtggtgtaggaggacaggttcaagtgtcccagccaggagggagtttagcacaagcccccactacatcctcccagcaagcagttttggagagtactcagggagtctctcaggttgctcctgcagagccagttgcagtagcacagacccaagctacccagccgaccactttggcttcctctgtagacagtgcacattcagatgttgcttcaggtatgagtgatggcaatgagaacgtcccatcttccagtggaaggcatgaaggaagaactacaaaacggcattaccgaaaatctgtaaggagtcgctctcgacatgaaaaaacttcacgcccaaaattaagaattttgaatgtttcaaataaaggagaccgagtagtagaatgtcaattagagactcataataggaaaatggttacattcaaatttgacctagatggtgacaaccccgaggagatagcaacaattatggtgaacaatgactttattctagcaatagagagagagtcgtttgtggatcaagtgcgagaaattattgaaaaagctgatgaaatgctcagtgaggatgtcagtgtggaaccagagggtgatcagggattggagagtctacaaggaaaggatgactatggcttttcaggttctcagaaattggaaggagagttcaaacaaccaattcctgcgtcttccatgccacagcaaataggcattcctaccagttctttaactcaagttgttcattctgcgggaaggcggtttatagtgagtcctgtgccagaaagccgattacgagaatcaaaagttttccccagtgaaataacagatacagttgctgcctctacagctcagagccctggaatgaacttgtctcactctgcatcatcccttagtctacaacaggccttttctgaacttagacgtgcccaaatgacagaaggacccaacacagcacctccaaactttagtcatacaggaccaacatttccagtagtacctcctttcttaagtagcattgctggagtcccaaccacagcagcagccacagcaccagtccctgcaacaagcagccctcctaatgacatttccacatcagtaattcagtctgaggttacagtgcccactgaagaggggattgctggagttgccaccagcacaggtgtggtaacttcaggtggtctccccataccacctgtgtctgaatcaccagtactttccagcgtagtttcaagtatcacaatacctgcagttgtctcaatatctactacatccccgtcacttcaagtccccacatccacatctgagatcgttgtttctagtacagcactgtatccttcagtaacagtttcagcaacttcagcctctgcagggggcagtactgctaccccaggtcctaagcctccagctgtagtatctcagcaggcagcaggcagcactactgtgggagccacattaacatcagtttctaccaccacttcattcccaagcacagcttcacagctgtgcattcagcttagcagcagtacttctactcctactttagctgaaaccgtggtagttagcgcacactcactagataagacatctcatagcagtacaactggattggctttctccctctctgcaccatcttcctcttcctctcctggagcaggagtgtctagttatatttctcagcctggtgggctgcatcctttggtcattccatcagtgatagcttctactcctattcttccccaagcagcaggacctacttctacacctttattaccccaagtacctagtatcccacccttggtacagcctgttgccaatgtgcctgctgtacagcagacactaattcatagtcagcctcaaccagctttgcttcccaaccagccccatactcattgtcctgaagtagattctgatacacaacccaaagctcctggaattgatgacataaagactctagaagaaaagctgcggtctctgttcagtgaacacagctcatctggagctcagcatgcctctgtctcactggagacctcactagtcatagagagcactgtcacaccaggcatcccaactactgctgttgcaccaagcaaactcctgacttctaccacaagtacttgcttaccaccaaccaatttaccactaggaacagttgctttgccagttacaccagtggtcacacctgggcaagtttctaccccagtcagcactactacatcaggagtgaaacctggaactgctccctccaagccacctctaactaaggctccggtgctgccagtgggtactgaacttccagcaggtactctacccagcgagcagctgccaccttttccaggaccttctctaacccagtcccagcaacctctagaggatcttgatgctcaattgagaagaacacttagtccagagatgatcacagtgacttctgcggttggtcctgtgtccatggcggctccaacagcaatcacagaagcaggaacacagcctcagaagggtgtttctcaagtcaaagaaggccctgtcctagcaactagttcaggagctggtgtttttaagatgggacgatttcaggtttctgttgcagcagacggtgcccagaaagagggtaaaaataagtcagaagatgcaaagtctgttcattttgaatccagcacctcagagtcctcagtgctatcaagtagtagtccagagagtaccttggtgaaaccagagccgaatggcataaccatccctggtatctcttcagatgtgccagagagtgcccacaaaactactgcctcagaggcaaagtcagacactgggcagcctaccaaggttggacgttttcaggtgacaactacagcaaacaaagtgggtcgtttctctgtatcaaaaactgaggacaagatcactgacacaaagaaagaaggaccagtggcatctcctccttttatggatttggaacaagctgttcttcctgctgtgataccaaagaaagagaagcctgaactgtcagagccttcacatctaaatgggccgtcttctgacccggaggccgcttttttaagtagggatgtggatgatggttccggtagtccacactcgccccatcagctgagctcaaagagccttcctagccagaatctaagtcaaagccttagtaattcatttaactcctcttacatgagtagcgacaatgagtcagatatcgaagatgaagacttaaagttagagctgcgacgactacgagataaacatctcaaagagattcaggacctgcagagtcgccagaagcatgaaattgaatctttgtataccaaactgggcaaggtgccccctgctgttattattcccccagctgctcccctttcagggagaagacgacgacccactaaaagcaaaggcagcaaatctagtcgaagcagttccttggggaataaaagcccccagctttcaggtaacctgtctggtcagagtgcagcttcagtcttgcacccccagcagaccctccaccctcctggcaacatcccagagtccgggcagaatcagctgttacagccccttaagccatctccctccagtgacaacctctattcagccttcaccagtgatggtgccatttcagtaccaagcctttctgctccaggtcaaggaaccagcagcacaaacactgttggggcaacagtgaacagccaagccgcccaagctcagcctcctgccatgacgtccagcaggaagggcacattcacagatgacttgcacaagttggtagacaattgggcccgagatgccatgaatctctcaggcaggagaggaagcaaagggcacatgaattacgagggccctggaatggcaaggaagttctctgcacctgggcaactgtgcatctccatgacctcgaacctgggtggctctgcccccatctctgcagcatcagctacctctctaggtcacttcaccaagtctatgtgccccccacagcagtatggctttccagctaccccatttggcgctcaatggagtgggacgggtggcccagcaccacagccacttggccagttccaacctgtgggaactgcctccttgcagaatttcaacatcagcaatttgcagaaatccatcagcaaccccccaggctccaacctgcggaccacttag

SEQ ID NO: 200806 - protein, 793 aa, Artificial Sequence
  derived and/or modified sequence
MGVWLNKDDYIRDLKRIILCFLIVYMAILVGTDQDFYSLLGVSKTASSREIRQAFKKLALKLHPDKNPNNPNAHGDFLKINRAYEVLKDEDLRKKYDKYGEKGLEDNQGGQYESWNYYRYDFGIYDDDPEIITLERREFDAAVNSGELWFVNFYSPGCSHCHDLAPTWRDFAKEVDGLLRIGAVNCGDDRMLCRMKGVNSYPSLFIFRSGMAPVKYHGDRSKESLVSFAMQHVRSTVTELWTGNFVNSIQTAFAAGIGWLITFCSKGGDCLTSQTRLRLSGMLDGLVNVGWMDCATQDNLCKSLDITTSTTAYFPPGATLNNKEKNSILFLNSLDAKEIYLEVIHNLPDFELLSANTLEDRLAHHRWLLFFHFGKNENSNDPELKKLKTLLKNDHIQVGRFDCSSAPDICSNLYVFQPSLAVFKGQGTKEYEIHHGKKILYDILAFAKESVNSHVTTLGPQNFPANDKEPWLVDFFAPWCPPCRALLPELRRASNLLYGQLKFGTLDCTVHEGLCNMYNIQAYPTTVVFNQSNIHEYEGHHSAEQILEFIEDLMNPSVVSLTPTTFNELVTQRKHNEVWMVDFYSPWCHPCQVLMPEWKRMARTLTGLINVGSIDCQQYHSFCAQENVQRYPEIRFFPPKSNKAYHYHSYNGWNRDAYSLRIWGLGFLPQVSTDLTPQTFSEKVLQGKNHWVIDFYAPWCGPCQNFAPEFELLARMIKGKVKAGKVDCQAYAQTCQKAGIRAYPTVKFYFYERAKRNFQEEQINTRDAKAIAALISEKLETLRNQGKRNKDEL

SEQ ID NO: 200807 - protein, 177 aa, Artificial Sequence [sequence omitted]

SEQ ID NO: 200808 - protein, 332 aa, Artificial Sequence
  derived and/or modified sequence
MGVWLNKDDYIRDLKRIILCFLIVYMAILVGTDQDFYSLLGVSKTASSREIRQAFKKLALKLHPDKNPNNPNAHGDFLKINRAYEVLKDEDLRKKYDKYGEKGLEDNQGGQYESWNYYRYDFGIYDDDPEIITLERREFDAAVNSGELWFVNFYSPGCSHCHDLAPTWRDFAKEVDGLLRIGAVNCGDDRMLCRMKGVNSYPSLFIFRSGMAPVKYHGDRSKESLVSFAMQHVRSTVTELWTGNFVNSIQTAFAAGIGWLITFCSKGGDCLTSQTRLRLSGMLDGLVNVGWMDCATQDNLCKSLDITTSTTAYFPPGATLNNKEKNSILLLH

SEQ ID NO: 200809 - DNA, 2382 bp, Artificial Sequence
  derived and/or modified sequence
atgggagtgtggctcaacaaggacgattacattcgggatctgaagaggattatcctctgtttcctaatcgtgtacatggcaatcctggtcggaacagaccaggatttctacagtctgttgggtgtgagcaaaaccgcatcttctagggagattaggcaggcgttcaaaaaactcgccctgaagctgcaccctgacaagaaccctaataatcctaacgcccatggggattttctgaaaattaaccgtgcctacgaggtgcttaaagacgaagacttgcggaaaaaatatgataagtacggcgagaagggcctcgaagataatcaaggcggacaatatgaatcctggaactactataggtacgattttgggatctacgacgacgaccctgaaattatcactctggagcgacgtgaatttgacgcagccgtcaactctggcgaactctggtttgtgaatttctattcgcctggctgttctcactgccacgacttggctcccacctggcgcgacttcgccaaggaagttgatgggctgctgcggattggagctgtgaactgcggggacgatcgtatgctgtgccgcatgaagggtgtgaatagttatccctcgctgttcatcttccgatctgggatggcccccgtgaagtatcacggcgatcgtagtaaagagtctctggtgagtttcgctatgcagcatgtccgaagcacggttactgagctgtggaccggcaactttgtcaacagtatccaaacagcctttgctgcgggtatcggctggctcatcacattctgcagtaaaggaggggattgcttaacttcacaaacacggctcagactaagtgggatgcttgacggactggtgaacgtggggtggatggattgcgcgacacaggacaatctgtgtaaaagccttgatattacaacttccactaccgcgtatttccctcccggggccacactcaataataaggaaaaaaactccatcctgttcctgaacagcctggacgcgaaggagatctatctcgaagtgatacacaacctcccggattttgaactgctctcagccaataccctcgaggacagacttgcacaccacagatggctgctgttcttccatttcgggaaaaatgagaatagcaatgatcccgagttaaaaaaactgaagaccctcttgaagaacgatcatatccaggtgggccgtttcgattgttcatcggcccctgacatctgctcaaatctttacgtatttcagccatcactggctgttttcaaaggacagggcacaaaggagtatgagattcaccatggaaagaaaattttgtatgacatcctggccttcgccaaagaatccgttaacagtcacgtgaccacactggggccccaaaatttccctgctaacgacaaggagccttggctggtcgacttcttcgcaccttggtgtccgccatgccgcgccctgttgcccgaactgcgtagggccagcaacttactttacggtcagctgaagtttggaactctggactgcaccgtgcacgagggcctctgtaacatgtataacatccaggcctacccaacaaccgtggtctttaaccaatcgaacatccatgagtacgaaggacaccacagcgcagagcaaatcctggagttcatcgaggacctaatgaacccaagcgtcgtgagtctgactcccacaacatttaatgaactggtgactcagagaaagcacaatgaggtatggatggtcgatttttacagcccatggtgccacccttgccaagtgctaatgcctgaatggaaaagaatggccaggacgctgaccggcctgatcaacgtgggcagcatagactgccagcaatatcattcgttttgcgctcaagaaaatgttcagagataccctgagattcgattcttccctcccaaatccaacaaggcatatcactatcattcctataacggatggaatcgagatgcctattccttgcgcatttgggggttaggatttttgcctcaagtcagcacagatctcacacctcagacatttagcgagaaagtcctgcagggcaagaatcactgggtgattgacttctatgccccttggtgtgggccctgccaaaactttgcacccgagtttgagttgctggcgcggatgatcaagggtaaagtcaaagcaggaaaggttgactgtcaggcctatgctcagacatgccaaaaagccggtatcagagcttaccccaccgtcaagttctatttttacgaaagggctaagcggaattttcaggaggaacagattaatacgcgggatgcgaaggcaatcgctgccttaatctccgaaaagctggaaacactgcggaaccagggcaagcgcaataaggatgagctgtag

SEQ ID NO: 200810 - DNA, 999 bp, Artificial Sequence
  derived and/or modified sequence
atgggtgtttggcttaacaaagatgactatataagggacttaaaacgtatcattctgtgctttttgattgtgtacatggctattctggtagggaccgatcaggacttctattcgctcttgggtgtgagcaagaccgcctcatcaagggaaatcagacaggccttcaagaaattggctctcaaactgcaccctgacaagaatcctaacaatcccaacgcccacggagacttcttgaaaatcaacagggcttatgaggtgttgaaagacgaagaccttcgaaagaaatacgacaaatacggagaaaagggcctcgaggacaaccagggtggtcagtacgagtcatggaactactaccgatacgacttcggtatctatgacgatgatcctgagattatcaccctggaacggagagaattcgatgctgcagtaaattctggcgaattgtggtttgtcaacttctactctcctggttgtagtcactgccacgacttagcccccacctggcgggacttcgccaaggaagtggacggacttcttcgcatcggtgccgtgaactgcggggatgatcggatgctctgtaggatgaagggcgtgaactcatatccttcactgtttatcttcaggtcagggatggctcctgtaaaatatcacggagacagatccaaggagagcctggtatcctttgccatgcaacatgtacgctcaacagtaactgaactgtggactggcaatttcgttaacagcatccagactgcctttgccgcgggcatagggtggctaatcacattctgttctaaagggggcgattgtctgacgtcacagactcgcctgagactctctggaatgctggatggcctggtcaatgtggggtggatggattgtgccacacaggataacctctgcaaaagtctggacatcacaaccagcaccaccgcctacttcccccccggcgcaaccctcaacaataaagagaagaactcaatcttactgttacactag

SEQ ID NO: 200811 - DNA, 2382 bp, Artificial Sequence
  derived and/or modified sequence
atgggcgtgtggctgaacaaggatgactacatccgggacctgaagaggatcatcctgtgcttcctgattgtgtacatggccatcctggtgggcacagaccaggacttctacagcctgctgggcgtgtccaagacagccagcagccgggagatccggcaggccttcaagaagctggccctgaagctgcacccagacaagaaccccaacaaccccaatgcccacggggacttcctgaagatcaacagagcctatgaggtgctgaaggatgaggacctgaggaagaagtatgacaagtatggagagaagggcctggaggacaaccagggcggccagtatgagagctggaactactaccgctatgactttggcatctatgatgatgatcctgagatcatcaccctggagcggcgggagtttgatgctgctgtgaacagcggggagctgtggtttgtgaacttctacagccctggctgcagccactgccacgacctggcccccacctggagggactttgccaaggaggtggatggcctgctgagaattggagctgtgaactgtggagatgacaggatgctgtgcaggatgaagggcgtgaacagctaccccagcctcttcatcttccgcagcggcatggcccctgtgaagtaccatggagacaggagcaaggagagcctggtgtcctttgccatgcagcacgtgcgcagcacagtgacagagctgtggacaggcaactttgtgaacagcatccagacagcctttgctgctggcatcggctggctgatcaccttctgcagcaagggcggggactgcctgaccagccagacccggctgcggctgagcggcatgctggatggcctggtgaatgtgggctggatggactgtgccacccaggacaacctgtgcaagagcctggacatcaccaccagcaccacagcctacttccccccaggggccaccctgaacaacaaggagaagaacagcatcctcttcctgaacagcctggatgccaaggagatctacctggaggtgatccacaacctgcctgactttgagctgctgagcgccaacaccctggaggaccggctggcccaccaccgctggctgctcttcttccactttgggaagaatgaaaacagcaatgaccctgagctgaagaagctgaagaccctgctgaagaatgaccacatccaggtgggccgctttgactgcagcagcgccccagacatctgcagcaacctgtatgtgttccagcccagcctggccgtgttcaagggccagggcaccaaggagtatgagatccaccacggcaagaagatcctgtatgacatcctggcctttgccaaggagagcgtgaacagccacgtgaccaccctgggcccccagaacttccctgccaatgacaaggagccctggctggtggacttctttgccccctggtgccccccctgccgggccctgctgcctgagctgcggcgggccagcaacctgctgtatggccagctgaagtttggcaccctggactgcaccgtgcatgagggcctgtgcaacatgtacaacatccaggcctaccccaccaccgtggtgttcaaccagagcaacatccatgaatatgagggccaccacagcgctgagcagatcctggagttcatcgaggacctgatgaaccccagcgtggtgtccctgacccccaccaccttcaatgagctggtgacccagaggaagcacaatgaggtgtggatggtggacttctacagcccctggtgccacccctgccaggtgctgatgcctgagtggaagaggatggcccggaccctgaccggcctcatcaacgtgggcagcattgactgccagcagtaccacagcttctgtgcccaggagaatgtgcagcgctacccagagatccgcttcttcccccccaagagcaacaaggcctaccactaccacagctacaacggctggaacagagatgcctacagcctgcgcatctggggcctgggcttcctgccccaggtgtccacagacctgaccccccagaccttcagcgagaaggtgctgcagggcaagaaccactgggtgattgacttctacgccccctggtgtggcccctgccagaactttgcccctgagtttgagctgctggccaggatgatcaagggcaaggtgaaggccggcaaggtggactgccaggcctatgcccagacctgccagaaggccggcatccgggcctaccccaccgtgaagttctacttctatgagcgggccaagaggaacttccaggaggagcagatcaacaccagagatgccaaggccatcgccgccctgatcagcgagaagctggagaccctgaggaaccagggcaagaggaacaaggatgagctgtag

SEQ ID NO: 200812 - DNA, 999 bp, Artificial Sequence
  derived and/or modified sequence
atgggcgtgtggctgaacaaggatgactacatccgggacctgaagaggatcatcctgtgcttcctgattgtgtacatggccatcctggtgggcacagaccaggacttctacagcctgctgggcgtgtccaagacagccagcagccgggagatccggcaggccttcaagaagctggccctgaagctgcacccagacaagaaccccaacaaccccaatgcccacggggacttcctgaagatcaacagagcctatgaggtgctgaaggatgaggacctgaggaagaagtatgacaagtatggagagaagggcctggaggacaaccagggcggccagtatgagagctggaactactaccgctatgactttggcatctatgatgatgatcctgagatcatcaccctggagcggcgggagtttgatgctgctgtgaacagcggggagctgtggtttgtgaacttctacagccctggctgcagccactgccacgacctggcccccacctggagggactttgccaaggaggtggatggcctgctgagaattggagctgtgaactgtggagatgacaggatgctgtgcaggatgaagggcgtgaacagctaccccagcctcttcatcttccgcagcggcatggcccctgtgaagtaccatggagacaggagcaaggagagcctggtgtcctttgccatgcagcacgtgcgcagcacagtgacagagctgtggacaggcaactttgtgaacagcatccagacagcctttgctgctggcatcggctggctgatcaccttctgcagcaagggcggggactgcctgaccagccagacccggctgcggctgagcggcatgctggatggcctggtgaatgtgggctggatggactgtgccacccaggacaacctgtgcaagagcctggacatcaccaccagcaccacagcctacttccccccaggggccaccctgaacaacaaggagaagaacagcatcctgctgctgcactag

SEQ ID NO: 200813 - DNA, 2382 bp, Artificial Sequence
  derived and/or modified sequence
atgggcgtgtggctgaacaaggacgactacatccgggacctgaagaggatcattctttgctttttgatcgtttacatggccatactggtgggaacggaccaggatttctactcactgctcggcgtgtccaagacagccagctcccgggaaattcggcaagcatttaaaaagctcgccctcaaactacatcctgataaaaatcccaataacccaaatgcccacggagacttcctgaagatcaacagggcatatgaagtgcttaaggacgaggacctgcgcaagaaatacgataagtacggcgagaaagggcttgaggataatcaagggggacaatacgaatcctggaattattaccgctacgacttcggaatctacgatgacgacccggagatcatcacattggaacgtcgtgaattcgacgctgcagttaactctggcgaactctggtttgtaaacttttactctccaggatgttcacactgtcacgacctggcccccacctggcgagacttcgcaaaggaggtggacggcctgctgcgcatcggagctgtgaattgtggggacgaccgcatgctctgccggatgaaaggagtgaactcctatccttctctctttatctttcgaagcggcatggccccggtgaagtaccatggtgaccggagtaaggaatcccttgtgagctttgccatgcagcacgtgaggagcaccgtcacagaactgtggacaggaaatttcgtgaacagtattcaaaccgcattcgccgctggcataggatggttaataacgttttgtagtaaaggaggggattgtttaaccagtcagacccgtttgagattgtcaggcatgctggacggcctcgtgaatgttggatggatggattgcgctacacaggacaatctgtgtaaaagcctggacataactacgtcgacgaccgcttatttcccccctggcgcaaccttaaacaataaagagaagaactccatcctgtttcttaattctctcgatgccaaagaaatctacctcgaagtcatccacaacctgccggattttgagttgctgagcgcgaacaccttagaagacaggctggctcatcatcgttggctactgttttttcactttgggaaaaacgagaatagtaatgatcccgaactgaagaagctgaaaactctgcttaagaatgatcatatccaggtcgggagattcgattgttcctccgctcccgacatctgctcaaacttatatgtgtttcagccttcactagcagtctttaaaggccagggaaccaaggaatacgaaatccatcacgggaaaaagattctatacgacattcttgcattcgccaaggaatccgtcaactcccatgtcaccacgctcggaccgcagaatttccctgctaatgacaaagaaccttggttggtcgatttctttgccccatggtgccccccttgcagggctctgttgccggaacttcggcgggcctccaatttgctatatggtcaattgaagttcggtaccttagattgcaccgtgcatgaggggttgtgcaatatgtataacatccaggcctaccctacaactgtagtgtttaatcaaagcaacattcatgaatacgaaggtcaccatagtgcagagcagattcttgagttcatcgaggatctgatgaaccccagcgttgtatcgctcacacctacaacatttaacgagttagtgacccagcgtaagcataacgaggtctggatggtggacttttactccccatggtgtcacccctgtcaggtccttatgcccgagtggaaacggatggcgcgaactttgaccggactgatcaatgtagggtcaatcgattgccagcagtaccatagtttttgtgcccaggaaaacgttcagcgttatccggaaatccggtttttccccccgaaatctaacaaggcgtatcattaccattcttataacggttggaatcgcgacgcctattctctgcggatctgggggctgggatttctgccccaggtgtcaaccgatctgacgcctcagacgttctccgagaaagtgctccagggcaaaaaccattgggtcatcgatttctatgcaccttggtgcggtccttgtcagaactttgcacccgagtttgagctgctggctcgcatgatcaaggggaaggtgaaagctggcaaggtggactgtcaggcatacgctcagacatgtcaaaaggccggcatcagagcatacccgaccgtgaaattttacttctatgagcgtgcaaaaaggaactttcaagaggagcaaatcaatactagggacgcaaaggctattgcagccctgatttccgaaaaactggagaccctccggaatcaaggcaagaggaataaggatgagttgtag

SEQ ID NO: 200814 - DNA, 999 bp, Artificial Sequence
  derived and/or modified sequence
atgggcgtgtggctgaacaaggacgactacatccgggacctgaagcgcatcatcctgtgcttcctgatcgtttatatggcaatcttggtgggcactgaccaggatttttactccctgctcggcgtaagcaagacagctagttctcgtgaaatccgccaggcttttaaaaagctggccctgaagctgcaccctgataaaaatcccaacaaccccaacgcccacggcgattttttgaagatcaatagggcatacgaagtccttaaagatgaggacctccgaaaaaagtacgacaagtatggggagaaaggactagaagataaccaaggaggtcaatacgagtcctggaactattatcggtacgacttcggcatctatgacgatgatcccgaaatcatcaccctggagcgccgggagttcgatgcggccgtgaattcaggggagctgtggttcgtcaatttctactcacctggctgttcacattgccacgacctggcgcccacctggcgagacttcgccaaggaagtagatggcttgctgaggatcggcgccgtaaattgtggggatgatcggatgctgtgtagaatgaagggagttaactcatatccttctctgtttatctttagaagcggaatggctcctgtgaagtaccacggtgatagatctaaggaatccctcgtctccttcgcaatgcagcatgtgcgctcaactgttacagagctgtggacaggcaatttcgtgaattctatccagaccgcatttgccgcaggcattggttggctgataaccttttgctccaaaggaggggattgtctcacctcacagacgcgcctacgactcagcggaatgcttgacgggcttgtgaatgtgggctggatggactgcgctacacaagataatttgtgtaagagtctcgatatcacaacttcaacaactgcgtactttccacctggtgccaccctcaataataaagagaaaaacagtattctactactacattag

SEQ ID NO: 200815 - DNA, 2382 bp, Artificial Sequence
  derived and/or modified sequence
atgggggtgtggctgaataaagatgattacataagagaccttaagcggatcatcttatgttttctgattgtgtatatggccatcttggtcgggaccgatcaggatttttattcactgctgggcgtcagtaagacagcatctagccgcgaaatccgacaggcattcaaaaagctcgctttgaagctgcatcctgataagaatcctaataatccaaacgctcacggcgattttctcaagattaatagggcatatgaagttttgaaggacgaagatctaaggaagaagtacgacaaatacggcgaaaagggtctcgaagataaccagggcggtcagtatgaatcttggaattactaccggtatgactttgggatatacgacgatgacccagaaatcattactctggagagacgggagtttgacgccgcagtcaactcaggagagttgtggtttgtgaacttttattcacctggatgttctcactgccatgatctcgccccaacatggcgggactttgctaaagaggtagacggactgctccgcattggagcggtgaactgcggagacgataggatgctgtgccgtatgaaaggtgtcaacagctacccctcactgttcatctttagatccggcatggcgccagtgaaatatcacggagacaggagcaaagagtctcttgtgtcattcgccatgcagcacgtcagaagcacagtcaccgaactgtggacaggcaatttcgttaattctatccaaacagcttttgctgcaggcatcggatggttgattacattttgtagtaagggcggtgactgtcttacctctcagaccagactgcgactgtctgggatgctcgacggtcttgtgaatgtggggtggatggattgtgccacacaagacaacctatgcaaaagcttagatattaccactagtacaacggcctactttcctccaggagcgacactgaacaataaggagaaaaacagcatacttttccttaacagcctggatgctaaggagatctacttggaagtcatccacaacctgcctgacttcgagctgctgagcgctaatacgcttgaggatcggcttgcccaccatcgctggcttctgttttttcattttggcaagaacgaaaactccaatgacccagagctgaaaaagctgaaaacgctgctcaagaacgaccacatccaagttggcaggttcgattgctctagcgctcccgatatatgttccaatctgtacgtgttccagccctctctggccgtgtttaagggccagggcacaaaggagtatgagatccatcacgggaaaaagatcttgtacgacatactggcatttgcaaaggagtccgtcaactcccacgtgaccacactggggccacaaaatttccccgcaaacgacaaagaaccttggctagtggatttctttgcaccctggtgtcccccatgcagagctctactgccggaacttcggcgtgccagtaacctgctttatggacagctgaagtttggcactttggattgtactgtgcatgaagggctatgcaatatgtataatattcaagcttatccaacaactgtggtattcaaccagtccaacatccacgagtatgagggccaccactccgctgagcagatcctggagttcattgaggatctcatgaacccctctgtggtctccctcacccccacaaccttcaacgaactggtcacccaaagaaaacacaacgaagtgtggatggtggatttttactctccgtggtgccacccctgccaagtgctgatgccggagtggaagagaatggcacggaccctgaccggcctgattaacgtgggctccattgattgccagcaatatcactctttctgcgcccaggagaacgtgcagcggtatcccgagatacgattttttccccctaagtccaacaaggcctaccactatcattcctataatggctggaatcgggatgcttattccctcagaatatgggggctaggtttcctgccacaggtatctactgacctcactcctcagactttctcagagaaggtgttgcaggggaaaaatcattgggttattgacttttacgcaccttggtgcgggccttgtcagaatttcgcgccagagttcgaattgctcgcacggatgatcaagggaaaggtaaaagctggtaaggtcgattgccaggcatacgctcagacttgccagaaggccggaataagggcatacccaacagtgaagttctacttttacgaacgggcaaagagaaatttccaggaggagcagatcaatacacgcgatgccaaagctatcgctgcactgataagtgagaagctggagacactcaggaatcaggggaaaaggaacaaggacgagctctag

SEQ ID NO: 200816 - DNA, 999 bp, Artificial Sequence
  derived and/or modified sequence
atgggtgtgtggttgaacaaggatgactacatccgcgaccttaaacggatcattctctgttttctaatcgtctacatggccattcttgtaggcactgatcaagatttctactctttactcggagtgtccaagactgccagctccagggagatccgccaggcttttaagaagctcgctctgaagctccaccccgacaaaaaccccaataaccccaacgctcacggtgactttctgaagataaatcgggcatacgaagtattgaaggatgaagacctgagaaagaagtatgacaagtatggggaaaagggcctggaggacaatcaggggggacagtacgagtcctggaactactaccgctatgactttgggatttatgatgacgacccagagatcatcaccttagaaagaagggagtttgatgctgcagtcaactcaggagaactttggtttgtaaatttttacagccctgggtgttcacattgccacgacctggccccaacatggagggactttgcgaaggaggtggatgggctcctgcggattggggctgtcaactgtggagatgatagaatgctttgtagaatgaagggtgtcaattcctacccctcacttttcatcttcaggagcggaatggcccctgtgaagtaccacggggatagatccaaagaaagcctggttagcttcgcaatgcagcacgtgcggtctactgtaaccgagctgtggactgggaatttcgtcaactccatccagaccgcatttgccgcagggattggatggctcatcaccttttgttcaaaggggggagattgcctgacctcccagactagacttagactttctggaatgctggatgggttggtgaacgtaggatggatggactgtgcaacccaagataatctgtgtaagtcactcgatatcacaacgagcaccaccgcctacttccccccaggggctacgttaaataataaggaaaagaactccattctgctcctacattag

SEQ ID NO: 200817 - DNA, 2382 bp, Artificial Sequence
  derived and/or modified sequence
atgggcgtgtggctgaacaaggacgactacatcagagacctgaagagaatcatcctgtgcttcctgatcgtgtacatggccatcctggtgggcaccgaccaggacttctacagcctgctgggcgtgagcaagaccgccagcagcagagagatcagacaggccttcaagaagctggccctgaagctgcaccccgacaagaaccccaacaaccccaacgcccacggcgacttcctgaagatcaacagagcctacgaggtgctgaaggacgaggacctgagaaagaagtacgacaagtacggcgagaagggcctggaggacaaccagggcggccagtacgagagctggaactactacagatacgacttcggcatctacgacgacgaccccgagatcatcaccctggagagaagagagttcgacgccgccgtgaacagcggcgagctgtggttcgtgaacttctacagccccggctgcagccactgccacgacctggcccccacctggagagacttcgccaaggaggtggacggcctgctgagaatcggcgccgtgaactgcggcgacgacagaatgctgtgcagaatgaagggcgtgaacagctaccccagcctgttcatcttcagaagcggcatggcccccgtgaagtaccacggcgacagaagcaaggagagcctggtgagcttcgccatgcagcacgtgagaagcaccgtgaccgagctgtggaccggcaacttcgtgaacagcatccagaccgccttcgccgccggcatcggctggctgatcaccttctgcagcaagggcggcgactgcctgaccagccagaccagactgagactgagcggcatgctggacggcctggtgaacgtgggctggatggactgcgccacccaggacaacctgtgcaagagcctggacatcaccaccagcaccaccgcctacttcccccccggcgccaccctgaacaacaaggagaagaacagcatcctgttcctgaacagcctggacgccaaggagatctacctggaggtgatccacaacctgcccgacttcgagctgctgagcgccaacaccctggaggacagactggcccaccacagatggctgctgttcttccacttcggcaagaacgagaacagcaacgaccccgagctgaagaagctgaagaccctgctgaagaacgaccacatccaggtgggcagattcgactgcagcagcgcccccgacatctgcagcaacctgtacgtgttccagcccagcctggccgtgttcaagggccagggcaccaaggagtacgagatccaccacggcaagaagatcctgtacgacatcctggccttcgccaaggagagcgtgaacagccacgtgaccaccctgggcccccagaacttccccgccaacgacaaggagccctggctggtggacttcttcgccccctggtgccccccctgcagagccctgctgcccgagctgagaagagccagcaacctgctgtacggccagctgaagttcggcaccctggactgcaccgtgcacgagggcctgtgcaacatgtacaacatccaggcctaccccaccaccgtggtgttcaaccagagcaacatccacgagtacgagggccaccacagcgccgagcagatcctggagttcatcgaggacctgatgaaccccagcgtggtgagcctgacccccaccaccttcaacgagctggtgacccagagaaagcacaacgaggtgtggatggtggacttctacagcccctggtgccacccctgccaggtgctgatgcccgagtggaagagaatggccagaaccctgaccggcctgatcaacgtgggcagcatcgactgccagcagtaccacagcttctgcgcccaggagaacgtgcagagataccccgagatcagattcttcccccccaagagcaacaaggcctaccactaccacagctacaacggctggaacagagacgcctacagcctgagaatctggggcctgggcttcctgccccaggtgagcaccgacctgaccccccagaccttcagcgagaaggtgctgcagggcaagaaccactgggtgatcgacttctacgccccctggtgcggcccctgccagaacttcgcccccgagttcgagctgctggccagaatgatcaagggcaaggtgaaggccggcaaggtggactgccaggcctacgcccagacctgccagaaggccggcatcagagcctaccccaccgtgaagttctacttctacgagagagccaagagaaacttccaggaggagcagatcaacaccagagacgccaaggccatcgccgccctgatcagcgagaagctggagaccctgagaaaccagggcaagagaaacaaggacgagctgtag

SEQ ID NO: 200818 - DNA, 999 bp, Artificial Sequence
  derived and/or modified sequence
atgggcgtgtggctgaacaaggacgactacatcagagacctgaagagaatcatcctgtgcttcctgatcgtgtacatggccatcctggtgggcaccgaccaggacttctacagcctgctgggcgtgagcaagaccgccagcagcagagagatcagacaggccttcaagaagctggccctgaagctgcaccccgacaagaaccccaacaaccccaacgcccacggcgacttcctgaagatcaacagagcctacgaggtgctgaaggacgaggacctgagaaagaagtacgacaagtacggcgagaagggcctggaggacaaccagggcggccagtacgagagctggaactactacagatacgacttcggcatctacgacgacgaccccgagatcatcaccctggagagaagagagttcgacgccgccgtgaacagcggcgagctgtggttcgtgaacttctacagccccggctgcagccactgccacgacctggcccccacctggagagacttcgccaaggaggtggacggcctgctgagaatcggcgccgtgaactgcggcgacgacagaatgctgtgcagaatgaagggcgtgaacagctaccccagcctgttcatcttcagaagcggcatggcccccgtgaagtaccacggcgacagaagcaaggagagcctggtgagcttcgccatgcagcacgtgagaagcaccgtgaccgagctgtggaccggcaacttcgtgaacagcatccagaccgccttcgccgccggcatcggctggctgatcaccttctgcagcaagggcggcgactgcctgaccagccagaccagactgagactgagcggcatgctggacggcctggtgaacgtgggctggatggactgcgccacccaggacaacctgtgcaagagcctggacatcaccaccagcaccaccgcctacttcccccccggcgccaccctgaacaacaaggagaagaacagcatcctgctgctgcactag

SEQ ID NO: 200819 - DNA, 5272 bp, Artificial Sequence
  derived and/or modified sequence
agaccggcgcgtgaggaacctaccggtaccggccgcgcgctggtagtcgccggtgtggctgcacctcaccaatcccgtgcgccgcggctgggccgtcggagagtgcgtgtgcttctctcctgcacgcggtgcttgggctcggccaggcggggtccgccgccagggtttgaggatgggggagtagctacaggaagcgaccccgcgatggcaaggtatatttttgtggaatgaaaaggaagtattagaaatgagctgaagaccattcacagattaatatttttggggacagatttgtgatgcttgattcacccttgaagtaatgtagacagaagttctcaaatttgcatattacatcaactggaaccagcagtgaatcttaatgttcacttaaatcagaacttgcataagaaagagaatgggagtctggttaaataaagatgactatatcagagacttgaaaaggatcattctctgttttctgatagtgtatatggccattttagtgggcacagatcaggatttttacagtttacttggagtgtccaaaactgcaagcagtagagaaataagacaagctttcaagaaattggcattgaagttacatcctgataaaaacccgaataacccaaatgcacatggcgattttttaaaaataaatagagcatatgaagtactcaaagatgaagatctacggaaaaagtatgacaaatatggagaaaagggacttgaggataatcaaggtggccagtatgaaagctggaactattatcgttatgattttggtatttatgatgatgatcctgaaatcataacattggaaagaagagaatttgatgctgctgttaattctggagaactgtggtttgtaaatttttactccccaggctgttcacactgccatgatttagctcccacatggagagactttgctaaagaagtggatgggttacttcgaattggagctgttaactgtggtgatgatagaatgctttgccgaatgaaaggagtcaacagctatcccagcctcttcatttttcggtctggaatggccccagtgaaatatcatggagacagatcaaaggagagtttagtgagttttgcaatgcagcatgttagaagtacagtgacagaactttggacaggaaattttgtcaactccatacaaactgcttttgctgctggtattggctggctgatcactttttgttcaaaaggaggagattgtttgacttcacagacacgactcaggcttagtggcatgttggatggtcttgttaatgtaggatggatggactgtgccacccaggataacctttgtaaaagcttagatattacaacaagtactactgcttattttcctcctggagccactttaaataacaaagagaaaaacagtattttgtttctcaactcattggatgctaaagaaatatatttggaagtaatacataatcttccagattttgaactactttcggcaaacacactagaggatcgtttggctcatcatcggtggctgttattttttcattttggaaaaaatgaaaattcaaatgatcctgagctgaaaaaactaaaaactctacttaaaaatgatcatattcaagttggcaggtttgactgttcctctgcaccagacatctgtagtaatctgtatgtttttcagccgtctctagcagtatttaaaggacaaggaaccaaagaatatgaaattcatcatggaaagaagattctatatgatatacttgcctttgccaaagaaagtgtgaattctcatgttaccacgcttggacctcaaaattttcctgccaatgacaaagaaccatggcttgttgatttctttgccccctggtgtccaccatgtcgagctttactaccagagttacgaagagcatcaaatcttctttatggtcagcttaagtttggtacactagattgtacagttcatgagggactctgtaacatgtataacattcaggcttatccaacaacagtggtattcaaccagtccaacattcatgagtatgaaggacatcactctgctgaacaaatcttggagttcatagaggatcttatgaatccttcagtggtctcccttacacccaccaccttcaacgaactagttacacaaagaaaacacaacgaagtctggatggttgatttctattctccgtggtgtcatccttgccaagtcttaatgccagaatggaaaagaatggcccggacattaactggactgatcaacgtgggcagtatagattgccaacagtatcattctttttgtgcccaggaaaacgttcaaagataccctgagataagattttttcccccaaaatcaaataaagcttatcattatcacagttacaatggttggaatagggatgcttattccctgagaatctggggtctaggatttttacctcaagtatccacagatctaacacctcagactttcagtgaaaaagttctacaagggaaaaatcattgggtgattgatttctatgctccttggtgtggaccttgccagaattttgctccagaatttgagctcttggctaggatgattaaaggaaaagtgaaagctggaaaagtagactgtcaggcttatgctcagacatgccagaaagctgggatcagggcctatccaactgttaaattttatttctacgaaagagcaaagagaaattttcaagaagagcagataaataccagagatgcaaaagcaatcgctgccttaataagtgaaaaattggaaactctccgaaatcaaggcaagaggaataaggatgaactttgataatgttgaagatgaagaaaaagtttaaaagaaattctgacagatgacatcagaagacacctatttagaatgttacatttatgatgggaatgaatgaacattatcttagacttgcagttgtactgccagaattatctacagcactggtgtaaaagaagggtctgcaaactttttctgtaaagggccggtttataaatattttagactttgcaggctataatatatggttcacacatgagaacaagaatagagtcatcatgtattctttgttatttgcttttaacaacctttaaaaaatattaaaacgattcttagctcagagccatacaaaagtaggctggattcagtccatggaccatagattgctgtccccctcgacggacttataatgtttcaggtggctggcttgaacatgagtctgctgtgctatctacataaatgtctaagttgtataaagtccactttcccttcacgttttttggctgacctgaaaagaggtaacttagtttttggtcacttgttctcctaaaaatgctatccctaaccatatatttatatttcgttttaaaaacacccatgatgtggcacagtaaacaaaccctgttatgctgtattattatgaggagattcttcattgttttctttccttctcaaaggttgaaaaaatgcttttaatttttcacagccgagaaacagtgcagcagtatatgtgcacacagtaagtacacaaatttgagcaacagtaagtgcacaaattctgtagtttgccgtatcatccaggaaaacctgagggaaaaaaattatagcaattaactgggcattgtagagtatcctaaatatgttatcaagtatttagagttctatattttaaagatatatgtgttcatgtattttctgaaattgctttcatagaaattttcccactgatagttgatttttgaggcatctaatatttacatatttgccttctgaactttgttttgacctgtatcctttatttacattgggtttttctttcgtagttttggtttttcactcctgtccagtctatttattattcaaataggaaaaattactttacaggttgttttactgtagcttataatgatactgtagttattccagttactagtttactgtcagagggctgcctttttcagataaatattgacataataactgaagttatttttataagaaaatcaagtatataaatctaggaaagggatcttctagtttctgtgttgtttagactcaaagaatcacaaatttgtcagtaacatgtagttgtttagttataattcagagtgtacagaatggtaaaaattccaatcagtcaaaagaggtcaatgaattaaaaggcttgcaactttttcaaaaacctgttagaatatgctttattgtgttttgaggagttttcctttttttcttttcaatatcactttatcctgctcaccagtatttcctcataagggttattatagccataattaatgttaaaatagactttgttcttcatattctcccatctttttcgctactatatactctgtctggattctgctgtatgcctgttggcatatatggaacagtcaccacttgtcacacttaacaccagctttttgaattatgatcagtaatggcaagagcctttcattctcgaatgtttaaagcctaggagttctacaaaattggcttctttctacaagaatcccaaaatggaatgcctaaagaagtcttacttgggtaaatacttactaaaatatactggttatgtgcatatcaccacactggacactgaggagtgttcaaaaggaatctaagacatggtccccatcttccaactgtctgtaattcactgttttgtcattgagctcataaggtacttacattactacctataaatgtttcctgtacttgttagttgttgagaaacattttaggcagtaaataaaatagtaaatattatgtgtcctataatttgacctaagctgtgtgcctttggaatcagctctaagccagggccccctgggagtcatgttaagaaacacgtatcataaagtgacatacatcaaggttatcttatatagtcataacagtattattgggtctttcaaaaacagctggcagattgagcttttaatggctatattgatacagtagatagagcacctctaaggagtaccaggtataatgtgccatttctctcagcaacaccatttttgtgtgcagctgaccctctaacatggtatcaattctagctgaccaaagcacattctatcaggcagccaggcttggaaattaggtccatttaaagtatgtggcttacagtcaggtatggtggtgtgcgcctattgtcccatctacttgagaggctgaggcaggagggattgcttgggctcaggattttgaatccagcctgggcaacatagcaagaccccatctctaataaataaattatgttttgggcattaa

SEQ ID NO: 200820 - DNA, 1669 bp, Artificial Sequence
  derived and/or modified sequence
gaacttgcataagaaagagaatgggagtctggttaaataaagatgactatatcagagacttgaaaaggatcattctctgttttctgatagtgtatatggccattttagtgggcacagatcaggatttttacagtttacttggagtgtccaaaactgcaagcagtagagaaataagacaagctttcaagaaattggcattgaagttacatcctgataaaaacccgaataacccaaatgcacatggcgattttttaaaaataaatagagcatatgaagtactcaaagatgaagatctacggaaaaagtatgacaaatatggagaaaagggacttgaggataatcaaggtggccagtatgaaagctggaactattatcgttatgattttggtatttatgatgatgatcctgaaatcataacattggaaagaagagaatttgatgctgctgttaattctggagaactgtggtttgtaaatttttactccccaggctgttcacactgccatgatttagctcccacatggagagactttgctaaagaagtggatgggttacttcgaattggagctgttaactgtggtgatgatagaatgctttgccgaatgaaaggagtcaacagctatcccagcctcttcatttttcggtctggaatggccccagtgaaatatcatggagacagatcaaaggagagtttagtgagttttgcaatgcagcatgttagaagtacagtgacagaactttggacaggaaattttgtcaactccatacaaactgcttttgctgctggtattggctggctgatcactttttgttcaaaaggaggagattgtttgacttcacagacacgactcaggcttagtggcatgttggatggtcttgttaatgtaggatggatggactgtgccacccaggataacctttgtaaaagcttagatattacaacaagtactactgcttattttcctcctggagccactttaaataacaaagagaaaaacagtattttgctgcttcattgagagaatcagaccagcagagagagagagttatatgacaaaatatgctgaggataaaatattgacaaataaagaagatttgttagaagggccttttatactcgtttgtgttttaaataagagactcgggccgaaaacaagtttaagataagatctgtatcattgtattttactctaaaaactcctaagtggtttggtttttagatgaaaacctctataatgagcaaaagtccattccaattttccacttctaagttcctcttaattaatcttaattattggttggggaatgaagtgtctttgatagtctattattcttccttctagtgttataaaaattcttaagtgaatgtgtaaaacattggcattctgtaaaacatgattagcattaaaattaagctaaagataatgtggtttttcttgatgattgggaggtcactcaggatttttctgagcatttttatagaatacacatcatagttaattaaaaattccagttaatgcaacatcttataatggaatttattgtatatcactatttaagaaacagcttagttatataatatttttgataattgccaaaatacactttttttgaaaaaagacatttggaattgtttgaaaaactatttaccttctataatcattttcct

SEQ ID NO: 200821 - protein, 217 aa, Artificial Sequence
  derived and/or modified sequence
MSFRGGGRGGFNRGGGGGGFNRGGSSNHFRGGGGGGGGGNFRGGGRGGFGRGGGRGGFNKGQDQGPPERVVLLGEFLHPCEDDIVCKCTTDENKVPYFNAPVYLENKEQIGKVDEIFGQLRDFYFSVKLSENMKASSFKKLQKFYIDPYKLLPLQRFLPRPPGEKGPPRGGGRGGRGGGRGGGGRGGGRGGGFRGGRGGGGGGFRGGRGGGFRGRGH

SEQ ID NO: 200822 - DNA, 654 bp, Artificial Sequence
  derived and/or modified sequence
atgagcttcagaggcggcggcagaggcggcttcaacagaggcggcggcggcggcggcttcaacagaggcggcagcagcaaccacttcagaggcggcggcggcggcggcggcggcggcaacttcagaggcggcggcagaggcggcttcggcagaggcggcggcagaggcggcttcaacaagggccaggaccagggcccccccgagagagtggtgctgctgggcgagttcctgcacccctgcgaggacgacatcgtgtgcaagtgcaccaccgacgagaacaaggtgccctacttcaacgcccccgtgtacctggagaacaaggagcagatcggcaaggtggacgagatcttcggccagctgagagacttctacttcagcgtgaagctgagcgagaacatgaaggccagcagcttcaagaagctgcagaagttctacatcgacccctacaagctgctgcccctgcagagattcctgcccagaccccccggcgagaagggcccccccagaggcggcggcagaggcggcagaggcggcggcagaggcggcggcggcagaggcggcggcagaggcggcggcttcagaggcggcagaggcggcggcggcggcggcttcagaggcggcagaggcggcggcttcagaggcagaggccactag

SEQ ID NO: 200823 - DNA, 654 bp, Artificial Sequence
  derived and/or modified sequence
atgtcttttcgaggcggcggccgaggtggttttaaccgcgggggaggaggcggtgggttcaatcgtggcggttctagtaatcactttcgaggcgggggaggggggggcggggggggaaattttcggggtggggggagagggggcttcggccggggcggcggtagggggggatttaacaagggccaggaccaaggaccccctgaaagggtggtactgctgggcgagttcctgcacccatgtgaagacgatatcgtgtgcaagtgtacaacagatgaaaataaggtgccttattttaatgctccagtgtatctggaaaataaagaacagatcggcaaggtggacgaaattttcggacagctgcgggacttttatttttccgtgaagctgtccgaaaatatgaaggctagtagctttaaaaaattacagaagttttatatcgacccttacaaattgctcccactgcaaagattcctacctcgcccccctggagaaaaggggcccccacgcggcggtggcagaggaggtagagggggcgggagagggggaggaggccggggcggcggacgtggtggaggctttcggggcggtcggggcgggggcggaggaggctttcggggggggcgtgggggtggcttcagggggcgagggcactag

SEQ ID NO: 200824 - DNA, 654 bp, Artificial Sequence
  derived and/or modified sequence
atgagcttcagaggtggtggaaggggcggctttaatcgcggcgggggtggcggaggctttaatcggggcggctccagcaaccacttccgcggcggagggggtggtgggggcggcggcaattttaggggaggcgggaggggtggattcgggcggggcggcggccgcggaggatttaacaagggccaggatcagggccccccagagagggtcgtcttactgggagagttcctccatccctgtgaagatgatattgtgtgtaaatgcactactgatgagaacaaagtcccctactttaatgcccctgtgtatctggagaataaggagcaaattgggaaggtagatgaaatcttcggtcagttgcgggatttttacttctccgtcaagctgagtgagaatatgaaagccagttccttcaaaaagctgcagaaattttatattgacccttataagctcctgcccctgcaaaggttcttgccgcgcccccctggggagaagggccctcccaggggaggcggtagaggagggaggggaggaggaagggggggcggaggaagaggaggaggccggggcggcggattccggggggggagggggggaggtggaggggggttccggggggggcgtggcggtggatttaggggccggggacattag

SEQ ID NO: 200825 - DNA, 1224 bp, Artificial Sequence
  derived and/or modified sequence
ggcctctctgttgtaaattagtggttaaggttatctattattgccacttttccagcgctaaaggctgttttggaaccagtgttgcttgttccgcgggtgattggcttttttttttggcaaaccagttattcaagtttctggtctttaaaaaactctgtggcggtacggtaaccgaggaggttccagcgcggcggaagtaccccgcgggtgggtgtgtgcgcaaggccagggccagaggggcacgtggcgccgggaggagagagaatgtcttttcgaggcggaggtcgtggaggctttaatcgaggtggtggaggtggcggcttcaaccgaggtggcagcagcaaccacttccgaggtggaggcggcggtggaggcggcggcaatttcagaggcggcggcaggggaggatttggacgagggggtggccgcggaggctttaacaaaggccaagaccaaggacctccagaacgtgtagtcttattaggagagttcctgcatccctgtgaagatgacatagtttgtaaatgtaccacagatgaaaataaggtgccttatttcaatgctcctgtttacttagaaaacaaagaacaaattggaaaagtggatgaaatatttggacaactcagagatttttatttttcagttaagttgtcagaaaacatgaaggcttcatcctttaaaaaactacagaagttttatatagacccatataagctgctgccactgcagaggtttttacctcgacctccaggtgagaaaggacctccaagaggtggtggcaggggaggccgaggaggaggaagaggaggaggtggcagaggtggtggcagaggcggtggttttagaggtggaagaggaggtggaggtgggggcttcagaggaggaagaggtggtggtttcagagggagaggacattaagtgaaacagttgacagacatcaccagttgacttctgcattaacctgcatgatctgtttctactatggattggaaacttgtttcttgaacaagtcttgaagatcttggtcattttatgacaatggatctaaaatgtcagcatcatgcaaagtgcaacggaatagtgaattttgctctaaaagagcatgaacaagtctttctaatgttttgtacagtgcctggcactctgtgggtgctcaataaatggataggagttttcatttgaagcatatttgaatttttaaaataaagtgttttattcccttaa

SEQ ID NO: 200826 - DNA, 1008 bp, Artificial Sequence
  derived and/or modified sequence
ccgctgttatacgtcacttccacggctcagcgtcagggaggagagagaatgtcttttcgaggcggaggtcgtggaggctttaatcgaggtggtggaggtggcggcttcaaccgaggtggcagcagcaaccacttccgaggtggaggcggcggtggaggcggcggcaatttcagaggcggcggcaggggaggatttggacgagggggtggccgcggaggctttaacaaaggccaagaccaaggacctccagaacgtgtagtcttattaggagagttcctgcatccctgtgaagatgacatagtttgtaaatgtaccacagatgaaaataaggtgccttatttcaatgctcctgtttacttagaaaacaaagaacaaattggaaaagtggatgaaatatttggacaactcagagatttttatttttcagttaagttgtcagaaaacatgaaggcttcatcctttaaaaaactacagaagttttatatagacccatataagctgctgccactgcagaggtttttacctcgacctccaggtgagaaaggacctccaagaggtggtggcaggggaggccgaggaggaggaagaggaggaggtggcagaggtggtggcagaggcggtggttttagaggtggaagaggaggtggaggtgggggcttcagaggaggaagaggtggtggtttcagagggagaggacattaagtgaaacagttgacagacatcaccagttgacttctgcattaacctgcatgatctgtttctactatggattggaaacttgtttcttgaacaagtcttgaagatcttggtcattttatgacaatggatctaaaatgtcagcatcatgcaaagtgcaacggaatagtgaattttgctctaaaagagcatgaacaagtctttctaatgttttgtacagtgcctggcactctgtgggtgctcaataaatggataggagttttcatttgaagcatatttgaatttttaaaataaagtgttttattcccttaa

SEQ ID NO: 200827 - DNA, 654 bp, Artificial Sequence
  derived and/or modified sequence
atgtccttccggggcggcggccggggcggcttcaacagaggaggcggcggcggcggcttcaacagaggaggcagcagcaaccacttccggggcggcggcggcggcggcggcggcggcaacttccggggcggcggccggggcggcttcggccggggcggcggccggggcggcttcaacaagggccaggaccagggccccccagagcgggtggtgctgctgggggagttcctgcacccctgtgaagatgacatcgtgtgcaagtgcaccacagatgagaacaaggtgccctacttcaatgcccctgtgtacctggagaacaaggagcagatcggcaaggtggatgagatcttcggccagctgcgggacttctacttctctgtgaagctgtctgagaacatgaaggccagcagcttcaagaagctgcagaagttctacatcgacccctacaagctgctgcccctgcagcgcttcctgcccaggcctcctggagagaagggccccccccggggcggcggccggggcggccggggcggcggccggggcggcggcggccggggcggcggccggggcggcggcttccggggcggccggggcggcggcggcggcggcttccggggcggccggggcggcggcttccggggccggggccactag

SEQ ID NO: 200828 - DNA, 654 bp, Artificial Sequence
  derived and/or modified sequence
atgagcttccggggcggcggccggggcggcttcaaccggggcggcggtggcgggggctttaatagaggtgggagcagcaaccatttcagaggggggggtgggggcggaggtggcgggaatttccgcggtggcggccggggggggtttgggagaggtggagggcggggcggattcaacaagggccaggaccagggaccgcctgaaagggttgtactgttgggtgagtttctgcatccatgtgaagatgacattgtatgcaaatgtacaaccgacgaaaacaaagtgccgtatttcaatgctcctgtgtatctggaaaacaaggaacagatagggaaagtggatgaaatcttcggccagctgcgcgacttttacttctccgtcaaattaagtgagaacatgaaagcctccagttttaaaaagttacagaagttttatatagatccctacaagctgttgccactgcaacggttccttccacggcctcccggcgagaaaggaccacctcgcggcgggggtcgaggggggcgcggcggtgggcgcgggggtggcggcagagggggcggccggggtggcggctttcgcggcggaaggggaggcgggggcggaggctttagggggggacggggcggtggttttcgcggccggggacactag

SEQ ID NO: 200829 - DNA, 654 bp, Artificial Sequence
  derived and/or modified sequence
atgagcttccggggcggcggccggggcggcttcaaccggggcggcggcggagggggattcaatagaggggggagtagcaatcattttcgagggggtggaggcgggggcgggggggggaacttccggggaggtgggcgggggggttttggccgggggggtggcaggggtggcttcaataaggggcaggaccaaggaccacctgaaagggtggtccttctgggagaatttctgcatccatgcgaggacgacattgtttgtaagtgcaccaccgacgagaacaaagtgccatacttcaatgcgccggtctaccttgagaataaggaacaaattgggaaggtggacgagattttcggacaactgcgcgacttctatttctcggtcaagctgagcgaaaacatgaaggcatcgagcttcaagaagcttcagaagttctatatcgacccttataagctcctgcctctgcaacgatttctcccacgacctcctggggaaaaaggcccaccccggggtggtggcagagggggccgcggtgggggccgcggcggcgggggacgcgggggcgggcggggcggaggcttcagaggaggcagaggtggcggaggtggcggattcagaggaggtaggggcggcggctttagaggccgcgggcattag

SEQ ID NO: 200830 - DNA, 654 bp, Artificial Sequence
  derived and/or modified sequence
atgagctttcgtggaggaggcagagggggattcaatagaggcggaggcggtggcggtttcaacagagggggttcttcaaaccacttccggggtgggggtggagggggaggaggaggaaactttcggggaggcggacggggaggttttgggcgtggaggaggaagggggggtttcaacaaaggtcaggatcagggtcctcctgaacgcgtggtgcttttgggagagttcctccacccatgcgaggacgatatcgtgtgtaaatgtacaaccgatgaaaataaagtgccttacttcaacgccccagtgtacctggaaaacaaagaacagatcggcaaggttgatgaaatctttggacaattgagagacttctattttagcgttaagctctctgagaacatgaaggcttccagtttcaaaaagttgcagaagttttacatagatccatacaagctcctgcctctccagagattcctgccacgaccccctggggaaaagggaccaccacgcggaggaggtcgcggtggacgcggaggtggtcgaggtggaggtggacgtggcggtggccgaggtggagggtttcggggtggaagggggggtgggggaggcggatttcgaggcggaagaggagggggtttcagaggccgtggccattag

SEQ ID NO: 200831 - DNA, 654 bp, Artificial Sequence
  derived and/or modified sequence
atgtcgtttagaggaggagggagagggggtttcaaccggggagggggtggcggaggattcaacagaggaggatctagtaaccattttcgcggaggcggaggcggaggcggtggcggaaatttccgcggtgggggtaggggaggtttcggacgcggaggaggtaggggcggatttaataagggtcaggatcaggggcctcccgagcgggtggtgcttctgggcgagtttctgcacccctgcgaggacgatattgtctgtaaatgtacaacggatgagaacaaagtgccatactttaacgctcccgtctacctggagaataaagaacagatagggaaagtggacgagatcttcggccagctccgggatttttacttcagcgtgaagctgtctgagaatatgaaagcatcatccttcaagaaattgcagaaattttatattgacccttataagctgctgccacttcagcgctttctacccagaccccctggagagaaggggcctcctcgagggggaggtcgcggaggtaggggcggtgggagggggggtggcggaagaggcggaggtagaggaggaggtttcaggggtggacgaggaggaggcggaggcggattcagaggcggtcggggtggagggtttcggggtagaggacattag

SEQ ID NO: 200832 - protein, 147 aa, Artificial Sequence
  derived and/or modified sequence
MGGRHHLQRQVSESMSALFQAVRLESAWADRVRYMVVVYSSGRQDTEENILLGVDFSSKESGFSVSTAGRMHIFKPVSVQAMWSALQVLHKACEVARRHNYFPGGVALIWATYYESCISSEQSCINEWNAMQDLESTRPDSPALFVD

SEQ ID NO: 200833 - protein, 1049 aa, Artificial Sequence
  derived and/or modified sequence
MALVTLQRSPTPSAASSSASNSELEAGSEEDRKLNLSLSESFFMVKGAALFLQQGSSPQGQRSLQHPHKHAGDLPQHLQVMINLLRCEDRIKLAVRLESAWADRVRYMVVVYSSGRQDTEENILLGVDFSSKESKSCTIGMVLRLWSDTKIHLDGDGGFSVSTAGRMHIFKPVSVQAMWSALQVLHKACEVARRHNYFPGGVALIWATYYESCISSEQSCINEWNAMQDLESTRPDSPALFVDKPTEGERTERLIKAKLRSIMMSQDLENVTSKEIRNELEKQMNCNLKELKEFIDNEMLLILGQMDKPSLIFDHLYLGSEWNASNLEELQGSGVDYILNVTREIDNFFPGLFAYHNIRVYDEETTDLLAHWNEAYHFINKAKRNHSKCLVHCKMGVSRSASTVIAYAMKEFGWPLEKAYNYVKQKRSITRPNAGFMRQLSEYEGILDASKQRHNKLWRQQTDSSLQQPVDDPAGPGDFLPETPDGTPESQLPFLDDAAQPGLGPPLPCCFRRLSDPLLPSPEDETGSLVHLEDPEREALLEEAAPPAEVHRPARQPQQGSGLCEKDVKKKLEFGSPKGRSGSLLQVEETEREEGLGAGRWGQLPTQLDQNLLNSENLNNNSKRSCPNGMEDDAIFGILNKVKPSYKSCADCMYPTASGAPEASRERCEDPNAPAICTQPAFLPHITSSPVAHLASRSRVPEKPASGPTEPPPFLPPAGSRRADTSGPGAGAALEPPASLLEPSRETPKVLPKSLLLKNSHCDKNPPSTEVVIKEESSPKKDMKPAKDLRLLFSNESEKPTTNSYLMQHQESIIQLQKAGLVRKHTKELERLKSVPADPAPPSRDGPASRLEASIPEESQDPAALHELGPLVMPSQAGSDEKSEAAPASLEGGSLKSPPPFFYRLDHTSSFSKDFLKTICYTPTSSSMSSNLTRSSSSDSIHSVRGKPGLVKQRTQEIETRLRLAGLTVSSPLKRSHSLAKLGSLTFSTEDLSSEADPSTVADSQDTTLSESSFLHEPQGTPRDPAATSKPSGKPAPENLKSPSWMSKS

SEQ ID NO: 200834 - DNA, 3150 bp, Artificial Sequence
  derived and/or modified sequence
atggcgttggtgactttgcagcggtctcctactccctcggcagcatcgagctcagcatccaactctgagcttgaagccggctcagaagaggacagaaaactaaatcttagcctgagtgaaagtttcttcatggtgaagggggccgccctattcctgcagcagggaagttcgccccagggccagagaagcctgcagcatccgcacaagcacgccggtgacctgccacagcacctgcaggttatgattaacctactgcgttgcgaagaccgcatcaagctggcggtccggttagagtctgcctgggcagatagggtaagatacatggttgtcgtgtacagcagcgggcgccaggatactgaagagaatatcctgttgggggtcgacttttccagtaaggagagtaaaagttgtactatagggatggtgctccggctgtggtccgacacaaagatacacctcgacggcgatggtggcttctcagtctctacggccggccggatgcatatttttaaacctgtttctgtccaggccatgtggtccgcactgcaggtactgcataaagcttgcgaagtcgcgagacgccataattatttccctggaggtgtggcactgatctgggccacctattacgaaagttgcatttcttccgagcagtcctgtattaacgagtggaacgctatgcaggatctggagtccacacgccccgactctcccgccttgttcgtggataagccaaccgagggagagagaactgaaagactgattaaggccaaacttagatctatcatgatgtcccaggaccttgaaaacgtgactagcaaggagatcagaaacgagctggagaaacaaatgaattgcaacctgaaggagctgaaagagttcattgataatgagatgctcctaatcctcggccaaatggacaagccttcccttatcttcgaccatctctatcttgggtcagaatggaatgcctctaacctggaggaactgcagggcagtggcgtcgattatatcctcaatgttacaagagaaatagataactttttcccggggcttttcgcttatcataatatccgagtgtacgacgaggagacaaccgatctcctggctcactggaacgaggcctaccactttatcaataaagctaagaggaaccacagcaaatgcctcgtgcattgcaagatgggcgttagtcgatctgccagtaccgtgattgcgtacgcaatgaaggagtttggctggcctctcgagaaggcctacaactacgtgaagcagaagagatccatcaccagacccaacgccggcttcatgcggcagctgtccgagtacgagggcatcttggatgccagtaagcagaggcacaacaagctgtggcggcagcagacagactcttcactgcagcagcccgtcgatgatccggctggccccggcgactttttacccgagactcccgacggcactcctgaatcacaactgcccttcctggacgatgctgcacagccaggtcttggccctccgctgccatgctgcttccggagactttccgatccattgctaccatccccggaagacgaaaccggaagcctagtgcacctggaagatcctgagcgtgaggcccttctcgaagaggccgcaccccccgcagaggtccacaggcctgcacggcagccccagcagggtagtggactgtgtgagaaggacgtgaaaaagaaactcgagttcggctctcccaaagggaggagcggcagcctcctccaggttgaggagaccgagcgtgaggagggattgggtgccggcaggtggggtcaactgccaactcagcttgatcagaacctcctgaatagcgaaaatttaaataacaatagcaaacgttcatgtcccaatggcatggaagacgatgccattttcggaattcttaacaaggtgaagccctcttacaagtcttgtgccgactgtatgtatcctacggcctccggcgcacctgaagcatctcgggaaaggtgtgaagacccaaacgcgcccgcgatttgcacgcagcctgccttcctgcctcatatcacctcttccccagtggcacacctcgctagccgctcaagagtgccggagaagccagccagtggcccgacagaacctcccccattcctgcctcctgcaggatcccgccgggcggacacaagcggccctggcgccggcgccgccttggagcctccggcatcactgttagaaccctctcgggagactccaaaggttctcccaaagtctctgctgttaaaaaattcccattgcgataaaaatccaccttctacggaggtcgtgattaaagaagaaagttccccaaagaaggatatgaaacccgccaaggatctacgcctgctattctctaacgagtccgagaaacctaccactaactcctacctgatgcaacatcaggagagcataattcaactccagaaggcaggcttagttaggaagcacacaaaagaattagagaggcttaagagtgtcccagccgatccggcaccgcccagcagagatggtccagcttcaagacttgaggcctcaattccagaagagtcgcaggatccggccgcacttcatgaactagggcctctggtcatgccgtctcaggctggctctgatgaaaaatcggaagctgcccctgcctctcttgagggtggcagtcttaagagccctccacctttcttctatcgtctggaccatacgagttcctttagtaaggatttcctaaagacaatctgctatacgcccacgtcttccagtatgtcttccaatctgactcgtagcagcagctccgatagcatacacagcgtgcggggcaaaccgggcctagtcaaacaacgcacccaggaaattgaaacccgactgcgtctcgcaggcctgacagttagttcccctttgaagcggtctcattcgctggccaagttgggatccctgactttttccactgaagatttgtcttctgaggccgatcccagcaccgtggccgattctcaggacaccacattgagtgagagcagcttccttcatgaaccacagggtacccccagggatcccgcggccacatccaagccatctggtaagcccgcccctgagaacctgaagtccccgagttggatgtctaaaagctag

SEQ ID NO: 200835 - DNA, 3150 bp, Artificial Sequence
  derived and/or modified sequence
atggccctggtgaccctgcagaggagccccaccccatctgctgccagcagcagcgccagcaacagcgagctggaggccggcagcgaggaggacaggaagctgaacctgagcctgtctgagagcttcttcatggtgaagggggccgccctcttcctgcagcagggcagcagcccccagggccagaggagcctgcagcacccccacaagcatgctggggacctgccccagcacctgcaggtgatgatcaacctgctgcgctgtgaggaccgcatcaagctggccgtgcggctggagagcgcctgggccgacagagtgcgctacatggtggtggtgtacagcagcggccggcaggacacagaggagaacatcctgctgggcgtggacttcagcagcaaggagagcaagagctgcaccatcggcatggtgctgcggctgtggagcgacaccaagatccacctggatggagatggcggcttctctgtgtccacagctggccgcatgcacatcttcaagcctgtgtctgtgcaggccatgtggagcgccctgcaggtgctgcacaaggcctgtgaggtggcccggcggcacaactacttccctggaggagtggccctgatctgggccacctactatgagagctgcatcagcagcgagcagagctgcatcaatgagtggaatgccatgcaggacctggagagcaccaggccagacagccctgccctgtttgtggacaagcccacagaaggagagaggacagagcggctcatcaaggccaagctgcggagcatcatgatgagccaggacctggagaatgtgaccagcaaggagatcagaaatgagctggagaagcagatgaactgcaacctgaaggagctgaaggagttcatcgacaatgagatgctgctgatcctgggccagatggacaagcccagcctcatctttgaccacctgtacctgggcagcgagtggaatgccagcaacctggaggagctgcagggcagcggcgtggactacatcctgaatgtgacccgggagattgacaacttcttccctggcctgtttgcctaccacaacatccgggtgtatgatgaggagaccacagacctgctggcccactggaatgaggcctaccacttcatcaacaaggccaagaggaaccacagcaagtgcctggtgcactgcaagatgggcgtgagccgcagcgccagcacagtgattgcctatgccatgaaggagtttggctggcccctggagaaggcctacaactacgtgaagcagaagaggagcatcacccggcccaatgccggcttcatgaggcagctgtctgaatatgagggcatcctggatgccagcaagcagaggcacaacaagctgtggaggcagcagacagacagcagcctgcagcagcctgtggatgatcctgctggccctggggacttcctgcctgagaccccagatggcaccccagagagccagctgcccttcctggatgatgctgcccagcccggcctgggcccccccctgccctgctgcttccggcggctgagtgaccccctgctgcccagcccagaagatgagaccggcagcctggtgcacctggaggaccctgagcgggaggccctgctggaggaggccgcccccccagctgaggtgcacaggcctgcccggcagccccagcagggcagcggcctgtgtgagaaggatgtgaagaagaagctggagtttggcagccccaagggccgcagcggcagcctgctgcaggtggaggagacagagcgggaggagggcctgggcgccggccgctggggccagctgcccacccagctggaccagaacctgctgaacagcgagaacctgaacaacaacagcaagaggagctgccccaacggcatggaggatgatgccatcttcggcatcctgaacaaggtgaagcccagctacaagagctgtgccgactgcatgtaccccacagccagcggggcccctgaggccagccgggagcgctgtgaggaccccaatgccccagccatctgcacccagcctgccttcctgccccacatcaccagcagccctgtggcccacctggccagccgcagccgggtgcctgagaagccagccagcggccccacagagcccccacccttcctgcccccagctggcagcagaagagctgacaccagcggccctggggccggggccgccctggagcccccagccagcctgctggagcccagccgggagacccccaaggtgctgcccaagagcctgctgctgaagaacagccactgtgacaagaacccccccagcacagaggtggtgatcaaggaggagagcagccccaagaaggacatgaagccagccaaggacctgcggctgctcttcagcaatgaaagtgagaagcccaccaccaacagctacctgatgcagcaccaggagagcatcatccagctgcagaaggccggcctggtgaggaagcacaccaaggagctggagcggctgaagtctgtgcctgctgaccctgccccacccagcagagatggccctgccagccggctggaggccagcatccctgaggagagccaggaccctgctgccctgcacgagctgggccccctggtgatgcccagccaggccggcagtgatgagaagtctgaggccgccccagccagcctggagggcggcagcctgaagagccccccacccttcttctaccgcctggaccacaccagcagcttcagcaaggacttcctgaagaccatctgctacacccccaccagcagctccatgagcagcaacctgaccaggagcagcagcagtgacagcatccacagcgtgcggggcaagccaggcctggtgaagcagaggacccaggagattgagacccggctgcggctggccggcctgactgtgagcagccccctgaagaggagccacagcctggccaagctgggcagcctgaccttcagcacagaggacctgagcagcgaggccgaccccagcacagtggccgacagccaggacaccaccctgtctgagagcagcttcctgcacgagccccagggcaccccccgggaccctgctgccaccagcaagcccagcggcaagccagcccctgagaacctgaagagccccagctggatgagcaagagctag

SEQ ID NO: 200836 - DNA, 3150 bp, Artificial Sequence
  derived and/or modified sequence
atggccctggtgaccctgcagcggagccccacccccagcgccgccagctcttctgcctccaattcggagttggaggccggctccgaagaagataggaaactgaacttgagcctctcagagtcatttttcatggttaagggcgccgcgcttttccttcaacaggggagtagcccccagggtcagaggtctctgcaacatcctcacaagcacgccggggatttaccacagcacctccaagtcatgatcaacctgctgagatgcgaggatcggatcaaactggcggtgcggctggagtctgcctgggccgaccgagtccgttatatggtggtggtgtactcttccgggcgacaggacactgaagagaacatcctactgggagtggactttagcagcaaagaatcgaaaagttgcaccattgggatggtgctgagactgtggagtgatacaaaaatacacctggatggagatggcggcttttccgtaagcacagcaggaaggatgcatatttttaaaccagtcagcgttcaggcgatgtggagtgctcttcaagtgctgcataaagcctgcgaagtagcaaggcgtcacaactactttccgggcggagtggccctgatctgggccacctattatgaaagctgcatctcctcagagcagtcctgtattaatgagtggaacgcgatgcaggatcttgagtctacacgacccgactcacctgctttgttcgttgataagccaacagaaggcgaacgcactgaacgactgattaaggccaaactgcgcagcatcatgatgtctcaagatctagagaatgtcacctctaaagagatcaggaacgagctcgagaagcagatgaattgcaatctcaaagagctgaaagaattcatcgataatgagatgctgctcatcctggggcagatggacaagccctcactgatttttgatcacctgtacctgggaagtgaatggaacgcgtctaacctcgaggagctgcaggggagtggggtggactatattctgaatgttactagagagattgataatttctttcctggcctctttgcctaccataacatccgagtctatgacgaagaaacgaccgatttgctggcgcactggaacgaggcctatcactttatcaataaagctaaaagaaaccactctaagtgcctggttcactgtaaaatgggcgtttcccgaagcgcaagtaccgtgatcgcatacgccatgaaggagtttggctggccattggaaaaggcctataattacgtgaagcagaagcggtcaatcacaagacctaacgcaggatttatgcggcagctttctgagtatgaaggcattttggacgccagtaaacagaggcataacaaactgtggcgccagcagactgattcctcgcttcagcagcctgttgacgatcccgccggtccgggcgattttctgcccgaaactcccgacggtacgcctgagtctcagctacccttcctggacgacgcagcgcagcccgggcttgggcctcctctcccatgttgctttaggcggctgtccgatccactcctgcccagccccgaggatgaaacgggtagcttagtccacctggaagatcccgagagagaagctttgcttgaagaagccgctccacctgccgaagttcaccggccagcccgacagccacagcagggctccggcctgtgtgagaaagacgtcaagaaaaagttggagtttggcagcccgaagggacgctcaggatcattactgcaggtagaggagaccgaaagagaagagggtctgggtgctggacggtgggggcagttgccgacacaactggaccagaatttgcttaacagcgagaatttaaataacaatagtaagagatcatgtcccaacggcatggaggatgatgctatctttggcatcttaaataaggtgaaaccatcctataagagttgcgccgactgtatgtaccctaccgcaagcggcgcacccgaagcgagtagagagagatgcgaagaccccaacgcccctgccatctgtacccagcccgccttcctgccccatatcacaagctctccagtggcacatttagcatccaggtccagggtgccagagaaaccagcatcgggcccaaccgagccgcctccttttttacctcctgcaggatctcggcgcgctgatacaagcgggcccggcgccggtgctgccctggaaccccctgccagcttgctggagcccagcagagagactccgaaagtgctgcctaagtccctgctgttaaagaacagccactgcgacaagaatcccccatctaccgaagtcgttataaaagaggaatccagtcctaaaaaggacatgaaacccgcaaaggatctccgcctgctgttctcaaacgaaagcgagaagccgaccacgaactcatacctcatgcagcaccaagagtcaatcatccagcttcaaaaggcaggtttagtgcggaaacatacaaaggaacttgagcgcctcaagtcagttcccgcagacccagcgcctccctcccgagacggtcccgccagtaggttagaggcatctatccctgaggagtcccaggatcccgccgccttgcacgagctgggcccactcgttatgcccagccaagcgggctcagatgaaaagtccgaagctgcacctgccagtttggagggcggctctctgaagtctccacctccattcttttaccgtcttgaccacaccagctcattcagcaaagatttcctcaagacaatttgctatacccccactagtagcagcatgtcctccaacctgacccgcagttcatcaagtgattcaattcatagtgtgcgggggaagccaggtctcgtgaagcaaagaacccaggaaatagagactcggttacggttggcaggcctgacagtttcctctccactcaaacggagtcactccctggccaaactgggcagtttgacttttagcacggaggatctcagcagtgaagctgaccccagcacggttgctgactcacaggatactacactcagcgaatccagcttcctccacgagccacaggggactccacgggaccctgcggccacatccaagccctcgggaaagcctgcacccgaaaacttgaaatcaccatcttggatgtccaaatcctag

SEQ ID NO: 200837 - DNA, 3150 bp, Artificial Sequence
  derived and/or modified sequence
atggccttggtgacgttgcagcgttcccctacacccagcgccgcatccagcagcgcttcaaacagtgagctggaagccggatctgaggaggatcgcaagctaaacctgtcattgtcggaaagcttctttatggtgaagggggcagctctgttccttcagcaaggctcgagcccccaaggtcagagaagtctgcagcatccccacaagcacgcaggagacttaccgcagcacctgcaggtgatgattaacttgcttcgatgcgaagacagaatcaagctcgcggtgcggttagagtctgcctgggctgaccgggttagatacatggtggtagtatactcatccgggagacaggatacagaggagaatatactgctaggcgtcgacttttcctccaaggagagcaagagttgtacaatcggcatggtgcttcgactgtggtccgatacgaaaattcacctggacggggacggaggctttagtgtctctactgccggtcggatgcatatctttaagcccgtctctgtgcaggcaatgtggagtgcactccaagttctgcacaaggcatgtgaggtggccagaaggcacaattattttccaggcggagtggctcttatctgggccacttactatgaaagctgcatctcgagcgaacagtcatgcatcaatgagtggaacgccatgcaagatcttgagagcacaaggccagacagtccagccctctttgtggacaagcctaccgagggtgagcggactgagcggctcatcaaggctaagctcagaagcatcatgatgtctcaggatctggaaaacgttaccagcaaggaaatccgcaacgagctggagaagcagatgaattgcaacctgaaagagcttaaagagttcatcgacaacgagatgctgttaatactgggccagatggacaaaccaagcctcatttttgatcacctatacctcggctccgaatggaacgcatcaaacctcgaagaattgcagggaagcggagtcgactatattctcaatgtaacgcgcgagattgacaattttttccctggactctttgcgtatcacaacatccgggtttacgatgaagagacaactgacctccttgcccactggaacgaggcctaccattttattaataaagccaagcgaaaccacagtaagtgcctggtacactgcaagatgggcgtatcaaggtctgctagcaccgttatagcctacgccatgaaagaatttgggtggccccttgaaaaagcctataactacgtgaagcaaaagagaagcatcacccgtcccaacgccggattcatgaggcagttatcggagtatgagggaatcctggacgcatcaaagcagagacataacaagctgtggcgtcagcagaccgacagctccctccagcagcctgtcgatgaccccgcaggccctggcgatttccttccggagacaccagacggcacgccagagagtcagctcccctttttggatgatgccgctcagcctggactgggacctccattaccttgctgttttcggagactgtccgaccccctgctgccaagccctgaggacgagaccggctccctcgtccacctggaggaccctgagagagaggcactcctggaggaggcggctccgcctgccgaggttcaccggccagcacgacagccccagcaggggtccgggttatgtgagaaagacgtgaaaaagaaacttgagttcggctctcctaaagggaggagcggatcactcctccaggtggaagaaactgaaagggaagagggcctgggggctggtcgatggggccagttgcctactcaactggatcagaacctcctcaatagtgaaaacctcaataacaactccaaacgatcttgtccaaatggaatggaagacgatgccatctttggcatcctcaataaggtcaagcctagttataaatcctgcgccgactgtatgtaccccaccgccagtggagcaccagaagcctctagggaaaggtgcgaagaccccaatgccccagccatctgcacccagcctgcattcctgcctcacatcaccagtagcccagtcgctcatctggcctctagatcccgggtccctgagaaacctgccagcggacccactgagcctccccctttcctcccgccagccggttcccgcagagctgacacgtctggccctggagccggagccgcattagagccacccgcatcccttctggagccatccagggagacgcccaaagtgcttccgaagtcactcctcctgaagaactcacactgtgacaagaatccaccgtccacagaggtcgttatcaaagaagaatcttcaccaaaaaaagatatgaagccggcaaaagacctgcgacttcttttttctaacgaatccgagaagccaaccaccaacagctatctcatgcaacaccaggagtccattattcagctgcaaaaggcgggtctagtcagaaagcatacgaaggagctcgagagactgaagtccgttccagccgaccctgcccctccctcccgcgatggccctgcatctcgactcgaggcctcaattcccgaagaatcccaggacccagctgctctccacgagttgggcccactggtcatgcccagccaggccggatcagacgaaaagagcgaggcggctcctgctagcctagaagggggatcactcaagtctcctcctccattcttttacagacttgaccatactagctcgttctctaaggacttcctgaagaccatctgctatacacctacctcaagctccatgagtagcaacctcacacgttcatcttcgagtgactcaattcattccgttcgcggaaaaccgggactcgttaagcagaggacccaggagatcgagaccaggctgcgactagccggtctcacagtgtcctcccctctgaagagatcacactcccttgccaagcttggttctctgaccttttccacggaggatctgagcagcgaagctgacccgtccacagttgctgactcccaggatactaccctgagcgaaagcagtttcctccacgagccccagggaacacctcgagatcccgcagctacgtccaagccttcaggcaaaccggctccagaaaaccttaagtcaccctcatggatgtcaaagtcttag

SEQ ID NO: 200838 - DNA, 8538 bp, Artificial Sequence
  derived and/or modified sequence
cggctccaggaggccccgggcccggcccgggcggcggtggcggtggcggctctagctcgagacgtctgtggcgccctcgcaccgcgccgcagccatggccctggtgaccctgcagcgctcgcccacgcccagcgccgcctcctcctcggccagcaacagcgagttggaggctggcagcgaagaagatcgaaaattaaacctcagcttaagtgagagctttttcatggtgaaaggcgcagccctcttcttacaacagggaagcagccctcaaggccagcggagtcttcagcacccccacaagcatgcaggtgatctgcctcaacatcttcaggtgatgatcaaccttctgcgttgcgaagacagaatcaagctggcagtgcgcctggagagcgcctgggcggaccgggtccggtacatggtggtggtgtacagcagcgggcgccaggacaccgaggagaatatcttgctgggagtggacttttccagtaaggaaagtaaaagctgcaccattgggatggttctccgactgtggagcgacacgaaaatccaccttgatggagatggtgggttcagcgtgagcacagcaggaaggatgcacatatttaagcctgtgtctgtccaggccatgtggtctgccctgcaggtgcttcacaaggcctgcgaagtggcccggaggcacaactacttccccgggggtgtagctctcatctgggctacctactatgagagctgcatcagctccgagcagagctgcatcaacgagtggaacgccatgcaggacctggagtctacgcggcccgactcccccgcgctatttgtggacaagcccactgaaggggaaaggaccgagcgcctcatcaaagccaagctccgaagcatcatgatgagccaggatctagaaaatgtgacttccaaagagattcgtaatgaattagagaaacagatgaattgtaacttgaaggaactcaaggaatttatagacaatgagatgctacttatcttgggacagatggacaagccctcccttatcttcgatcatctttatctcggctctgaatggaatgcatccaatctggaggaactgcagggctcaggggttgattacattttaaatgttaccagagaaatcgataatttttttcctggcttatttgcatatcataacatccgagtctacgatgaagagaccacagacctcctcgcccactggaatgaagcgtatcattttataaacaaagcgaagaggaaccattccaagtgcctggtgcattgcaaaatgggcgtgagtcgctcggcctccacagtcatagcctatgcaatgaaggaattcggctggcctctggaaaaagcatataactatgtaaagcagaagcgcagcatcacgcgccccaacgcgggctttatgaggcagctgtctgagtatgaaggcatcttggatgcaagcaaacagcggcacaacaagctgtggcgtcagcagacagacagcagcctccagcagcctgtggatgaccctgcaggacctggcgacttcttgccagagaccccagatggcaccccggaaagccagctgcccttcttggatgatgccgcccagcccggcttagggccccccctcccctgctgtttccggcgactctcagacccccttctgccttcccctgaggatgaaactggcagcttggtccacctggaggatccggagagggaggctctgttggaggaagctgctccacctgcagaggtgcacaggccggccagacagccccagcaaggttccggactctgtgagaaggatgtgaagaagaaactagagtttgggagtcccaaaggtcggagcggctccttgctgcaggtggaggagacggaaagggaggagggcctgggagcagggaggtgggggcagcttccaacccagctcgatcaaaacctgctcaactcggagaacctaaacaacaacagcaagaggagctgtcccaacggcatggaggatgatgctatatttgggatccttaacaaagtgaagccttcctataaatcctgtgccgactgcatgtaccctacagccagcggggctcctgaggcctccagggagcgatgtgaggaccccaatgctcccgccatctgcacccagccagccttcctaccccacatcacgtcctcccctgtggcccacttggccagcaggtcccgtgttccggagaagccagcctctggcccaaccgaacctcccccgttcctaccaccagcaggctccaggagggcagacaccagtggccctggggctggagctgccctagagccaccagccagccttttggaaccttccagagagaccccaaaagtcctgccaaagtccctccttttgaagaattctcactgtgataagaaccctcccagcacagaagtggtaataaaggaagaatcgtcacccaagaaagatatgaagccagccaaggacctgaggcttctgttcagtaatgaatctgagaagccgacaaccaacagctacctgatgcagcaccaggagtccatcattcagctgcagaaggcaggcttggtccgcaagcacaccaaagagctagagcggctgaagagcgtgcctgcagacccagcacctccctccagggatggccctgccagcaggctggaggccagcatccccgaggagagccaggatccagccgcgctccacgagctgggccccctggttatgcccagccaggccgggagtgatgagaagtcagaggccgcccccgcttcattggaaggaggctcactgaagagcccccctcctttcttctaccgcctggaccacaccagtagtttctcaaaagactttctgaagaccatctgctacacccccacctcctcttccatgagctccaacctgacccggagctccagcagcgatagcatccacagtgtccgtgggaagcccgggctggtgaagcagcggacacaggagattgagacccggctccggctggcgggcctcaccgtctcttccccactgaagcgctcacactctcttgccaagctggggagtctcaccttctcaacggaagacctgtccagtgaggctgacccgtccaccgtcgctgactcccaggacaccactttgagtgaatcttccttcttgcatgagccccagggaaccccgagggacccagctgcaacctccaaaccatcagggaaacccgccccagaaaacttaaagagcccttcgtggatgagcaaaagctgacccgccttttgctgcgtcaggctgggcggatattttcatatgatccctccctcactttcactgtggatttggatcgaccccttacatcttgatttcccttaaacgagtgaagtcatcctaacttttcccctactcttgccatagagaggaggagaagaaactaaccaacatgcagcacaagaaggggagctgtcagtcgtgtggcctgggagaaccaggagccgccggccaggagacacaaaactccgctcccaccgtgtcttcaagaagaaccatgttttaggaagaacgtgcacacataggcgcacacatccagactgttcccttcgcatcctgcagaagagtcctggtggtggcagcctcaccgcggcacacgttctagctcattcttggcctcgcagaaaactctcggatggcaacattaagtcctacctctgttctcgctgcgctttttatttttaaaacacacgaatgaccaaggcttgttccagggaataatgctctgtctgaaagcgtttttccaaaaaaagaatttttcgttttgtgttttggttgggaccccagacgtgtcaagacttttaacccgacagccccaagcactgctgagtaaagtcatcagatgagtagtcccacgctgttgttgagctgactctgtgcccgaatggtggtgcaggcgccctgtcctggttgtgttgttacgtgtttgaccagcacaggggtccggtggggaaaatgtatgggttgttctcagttgttgctaatgctgaagtttaaatctcaaggggaagggcccacctgcattgttgagtgtctgctgctgaaacacatgattgtgtttaggtttgaaattgctcaagtgtctggctcaggtggtggttctgagacacatcgtcctgctgagagcccagatgcttaggtccactagggcccatctagggaagggaaaggagatttcagcggcttccccgaaaggaacgggactgtcgggatgcttcccggatgtctacagttgccccttcctgcagtgagattactgcttcctgtttccctccagctcttcccagcagcagtgagggagtataagagggatctgtagtcgctgcctggctctgtgggcggcccctttaagactcaggtgagctcagccagtcccgctgcgccaggcttgaatcaaaggtgtcagcaagctagatgtcaaaacatttcgagagagaggcagcttgcagaaaagcagaaaggttgaattcaggggtcagcaaactatggcatgtggccccgtgagctaggaatggtttttcctctttaagacagggcctggctctgtcacctaggctggagtacagtagtgcaatcatgactcactgcagcatcaacctccctggctcaagcgatggcttttacctttttaaggagttgtaaaaaaaagaaataatatgtgacagaattcatgtggcccacaaagcctgaggtacttactgtcaggccctttgtagaaaaagttgctgacccctggtttgatttgccacacagggctgctcatggccctgtaggaagaaactgggtaaatgtgaagccctctgcctctctgacacctaaggccagacccttccctcctcccgaccacaagctttgccagccccgcactagcctcacctgtgcaggatggagtaggttgcgtacatgggggaaggcaggtgaacacagttggctgaagctcttccacaattccatcttgccctcagctgggtccgccagattaactcagtgaaaccagaaagccttcaaggaccagctgaattctgaaagtgagtgagtgagccatcatcttaacattggccagaactgtgttccccaaagctattctagaaagcaccccaggagggatctgcaggaacaaggctagttcatattttacctagtgagcacagtttttgcaaaaatcctccctccaggactttgtctccttggagtgatttttaaaaatacatacattactttatagggagctgttttcccactagtgtcaattaaaatcaccttaaaaggtgattatccacttattcctaaacccctgtgggttgttccccctttccctcagccaacaaaagcatagcctcaaaaaatatcaagttcggtatgttttgccaaatcaaatttcatgtggtagatcaatttttgtgtcaaaataatcttttaaatttagtgatgacaggcttttgttggttttttaaccacgtctatgtatgagaatgatatatttttgaaaactttaattttgaaagccataatttttcttatctaaagagttggggggtggggtgtggaatctggagagtacaagttggtctttggcttctggcaaacttacccattcatttttggaagcacagctagcatatcaacatccagacgagagcgctggtcccgtccacagagcagagtgaagcattctggacttgatgcttaatagcctggcctggagaaaagggtaaggtttatttttggaaacccagatcagttgcatgtaaacagatggcacatggctatttaaaatgctgtatgatggggccgggcgcggtggctcacgcctgtaatcctagcactttgggaggccgaggcaggcggatcatctgaggtcaggagttctagaccagcctggccaacatggtgaaaccccgtctctactaaaaatacaaaaacttagctgggtgtggtagtgcgtgcctgtaatcctagctacttaggaggctgaggcaggagaatcgcttgaacctgggtggcggaggttgcaatgagccgagatcgcgccactgcactccagcctgggtgcaatgaaactgggagtgaaactccgtctcaaaaaaataaaatgctgtatgaacaagatgagcattctgtcaggtgtcgggacacctgggcaaagacgaattcatgctgtctgtgaaaaggaagtttgcactgtaacatatgccatagcttggcccttgctttgtatgcaaccttagctgatggggaaaattccaaacataagtggcacaggaaagaggcaggcagaggaggcaggggtctgtgctgtgcaagtcactggttttttatgactatcattttcattgaatgcatttgttgaattgggacaaaaggaacattttctaaatcagcttgatactctttataaaaaacagctgaatcttatcttctgcctcacattaattcatgtggcatgccaaaagttagactgaacttttctacatcttcaccttgcattgatacaggaaagtcttctctttaagtcttgctaagtataagggggatagtggtcacgggaagaggagaaccggggctgctctcggatggtaattgacaatgccgatttccatttctttgtcttacggctacttccgagccttctagcaaggtccctggttgcatgtatttcctaagagcagagtttatttctctttacattccctgcttccttgctctccatgcagggaccccagccaacctctgggctgttgaatagctctctgctgggtggcaagcccttctccttggcaccctgttgcttaagcatacagattgctcaccaggtgcacacagacagctgtactgtccaagcccattctgctccaccctgtcctcttcagctaaagagcattccagtaatctaaagcccttttcccctggagaagtccagagtttgcagcagtgtggagctgagcttgaacagaacagaccctcagcacggccctggactaatgcactcttatctgagggcagtccattctagaaggttgatgaatttccctaccactctcctggggaccttttctctctagtgggaacaaatgctacataatttagtcaagatcctattaagtcatctcacctgaggcatctggagagggagttgccttccattggtgggaaattgttggtgccagaatacattttgcccaaaactcttctcattggctggccacctagcagggctcctctaaacacgcaactcagcgaggggacccccttcacctctggcaagagagctgggtagatcagaaacttggtgacacctggctagcacagagcaggctcacttgtcttggtcccactacccagattcctgcagacattgcaaaccaaatgaaggttgttgaatgacccctgtccccagccacttgttttgttatcatctgctctgcagtggaatgcctgtgtgtttgagttcactctgcatctgtatatttgagtatagaaaccgagtcaagtgatcatgtgcatccagacacactgtgtcacctgagccacagagcaaatcaccttaacgatctggaatgaaactgtgaccagtgccgccctgggtggttctggagagactgccgtcttcttgtttggccataggtgctggggccccggcttcagtcactgtctcagacaggagtcccgataagcagatcaccagtcctccactgtccttcctgtcggccttgctgcatgagaagatagctgcttcctccctcttttcctacactgtaattattgttttacaattgagtgccttaataatagtttacaaatactatgtatttatgcaaaactgttaaagtctcatctgttatgattggatacttggtcttgtcagtagtggtcagcattgggttgtgagcttgtcctactccatacgtgtttatcctgctatgcagttttacattgtgtgttcacatctattccaaggagccttgctagaaacaacactggcggttcctgcaggccaggcaggcattggcccatgctgtgtcccataggagccaatgaaagaacgtagcttggtctgctagccagccgtggggtggcgcaggccaggcagcctctgcaccagagtccagcacctgcccattccccagtcacacaatcatactcttctttcatagagattttattaccacctagaccaccctagttttcctctctgttagtgtcctgagctcttttgcaacaaaatgtaggtacagaccaatccctgtcccttccccaatcaggagctccacaccatgagttgtttggttttccagaagctgccagtgggttcccgtgaattgcgttaagatatcgatgattttttttattgtttttcttcttgtttttttaaataatatatttaaaggcagtatcttttgtactgtgaatttgcagtagaagatgcagaatgcactttttttttacttctgttggtgtgtattgtatatagtgtgtgtgcttcttgtgatgaaaataaactttttctttataaattc

SEQ ID NO: 200839 - DNA, 3150 bp, Artificial Sequence
  derived and/or modified sequence
atggccctggtgaccctgcagagaagccccacccccagcgccgccagcagcagcgccagcaacagcgagctggaggccggcagcgaggaggacagaaagctgaacctgagcctgagcgagagcttcttcatggtgaagggcgccgccctgttcctgcagcagggcagcagcccccagggccagagaagcctgcagcacccccacaagcacgccggcgacctgccccagcacctgcaggtgatgatcaacctgctgagatgcgaggacagaatcaagctggccgtgagactggagagcgcctgggccgacagagtgagatacatggtggtggtgtacagcagcggcagacaggacaccgaggagaacatcctgctgggcgtggacttcagcagcaaggagagcaagagctgcaccatcggcatggtgctgagactgtggagcgacaccaagatccacctggacggcgacggcggcttcagcgtgagcaccgccggcagaatgcacatcttcaagcccgtgagcgtgcaggccatgtggagcgccctgcaggtgctgcacaaggcctgcgaggtggccagaagacacaactacttccccggcggcgtggccctgatctgggccacctactacgagagctgcatcagcagcgagcagagctgcatcaacgagtggaacgccatgcaggacctggagagcaccagacccgacagccccgccctgttcgtggacaagcccaccgagggcgagagaaccgagagactgatcaaggccaagctgagaagcatcatgatgagccaggacctggagaacgtgaccagcaaggagatcagaaacgagctggagaagcagatgaactgcaacctgaaggagctgaaggagttcatcgacaacgagatgctgctgatcctgggccagatggacaagcccagcctgatcttcgaccacctgtacctgggcagcgagtggaacgccagcaacctggaggagctgcagggcagcggcgtggactacatcctgaacgtgaccagagagatcgacaacttcttccccggcctgttcgcctaccacaacatcagagtgtacgacgaggagaccaccgacctgctggcccactggaacgaggcctaccacttcatcaacaaggccaagagaaaccacagcaagtgcctggtgcactgcaagatgggcgtgagcagaagcgccagcaccgtgatcgcctacgccatgaaggagttcggctggcccctggagaaggcctacaactacgtgaagcagaagagaagcatcaccagacccaacgccggcttcatgagacagctgagcgagtacgagggcatcctggacgccagcaagcagagacacaacaagctgtggagacagcagaccgacagcagcctgcagcagcccgtggacgaccccgccggccccggcgacttcctgcccgagacccccgacggcacccccgagagccagctgcccttcctggacgacgccgcccagcccggcctgggcccccccctgccctgctgcttcagaagactgagcgaccccctgctgcccagccccgaggacgagaccggcagcctggtgcacctggaggaccccgagagagaggccctgctggaggaggccgccccccccgccgaggtgcacagacccgccagacagccccagcagggcagcggcctgtgcgagaaggacgtgaagaagaagctggagttcggcagccccaagggcagaagcggcagcctgctgcaggtggaggagaccgagagagaggagggcctgggcgccggcagatggggccagctgcccacccagctggaccagaacctgctgaacagcgagaacctgaacaacaacagcaagagaagctgccccaacggcatggaggacgacgccatcttcggcatcctgaacaaggtgaagcccagctacaagagctgcgccgactgcatgtaccccaccgccagcggcgcccccgaggccagcagagagagatgcgaggaccccaacgcccccgccatctgcacccagcccgccttcctgccccacatcaccagcagccccgtggcccacctggccagcagaagcagagtgcccgagaagcccgccagcggccccaccgagcccccccccttcctgccccccgccggcagcagaagagccgacaccagcggccccggcgccggcgccgccctggagccccccgccagcctgctggagcccagcagagagacccccaaggtgctgcccaagagcctgctgctgaagaacagccactgcgacaagaacccccccagcaccgaggtggtgatcaaggaggagagcagccccaagaaggacatgaagcccgccaaggacctgagactgctgttcagcaacgagagcgagaagcccaccaccaacagctacctgatgcagcaccaggagagcatcatccagctgcagaaggccggcctggtgagaaagcacaccaaggagctggagagactgaagagcgtgcccgccgaccccgccccccccagcagagacggccccgccagcagactggaggccagcatccccgaggagagccaggaccccgccgccctgcacgagctgggccccctggtgatgcccagccaggccggcagcgacgagaagagcgaggccgcccccgccagcctggagggcggcagcctgaagagccccccccccttcttctacagactggaccacaccagcagcttcagcaaggacttcctgaagaccatctgctacacccccaccagcagcagcatgagcagcaacctgaccagaagcagcagcagcgacagcatccacagcgtgagaggcaagcccggcctggtgaagcagagaacccaggagatcgagaccagactgagactggccggcctgaccgtgagcagccccctgaagagaagccacagcctggccaagctgggcagcctgaccttcagcaccgaggacctgagcagcgaggccgaccccagcaccgtggccgacagccaggacaccaccctgagcgagagcagcttcctgcacgagccccagggcacccccagagaccccgccgccaccagcaagcccagcggcaagcccgcccccgagaacctgaagagccccagctggatgagcaagagctag

SEQ ID NO: 200840 - protein, 1060 aa, Artificial Sequence
  derived and/or modified sequence
MLIEDVDALKSWLAKLLEPICDADPSALANYVVALVKKDKPEKELKAFCADQLDVFLQKETSGFVDKLFESLYTKNYLPLLEPVKPEPKPLVQEKEEIKEEVFQEPAEEERDGRKKKYPSPQKTRSESSERRTREKKREDGKWRDYDRYYERNELYREKYDWRRGRSKSRSKSRGLSRSRSRSRGRSKDRDPNRNVEHRERSKFKSERNDLESSYVPVSAPPPNSSEQYSSGAQSIPSTVTVIAPAHHSENTTESWSNYYNNHSSSNSFGRNLPPKRRCRDYDERGFCVLGDLCQFDHGNDPLVVDEVALPSMIPFPPPPPGLPPPPPPGMLMPPMPGPGPGPGPGPGPGPGPGPGPGHSMRLPVPQGHGQPPPSVVLPIPRPPITQSSLINSRDQPGTSAVPNLASVGTRLPPPLPQNLLYTVSERQPMYSREHGAAASERLQLGTPPPLLAARLVPPRNLMGSSIGYHTSVSSPTPLVPDTYEPDGYNPEAPSITSSGRSQYRQFFSRTQTQRPNLIGLTSGDMDVNPRAANIVIQTEPPVPVSINSNITRVVLEPDSRKRAMSGLEGPLTKKPWLGKQGNNNQNKPGFLRKNQYTNTKLEVKKIPQELNNITKLNEHFSKFGTIVNIQVAFKGDPEAALIQYLTNEEARKAISSTEAVLNNRFIRVLWHRENNEQPTLQSSAQLLLQQQQTLSHLSQQHHHLPQHLHQQQVLVAQSAPSTVHGGIQKMMSKPQTSGAYVLNKVPVKHRLGHAGGNQSDASHLLNQSGGAGEDCQIFSTPGHPKMIYSSSNLKTPSKLCSGSKSHDVQEVLKKKQEAMKLQQDMRKKRQEVLEKQIECQKMLISKLEKNKNMKPEERANIMKTLKELGEKISQLKDELKTSSAVSTPSKVKTKTEAQKELLDTELDLHKRLSSGEDTTELRKKLSQLQVEAARLGILPVGRGKTMSSQGRGRGRGRGGRGRGSLNHMVVDHRPKALTVGGFIEEEKEDLLQHFSTANQGPKFKDRRLQISWHKPKVPSISTETEEEEVKEEETETSDLFLPDDDDEDEDEYESRSWRR

SEQ ID NO: 200841 - DNA, 6451 bp, Artificial Sequence
  derived and/or modified sequence
gggttagttcctgttaggccccggccgggggagtaggttgaagtctcctaagatgcccggtgggctggggcaccgggagctgtgaagggaacgtgagggggcggcgtagtggagacccacggcaggcctgaagaagagcggcggccgagcccgccttccctgcaccatgctcatagaggatgtggatgccctcaagtcctggctggccaagttactggagccgatatgtgatgctgatccttcagccttagccaactatgttgtagcactggtcaagaaggacaaacctgagaaagaattaaaagccttttgtgctgatcaacttgatgtctttttacaaaaagaaacttcaggttttgtggacaaactatttgaaagtctctatactaagaactaccttccacttttggaaccagtaaagcctgagccaaaaccactagtccaagaaaaagaagaaattaaagaagaggtatttcaggagccagcagaggaagaacgagatggcagaaaaaagaaatatcctagtccccagaagactcgttcagaatctagtgaacgaaggacacgtgagaaaaaaagagaagacgggaaatggagagactatgaccggtactatgagcggaatgaattgtaccgtgagaagtatgactggagaagaggcaggagtaagagtcggagtaagagtcgaggcctgagtcgcagtagaagccgaagtagggggcgcagcaaagaccgggatccaaataggaatgttgagcacagggaaagatcgaagtttaagagtgaaaggaatgacctggagagttcctatgtgcctgtgtctgcaccacctccaaactcttctgagcagtattcctctggggcacagtctattcccagcactgttactgtgatcgcacctgctcaccactctgaaaacacaactgagagttggtctaattactataacaatcatagctcttccaattcttttggtcgaaacctaccaccaaagaggcgatgcagagattatgatgaaagaggattttgtgtacttggtgacctttgtcagtttgatcatggaaatgatcccctagttgttgatgaagttgctctgccaagtatgattcctttcccaccccctcctcctgggcttcctcctccaccacctcctggaatgttaatgcctccaatgccaggtccaggcccaggcccgggcccaggtccaggcccaggcccgggcccaggtccaggtcctggccatagtatgagacttcctgttccccaaggacatggtcagcctccaccatccgttgtgcttcccataccaagaccacctataacacaatcaagcttgataaacagccgtgaccagcctgggacaagtgcagtgcccaatcttgcatcagtgggaacaagactacctcctcctttaccccagaacctcctttacacagtatcagaacgacagcccatgtactctcgtgaacatggtgctgctgcatctgagcgacttcagttggggacaccgcctcctctgttggcagctcgtttggtgccacctcgaaacctcatgggatcctccattggataccatacctcagtctccagccctacccctctggttccagatacatatgaaccagatggttacaacccagaagctcctagtattactagttctggtagatctcagtacagacagttcttttcaagaactcagacacagcgtcccaatctgattggcctaacatctggagatatggatgtaaatccaagagctgctaacattgtgatccagactgaaccaccagttcctgtttcgattaatagcaacataaccagagtagttcttgaaccagatagtcgaaaaagagctatgagtggtttggaagggccactcacaaagaaaccttggctgggaaagcaaggaaataacaatcaaaataaaccagggttcttacgaaagaatcagtatacaaacaccaaattagaagtcaagaaaatccctcaggaattgaacaacattaccaagctcaatgaacacttcagcaaatttggaactattgttaatatccaggttgcttttaagggtgacccagaagcagccctaatccaatatcttaccaatgaggaggccaggaaagccatttctagcacagaagcagttctaaacaaccgattcattcgagtcttgtggcatagggaaaataatgagcaaccgacactacagtcctcagcacagctgctcctgcaacaacagcaaacacttagtcacctctcacagcagcaccatcacctgccacagcatctacatcagcagcaggtgctagtggcccagtctgctccttcaacagtgcacggaggtatccagaagatgatgagcaaaccacagacatcaggtgcatatgttcttaacaaagttcctgttaaacatcgtcttggacatgcaggtggtaaccagagtgatgcatcacatttgttgaatcagtctggtggtgctggagaagattgccagatattttcaactccaggccatccaaaaatgatttacagctcctcaaacttaaagacaccttcaaagctctgttcagggtctaaatctcatgatgttcaagaagtgcttaaaaaaaaacaggaagcaatgaagttacaacaagatatgaggaaaaaaagacaggaagtgttagaaaagcaaatagaatgccaaaagatgttaatatccaagttagaaaaaaacaaaaacatgaaaccagaagaaagagcaaatataatgaagactttgaaagagcttggagagaagatctcacaattaaaagatgaattaaaaacatcttctgcagtctccacaccatctaaagtgaagacaaaaacggaggcccagaaggagttattagatactgaactggacctccacaagaggctgtcctcaggagaagacaccacagaattacggaaaaaactcagtcagttacaggttgaggctgcacggttaggtattttacctgtgggtcgaggaaagaccatgtcctctcaaggtcgaggaagaggccgagggcgtggaggaagaggaaggggctcactaaatcacatggtggtggaccatcgtcccaaagcactaacagttggaggattcattgaggaagaaaaagaagacttgcttcagcatttctcaaccgcaaaccaagggccaaaatttaaagaccgtcggctacagatatcatggcacaagcccaaggtaccatctatatccactgagactgaagaagaagaagtcaaggaggaggaaacagaaacctcagatttgtttttgcctgatgatgacgatgaagatgaagatgaatatgagtctcgctcatggcgaagatgaaatctgatgctagctgtataatttttaggaatattgtttagaagaacaacttttaaaaattatttaaaagaagtcaatgagccaaaaaaaatttttttatttttcttttcaacacagtaggttcaagaacagcaagtttgctatttaaacacatctcataactgtacatgatattaaagcaccaaaggcctagtgacttttacacagttgtgaagatccacagcaatgacatggataatctctagagccttattttccacaccaccttttttttgttgctgttggtgttggattatgatgtaaatgacagggtgttcagaaattttattttggattataatctactgataaaatttaattaaatgtcaaaatcacctgtaatcttttaactctcagttgttatggatgggtcatcagacagtaggaaatatttgtaattaaaatacccttttgctttcaagagtggtcttggaagaaaaatatgtttattttaattttaatttttttttttttttactttggaggagcccaatttgtattcagtctaaatttgtttttcatggtttttatgtgtggtagtactagttcagtgaaaatcacaacaaactgtgtgttcttaaatgctacagcaatggtagctagctctatagtatttccattctcttgtcatatgaactcctggacttttcctgctactgattcttagtttgctttgatatttagtgagcgctggttcggctggtctttttaaaaatttttataactcagaatgtaaaaggctttcacctattgcccctttctcgtcccccttttcttcctcttgcctttctattaataggcctgacttagtcatcattgatataagtggttcatttgggcaaccgcaggcagtctccaataaaaggttcaaaccagcacctggataaataagtgatgttttgatgagaatgatggaaggattttggggagaagagaatcaccagctttattttttccctcttttgaagcttcagttcagtatagttacacagaagggtttaaaaatgtctgaaattcttttcctaaatttaaaccatgatggtgaggtgactggggggtggggggtggaggtgggagggggttgagggctgagtatgctagtaataaatgggagtcatatatgactttgttcagatgaccttattttttcataattttgtagcttgttgctatccatgaacatacgcatccctcagtagacagtttcctttactgtgtgcatttttactgtacactgtatagagtagagtatctgttaagtaaaatatatatgtaaatttatgtcttcgtgttctgaatgttagatggaaaagcagaggagcaacactacactgtactgacccctgggaaaataaaatgattaatgtacctaggctgtcactttttcaaggatatacacatctgtgtttttatatatgtgtggtatgaaaatttgaaacctcctgttgtctccaaaagggtcttggtgaccactatatcaaggattttgtttgctgaggtaaagacaatttctcaatatagaaactattcactaagaacttaaaaccatcaggattctagatttacttagctataagaagttaaatcccacgttctgataatctttattcttctacatgttttcctggaatgatgtgtcaaaccagggtcatttttaagttcatataattttctttcataataatgaggacttcctttttctaggttattgttatatttctagtaacactgaaggtaaaataagcttataaaagaaggaaaacatcagaatggtgtatctagaatacacaatcttgctccttactcctccatcatctctaatgaaatttttcttgatgtctgtggctcagtcagtatatattttgaaagattcattgtggtgaatattttgagtcctgacagtttaaacgtgatagagggaacaaaggatttatatattttttgtacaaagttttttcttaaactgtataattttgtaaataatttgtttgggttttttttttgtgtactaaaactaccagcgtatagatttcaataagaattgttgtatttttgtatttggaaactgaaaattacagtaaataaatggaactctaagaaaaatttcagtagacagttcaacagaatgagattccttttcatatgatttttttgacctcaaaatggacatcttatttcactctcagtaaaaagttgaaaatttgactttttagtattgggggcagaagatagaagtgtgttaaagtgaaaaacagttttttcagtaaggtttgaggccctttctataagttttcagtacaccttaaacaggactaaaaatactttaaaagtgtgctttcaaagaattttaaaacatgtttgactcaaagatgaatttgaagtgagttaattataatactggaaaacttcaggttagcataaaatagtttatatatatcccctgccccctttgggatttacttccaccatcaaatcttcaactgttagaatttcacttaaaagtgaataactgccatacatgttttcttggcatcttcatttacagaaataacatacagcatctaaagcaagttctgtccctcttaatgtgtatgacatctttttaagtagctgatcagcaataatagccaccagttgactaggtcagcctgatatactagtggatcactgtccaagataaaaaggtaaccccaagtattgcaaaatttccctcaatttctttatgtaacattgaagaaatgttgttaccagctaagatgataaattggaaaacagtcttgttaaggtgaaaggggtccttggtgatggatcattatttcaaaaaagaaaaaaatcatgtgaaaaggaatagtggttcctcttgatgtatagtatgcctgtattatagtttttacaaaattgtgaacttgtgtaatagtataataggagatattgttgaatttctaactgtttatacatttaaattcatatatgtaatgtttgttttatcaattacaatctgaatttctaagaagcatgttgacttttgcaataaagatgcaatatggaatggttcacaattgg

SEQ ID NO: 200842 - DNA, 3183 bp, Artificial Sequence
  derived and/or modified sequence
atgctgatagaagatgtggatgcgcttaagagctggttagccaaactcctggagccaatatgtgacgccgatcctagtgcgctggcgaactatgttgtcgcactcgtgaaaaaggataagccggagaaagaactcaaggcattttgtgcagatcaactcgacgtttttcttcagaaggagacttcaggctttgtcgacaaattattcgagagtctctacacaaagaactatctgcccctgttagagccagtaaaacctgagcctaagcccctcgtccaggagaaggaagaaatcaaagaggaggtctttcaagagcccgcagaggaagaaagggatgggaggaagaagaaatatcccagcccacagaaaaccaggagtgaaagttccgagaggcgcacgcgggaaaagaaacgggaagatggaaaatggcgggactacgaccgctattacgagcgcaacgagctctatcgagagaaatacgattggagacgcggtagatctaaatcgcggtccaagtcaaggggtttgagccgctctagatcgcggtcccgcggacgcagtaaagatcgcgaccccaacagaaatgtcgaacatagagaacgctccaaattcaagagtgagaggaatgacttagaatccagctacgtcccagtgagcgcacctccccccaattcatctgaacagtattcaagcggagcgcagagtattccttccacggtgactgtgatcgctcccgctcaccactccgaaaacacaaccgagtcatggtctaactattataataatcactcaagttctaattcgttcgggcgtaacttgccaccgaagcggcgctgcagggattatgatgagcgtggcttctgcgttctgggagacctttgtcagtttgatcacgggaacgatcctctggtagtagatgaggtagcactgcctagcatgatcccatttcctcccccaccacccgggttgccccctcccccccccccaggaatgttgatgccacctatgccagggcccggccccgggccaggtcctgggccagggcccggccccggtccaggccccgggccgggccattcaatgagactgcctgttcctcagggtcacggacaacccccacctagtgttgtgctgccaatccccaggccacccattactcagagcagtttgattaactcccgggaccaacctgggacgtcagctgtccccaatctggcgtcagtcgggacgcggctgcctccgcccttgccacagaacctgctgtatacggtgtcagagaggcagcctatgtattcacgcgagcatggagcggcggcatccgagaggctccaattaggtacacccccccctctcctcgccgccagattagttcccccccggaaccttatgggttccagtattggctatcatacaagcgtcagcagccccactcctctggtacccgatacctacgagcccgatgggtataaccccgaggcacctagcattaccagctcaggtagatctcaataccggcagttcttcagccgcacacagactcagcggcccaatctgataggactcacctctggggatatggacgtgaatccacgagctgcgaatatcgtgattcagactgagcctcctgttcctgtgagtatcaattcaaacattaccagggtagtgctggagcccgattcacggaaaagggcaatgtccggattggagggacctctgaccaagaagccctggcttggcaagcagggtaacaacaatcagaataagcccgggtttctccgaaaaaaccaatatacgaatacaaagctcgaggtgaagaagatcccccaagagttgaacaacattactaaactgaatgaacatttctcaaaattcggaaccattgtgaacatacaagtcgcctttaagggcgaccccgaggctgccttgattcagtacttgaccaatgaagaggcaagaaaagcaatcagctccacggaagccgtgctcaataatcgcttcatccgagtcctatggcacagggagaacaatgagcaacccaccttgcaatcttccgctcaactcctgttgcaacagcaacagacactgtcacacctgagtcaacagcaccaccacttgccgcagcacctccaccaacagcaggtgctggtggcccagtccgccccaagtactgtccacggcggcatacagaaaatgatgtctaaaccccagacttctggtgcctacgtgctgaacaaggttcccgttaagcaccggctgggtcacgccggtgggaaccagtcagacgcttcccacttgctgaaccaaagcggaggcgctggcgaggattgccaaattttttcaacaccaggccaccctaaaatgatctacagcagctccaatttgaagactccctcaaagctgtgctctggctccaaatcccatgacgtgcaggaagtgctgaagaaaaaacaggaagctatgaagctgcagcaggatatgcgcaagaaaagacaagaggtgctggaaaaacaaattgaatgccagaaaatgctgataagcaaactggaaaagaacaaaaatatgaaacccgaggagcgagcgaacattatgaaaacactgaaggagttgggcgaaaagatctcccaattaaaagacgagcttaagacaagctccgcagtctcaacccccagcaaggtgaaaacaaaaaccgaggcacagaaagagctcctggataccgaattagatttacacaagcgcctgtctagcggggaggataccacagagcttcggaaaaagctcagccagctccaggtggaagctgcccgcctcgggatcctgcccgtcggccgcggcaagactatgtcgtctcaaggcagggggcggggtagggggcgtggaggacgcggtcggggctccctgaatcatatggtcgtggatcatcgacccaaggcactgaccgtgggcggcttcattgaggaagagaaagaggatctgctccagcatttttctaccgcaaatcaaggacctaagtttaaagacaggcgactgcagatatcctggcacaagccaaaggtgcccagcatttctacggagaccgaagaggaggaagttaaagaggaggagacagagacatcagacctgtttctccctgacgatgacgacgaggacgaggatgaatacgaatccaggagctggaggcgatag

SEQ ID NO: 200843 - DNA, 3183 bp, Artificial Sequence
  derived and/or modified sequence
atgctgattgaagatgtggatgccctgaagtcctggctggccaagctgctggagcccatctgtgatgctgaccccagcgccctggccaactacgtggtggccctggtgaagaaggacaagccagagaaggagctgaaggccttctgtgccgaccagctggatgtgttcctgcagaaggagaccagcggctttgtggacaagctgtttgagagcctgtacaccaagaactacctgcccctgctggagcctgtgaagccagagcccaagcccctggtgcaggagaaggaggagatcaaggaggaggtgttccaggagcctgctgaggaggagagagatggcaggaagaagaagtaccccagcccccagaagaccaggtctgagagcagcgagaggaggacccgggagaagaagagagaagatggcaagtggagggactatgaccgctactatgaaagaaatgagctgtaccgggagaagtatgactggaggcggggccgcagcaagagccgcagcaagagccggggcctgagccgcagccgcagccgcagccggggccgcagcaaggaccgggaccccaacagaaatgtggagcaccgggagaggagcaagttcaagtcagaaagaaatgacctggagagcagctatgtgcctgtgtctgcccccccacccaacagcagcgagcagtacagcagcggggcccagagcatccccagcacagtgacagtgattgccccagcccaccacagcgagaacaccacagagagctggagcaactactacaacaaccacagcagcagcaacagctttggaagaaacctgccccccaagaggcgctgccgggactatgatgagcggggcttctgtgtgctgggggacctgtgccagtttgaccacggcaatgaccccctggtggtggatgaggtggccctgcccagcatgatccccttccccccacctcctcctggcctgcccccacctcctcctcctggcatgctgatgccacccatgcctggccctggccctggccctggccctggccctggccctggccctggccctggccctggccctggccacagcatgaggctgcctgtgccccagggccacggccagcccccaccttctgtggtgctgcccatccccaggcctcccatcacccagagcagcctcatcaacagccgggaccagcccggcaccagcgctgtgcccaacctggcctctgtgggcacccggctgcccccacccctgccccagaacctgctgtacacagtgtctgagcggcagcccatgtacagccgggagcacggggccgccgccagcgagcggctgcagctgggcaccccaccacccctgctggccgcccggctggtgccccccaggaacctgatgggcagcagcatcggctaccacacctctgtgagcagccccacccccctggtgcctgacacctatgagccagatggctacaaccctgaggcccccagcatcaccagcagcggccgcagccagtaccggcagttcttcagcaggacccagacccagaggcccaacctgattggcctgaccagcggggacatggatgtgaacccccgggccgccaacatcgtcatccagacagagccccctgtgcctgtgtccatcaacagcaacatcaccagggtggtgctggagccagacagcaggaagagggccatgagcggcctggagggccccctgaccaagaagccctggctgggcaagcagggcaacaacaaccagaacaagccaggcttcctgaggaagaaccagtacaccaacaccaagctggaggtgaagaagatcccccaggagctgaacaacatcaccaagctgaatgagcacttcagcaagtttggcaccatcgtgaacatccaggtggccttcaagggggaccctgaggccgccctgatccagtacctgaccaatgaggaggccaggaaggccatcagcagcacagaggccgtgctgaacaaccgcttcatccgggtgctgtggcaccgggagaacaatgagcagcccaccctgcagagcagcgcccagctgctgctgcagcagcagcagaccctgagccacctgagccagcagcaccaccacctgccccagcacctgcaccagcagcaggtgctggtggcccagagcgcccccagcacagtgcatggaggcatccagaagatgatgagcaagccccagaccagcggggcctacgtgctgaacaaggtgcctgtgaagcaccggctgggccatgctgggggcaaccagagtgatgccagccacctgctgaaccagagcggcggggccggggaggactgccagatcttcagcaccccaggccaccccaagatgatctacagcagcagcaacctgaagacccccagcaagctgtgcagcggcagcaagagccatgatgtgcaggaggtgctgaagaagaagcaggaggccatgaagctgcagcaggacatgaggaagaagaggcaggaggtgctggagaagcagatcgagtgccagaagatgctgatcagcaagctggagaagaacaagaacatgaagccagaggagcgggccaacatcatgaagaccctgaaggagctgggggagaagatcagccagctgaaggatgagctgaagaccagcagcgctgtgtccacccccagcaaggtgaagaccaagacagaggcccagaaggagctgctggacacagagctggacctgcacaagaggctgagcagtggagaggacaccacagagctgaggaagaagctgagccagctgcaggtggaggccgcccggctgggcatcctgcctgtgggccggggcaagaccatgagcagccagggccggggccggggccggggccggggcggccggggccggggcagcctgaaccacatggtggtggaccaccggcccaaggccctgactgtgggcggcttcatcgaggaggagaaggaggacctgctgcagcacttcagcacagccaaccagggccccaagttcaaggaccggcggctgcagatctcctggcacaagcccaaggtgcccagcatcagcacagaaacagaggaggaggaggtgaaggaggaggagacagagaccagtgacctcttcctgcctgatgatgatgatgaagatgaagatgaatatgagagccgctcctggaggaggtag

SEQ ID NO: 200844 - DNA, 3183 bp, Artificial Sequence
  derived and/or modified sequence
atgctgatcgaggacgtggacgccctgaagagctggctggccaagctgctagagccaatctgcgatgccgacccatcggcactcgccaactacgtggtggcccttgtgaagaaggacaagccagaaaaggaactgaaggcattctgtgccgaccagctggacgtatttcttcagaaggaaacatctggatttgtggacaaattgttcgaatcactgtatactaagaactacctgcctctgttggaacccgtgaagccagaacctaagcccctcgtacaagagaaagaagaaatcaaagaagaagtgttccaggagcccgcggaggaggagagggacgggaggaagaaaaaatacccatcacctcagaaaactcggtctgaaagctcagagcgccggaccagggagaagaagagggaggatggaaaatggcgagattacgaccgctactacgagcgcaatgaattgtatagggagaaatacgactggcggaggggacggagcaaaagccgctcaaagtcaaggggtcttagtcgctccagaagtcggtccaggggacggtccaaggatagagacccaaataggaatgtggaacaccgggagcgtagcaaatttaaatcagagcggaatgacctggagtcttcatacgtgcccgtttccgctcctcctcccaatagctccgagcaatacagcagcggcgcccagtctatcccttccacagtgaccgtgatagctcctgcccatcactccgagaacacgactgaatcctggagcaactactacaataaccactcatcatctaactcctttggacgcaatttaccccctaaacgccgctgcagggactatgatgaaagaggcttttgtgtgctcggcgatctatgccaattcgaccatggcaacgaccctctggttgtcgacgaagtagcccttcccagcatgatcccattcccaccaccccccccaggactgcctcccccacctccgcctggcatgcttatgcctcctatgcctggtccgggaccagggccaggtcccggccctgggccgggacccggccctgggccaggtcctggacattccatgaggctgccagtcccacaggggcacgggcagcctcctcctagtgtggtcttgcccatcccaaggcctccaattacccagagctccctcattaactctcgcgaccagcctgggacatctgcagttcctaatcttgctagcgttgggacaaggcttccccccccgctgccccagaacctgctatatacggtgtccgagcgccaaccgatgtacagcagggagcatggtgcagccgcctcagagcgcctccagctggggactccaccacccttactcgccgctagattagtgccaccccggaatctgatggggtcctcaatcggttatcataccagcgtgtctagccctactcctctggttccagacacctacgagcctgatggctacaatccagaagctcctagcatcacatcctcaggcagatcacaataccgacagttcttcagccgcacccaaactcagcggcctaatctgataggacttacctccggagacatggacgttaatccaagggccgccaacatcgtgattcaaactgagcccccagttcctgtgtcaattaattccaacattactcgcgtcgttcttgaacccgattcccgcaaaagggctatgtcgggactagagggccccctcacaaagaaaccttggctagggaaacaggggaataacaatcagaataagcctggcttcctgaggaaaaatcaatatactaatacgaagctggaggtgaaaaagatacctcaggaattgaacaacatcactaaactcaatgagcactttagcaagttcggcactatcgtgaacatccaggtggcctttaagggcgatcccgaggcagcgctgattcagtaccttacgaacgaggaagctagaaaggctatttcttcaaccgaggccgtgcttaacaataggtttatccgggtactgtggcatcgagagaacaacgaacagcccacactccagtccagcgctcagctcctgctacagcagcagcaaacgctctcacacttgtctcagcagcaccatcacctgccccagcacctccatcagcagcaggtcctggtggcccagagcgctcccagcactgtgcatggcggaattcagaaaatgatgtccaaacctcagaccagcggagcttacgtgctgaacaaggtgccagtaaaacacagactcggtcatgccgggggcaaccaatcggatgccagccatctcctgaatcaatctggcggggctggggaggactgccagatcttttctactcccgggcatccgaagatgatctactcctcttcgaacttgaaaactcctagtaaactctgttccggctcaaaatcccacgatgtgcaggaagtacttaagaaaaagcaggaagcaatgaagctccaacaggacatgaggaaaaagcgacaggaagtcctcgagaagcagattgagtgtcagaagatgctcatttctaagctagagaagaataagaacatgaagcccgaggagagggccaacatcatgaagacgctcaaggagcttggcgagaagatcagccagctcaaggacgagctgaagaccagctcggcagtgagcactccaagcaaggtcaaaaccaagaccgaggctcagaaagagctcctggataccgagctcgacctccacaagcgcctgtctagcggggaggataccaccgagctccgcaagaaactgtcacagttgcaagtggaggccgcccggctcgggatccttcctgttggacgggggaaaacaatgtctagccagggcaggggccgaggcagagggcggggaggcagaggacgggggagcttgaatcacatggtggtggaccaccgcccaaaagcgctgacggtgggtggatttattgaagaggaaaaggaggatctcctgcagcacttctctaccgctaaccagggccccaagttcaaggacagaaggctgcaaattagttggcataagcccaaggtgccctctatctcgaccgagacagaggaggaagaagtgaaagaggaggagacagaaacttctgatctgttcctgcctgacgacgatgacgaagacgaggatgagtatgagtctaggagttggagaaggtag

SEQ ID NO: 200845 - DNA, 3183 bp, Artificial Sequence
  derived and/or modified sequence
atgctcatagaggatgtcgacgcactgaagtcttggcttgccaaactgctagagcccatttgcgatgccgatccgagcgcactggccaactacgttgtcgcgctggtgaagaaagataaaccagagaaggagctcaaagctttctgcgcagaccagctggatgtttttctgcagaaggagacatctgggtttgtcgacaagctttttgagagcttgtacaccaagaattatcttcctctgctggaacccgtcaagcccgagcctaaacccttagtccaggagaaagaggaaattaaggaggaagtcttccaggagccagccgaagaggagcgggacggccgaaagaaaaaatatccatctccccagaagacaagatcagagagtagcgaaagacgcacgcgtgagaagaaacgagaggatggcaagtggcgggattacgaccggtattacgaaaggaacgagctatacagggagaagtacgattggcggagaggaagatcgaaatcccgctcgaaatccaggggattgagtagaagcaggtcccgtagtcgtggcagaagcaaggaccgggacccaaatcgtaatgtggagcaccgggagcggagcaaattcaaaagcgagcgcaatgacttagagtcgtcctatgttcccgtatccgctccacctcctaacagtagtgagcaatattcaagcggagcccaatccattccatccacagtaactgtcatcgcacctgctcaccattcggagaacactacagagagctggagcaattactataataatcattcctcgtcgaatagcttcggccgaaatctgcctccaaagcgccgatgcagagattacgatgaacggggtttttgtgttcttggagatctgtgccagtttgaccacgggaacgatcccctggtcgttgatgaagtggcccttccatctatgattccatttcctcccccaccacctgggcttcccccacctccccctccaggaatgttgatgcctcccatgcccggaccaggacccggaccgggtcccggacccggacccggtccagggccaggccctggccctggtcactccatgcgcctccccgtccctcagggccatggtcaaccacctccctcagtggtgctgccgattccgaggccccctatcactcagtcctccctgatcaacagccgtgatcagcctggaaccagcgccgtgccaaacttggccagcgttggaacccgcctgcctccacctttgccgcagaaccttctttatacagtgagtgaaagacagccaatgtatagcagagaacatggggcagccgctagcgaacgtttgcagttgggtacaccacccccactactggccgctagattggtcccccctagaaaccttatgggaagctccatcggataccacaccagcgtgtctagcccaaccccactggtccctgatacatacgagcccgatgggtacaatcccgaagctccgtctattacttcgtcaggccgaagccagtaccgccagttttttagtcggacccagacccaaaggcctaaccttatcggccttactagcggtgatatggatgtcaatccacgggctgcaaatatcgtcattcaaacggaaccccctgtgcctgtatccatcaactcaaacataacccgcgtggtcctagagcctgactctagaaagcgagcaatgagtggcttagaagggcctttaaccaagaaaccttggctcggcaagcagggaaacaacaaccagaacaaacctggttttttacgcaagaatcagtacactaacaccaaactggaagtgaagaagattccccaggagctcaacaatatcacaaaacttaatgagcacttctccaagtttggtaccattgtaaatatccaggtggcctttaagggggaccctgaggctgcgcttatccaatatctcaccaacgaagaggcgaggaaagcaatctcatcaaccgaggccgtgctgaataaccgcttcatcagggtcctgtggcaccgcgagaataatgaacagcctacactccaatcgtccgcccagttactgctgcagcagcagcagacacttagccatctgagccagcagcatcatcatcttccccagcatctccaccagcaacaggtcctggtggctcagagcgctcccagcacagtccacggtggcatccagaagatgatgtccaaaccacagacttccggggcttatgtccttaacaaggtcccagtgaagcaccgtctgggtcacgctggtggcaatcagagcgacgccagccatttacttaatcagtccggaggagcaggggaggactgccagatcttcagcacgcctggccatcccaagatgatttattcaagctcaaacctgaagacacccagcaagctctgctctgggtctaaatcacacgatgtgcaagaagtgctcaagaagaagcaagaagcgatgaagctccagcaggacatgaggaagaagcgccaggaggtgctcgagaaacagatcgaatgccagaaaatgctgattagcaagcttgagaaaaacaaaaacatgaaacctgaggagcgtgctaatattatgaaaactttgaaggagctgggggaaaagatctcacagctgaaagatgagctcaaaaccagttccgccgtgtcaaccccatcaaaggttaagacaaagaccgaagcccagaaggaactgctggacaccgaactcgacttgcataagcggctctcctctggggaggatacgacggaattgagaaaaaagctcagccaactgcaagtcgaggccgctcggctcggcattctgcctgtgggccgtggcaagaccatgtcttcccaagggagaggcaggggccgtggccgaggaggacgaggcagaggctctctgaaccacatggttgtcgaccaccgtcccaaagctctcactgttggcggttttattgaagaagagaaggaagacctcctgcagcactttagcactgctaatcagggccctaagttcaaggacagacggctccagatctcttggcacaagcccaaggtcccaagtatctccacggaaactgaagaggaggaggtgaaagaagaggaaactgaaacatccgatcttttccttcccgacgacgatgatgaagatgaggacgagtatgagtcccgctcgtggcggagatag

SEQ ID NO: 200846 - DNA, 3183 bp, Artificial Sequence
  derived and/or modified sequence
atgctgatcgaggacgtggacgccctgaagagctggctggccaagctgctggagcccatctgcgacgccgaccccagcgccctggccaactacgtggtggccctggtgaagaaggacaagcccgagaaggagctgaaggccttctgcgccgaccagctggacgtgttcctgcagaaggagaccagcggcttcgtggacaagctgttcgagagcctgtacaccaagaactacctgcccctgctggagcccgtgaagcccgagcccaagcccctggtgcaggagaaggaggagatcaaggaggaggtgttccaggagcccgccgaggaggagagagacggcagaaagaagaagtaccccagcccccagaagaccagaagcgagagcagcgagagaagaaccagagagaagaagagagaggacggcaagtggagagactacgacagatactacgagagaaacgagctgtacagagagaagtacgactggagaagaggcagaagcaagagcagaagcaagagcagaggcctgagcagaagcagaagcagaagcagaggcagaagcaaggacagagaccccaacagaaacgtggagcacagagagagaagcaagttcaagagcgagagaaacgacctggagagcagctacgtgcccgtgagcgcccccccccccaacagcagcgagcagtacagcagcggcgcccagagcatccccagcaccgtgaccgtgatcgcccccgcccaccacagcgagaacaccaccgagagctggagcaactactacaacaaccacagcagcagcaacagcttcggcagaaacctgccccccaagagaagatgcagagactacgacgagagaggcttctgcgtgctgggcgacctgtgccagttcgaccacggcaacgaccccctggtggtggacgaggtggccctgcccagcatgatccccttccccccccccccccccggcctgccccccccccccccccccggcatgctgatgccccccatgcccggccccggccccggccccggccccggccccggccccggccccggccccggccccggccccggccacagcatgagactgcccgtgccccagggccacggccagcccccccccagcgtggtgctgcccatccccagaccccccatcacccagagcagcctgatcaacagcagagaccagcccggcaccagcgccgtgcccaacctggccagcgtgggcaccagactgcccccccccctgccccagaacctgctgtacaccgtgagcgagagacagcccatgtacagcagagagcacggcgccgccgccagcgagagactgcagctgggcacccccccccccctgctggccgccagactggtgccccccagaaacctgatgggcagcagcatcggctaccacaccagcgtgagcagccccacccccctggtgcccgacacctacgagcccgacggctacaaccccgaggcccccagcatcaccagcagcggcagaagccagtacagacagttcttcagcagaacccagacccagagacccaacctgatcggcctgaccagcggcgacatggacgtgaaccccagagccgccaacatcgtgatccagaccgagccccccgtgcccgtgagcatcaacagcaacatcaccagagtggtgctggagcccgacagcagaaagagagccatgagcggcctggagggccccctgaccaagaagccctggctgggcaagcagggcaacaacaaccagaacaagcccggcttcctgagaaagaaccagtacaccaacaccaagctggaggtgaagaagatcccccaggagctgaacaacatcaccaagctgaacgagcacttcagcaagttcggcaccatcgtgaacatccaggtggccttcaagggcgaccccgaggccgccctgatccagtacctgaccaacgaggaggccagaaaggccatcagcagcaccgaggccgtgctgaacaacagattcatcagagtgctgtggcacagagagaacaacgagcagcccaccctgcagagcagcgcccagctgctgctgcagcagcagcagaccctgagccacctgagccagcagcaccaccacctgccccagcacctgcaccagcagcaggtgctggtggcccagagcgcccccagcaccgtgcacggcggcatccagaagatgatgagcaagccccagaccagcggcgcctacgtgctgaacaaggtgcccgtgaagcacagactgggccacgccggcggcaaccagagcgacgccagccacctgctgaaccagagcggcggcgccggcgaggactgccagatcttcagcacccccggccaccccaagatgatctacagcagcagcaacctgaagacccccagcaagctgtgcagcggcagcaagagccacgacgtgcaggaggtgctgaagaagaagcaggaggccatgaagctgcagcaggacatgagaaagaagagacaggaggtgctggagaagcagatcgagtgccagaagatgctgatcagcaagctggagaagaacaagaacatgaagcccgaggagagagccaacatcatgaagaccctgaaggagctgggcgagaagatcagccagctgaaggacgagctgaagaccagcagcgccgtgagcacccccagcaaggtgaagaccaagaccgaggcccagaaggagctgctggacaccgagctggacctgcacaagagactgagcagcggcgaggacaccaccgagctgagaaagaagctgagccagctgcaggtggaggccgccagactgggcatcctgcccgtgggcagaggcaagaccatgagcagccagggcagaggcagaggcagaggcagaggcggcagaggcagaggcagcctgaaccacatggtggtggaccacagacccaaggccctgaccgtgggcggcttcatcgaggaggagaaggaggacctgctgcagcacttcagcaccgccaaccagggccccaagttcaaggacagaagactgcagatcagctggcacaagcccaaggtgcccagcatcagcaccgagaccgaggaggaggaggtgaaggaggaggagaccgagaccagcgacctgttcctgcccgacgacgacgacgaggacgaggacgagtacgagagcagaagctggagaagatag

SEQ ID NO: 200847 - protein, 380 aa, Artificial Sequence
  derived and/or modified sequence
MLRRKPSNASEKEPTQKKKLSLQRSSSFKDFAKSKPSSPVVSEKEFNLDDNIPEDDSGVPTPEDAGKSGKKLGKKWRAVISRTMNRKMGKMMVKALSEEMADTLEEGSASPTSPDYSLDSPGPEKMALAFSEQEEHELPVLSRQASTGSELCSPSPGSGSFGEEPPAPQYTGPFCGRARVHTDFTPSPYDHDSLKLQKGDVIQIIEKPPVGTWLGLLNGKVGSFKFIYVDVLPEEAVGHARPSRRQSKGKRPKPKTLHELLERIGLEEHTSTLLLNGYQTLEDFKELRETHLNELNIMDPQHRAKLLTAAELLLDYDTGSEEAEEGAESSQEPVAHTVSEPKVDIPRDSGCFEGSESGRDDAELAGTEEQLQGLSLAGAP

SEQ ID NO: 200848 - DNA, 1143 bp, Artificial Sequence
  derived and/or modified sequence
atgctgagaagaaagcccagcaacgccagcgagaaggagcccacccagaagaagaagctgagcctgcagagaagcagcagcttcaaggacttcgccaagagcaagcccagcagccccgtggtgagcgagaaggagttcaacctggacgacaacatccccgaggacgacagcggcgtgcccacccccgaggacgccggcaagagcggcaagaagctgggcaagaagtggagagccgtgatcagcagaaccatgaacagaaagatgggcaagatgatggtgaaggccctgagcgaggagatggccgacaccctggaggagggcagcgccagccccaccagccccgactacagcctggacagccccggccccgagaagatggccctggccttcagcgagcaggaggagcacgagctgcccgtgctgagcagacaggccagcaccggcagcgagctgtgcagccccagccccggcagcggcagcttcggcgaggagccccccgccccccagtacaccggccccttctgcggcagagccagagtgcacaccgacttcacccccagcccctacgaccacgacagcctgaagctgcagaagggcgacgtgatccagatcatcgagaagccccccgtgggcacctggctgggcctgctgaacggcaaggtgggcagcttcaagttcatctacgtggacgtgctgcccgaggaggccgtgggccacgccagacccagcagaagacagagcaagggcaagagacccaagcccaagaccctgcacgagctgctggagagaatcggcctggaggagcacaccagcaccctgctgctgaacggctaccagaccctggaggacttcaaggagctgagagagacccacctgaacgagctgaacatcatggacccccagcacagagccaagctgctgaccgccgccgagctgctgctggactacgacaccggcagcgaggaggccgaggagggcgccgagagcagccaggagcccgtggcccacaccgtgagcgagcccaaggtggacatccccagagacagcggctgcttcgagggcagcgagagcggcagagacgacgccgagctggccggcaccgaggagcagctgcagggcctgagcctggccggcgccccctag

SEQ ID NO: 200849 - DNA, 2626 bp, Artificial Sequence
  derived and/or modified sequence
gctgaaggctcggttcatgccgtgcccccgggcagttctggtgaggctaagcaagaggcctctgcatcttgacacctaggagagcagggacggagtctcccagggtggaggaccatgctgcgccgcaagccctccaatgccagtgagaaggagcccactcagaagaaaaagctctcccttcagcgctccagcagcttcaaggattttgccaaatccaaacccagctcccccgtggtgagcgagaaggagtttaatctggatgataacattccagaagatgactcaggtgtccccaccccagaagatgctgggaagagtggcaaaaagctggggaagaagtggagggcagtgatttcccgaaccatgaacaggaagatgggcaagatgatggtgaaggccctgtcagaagagatggcagacactctggaggagggctctgcctccccgacatctccagactacagcctggacagccctggccctgagaagatggcgctggccttttctgagcaagaggagcatgaacttccggtgctcagccgccaggcatcaacaggcagtgagctctgcagccccagcccaggttctggcagcttcggggaggaaccacctgccccccagtacacagggcctttctgtggccgggcacgagtccacaccgacttcactcccagcccctatgaccacgactcgctgaaactgcagaaaggagatgtgatccagatcattgaaaagccacctgtgggcacgtggctgggcctactcaatggcaaggtgggctctttcaaattcatctatgtggatgtgctgcccgaggaggccgtggggcatgcccgccccagccgccgacagagcaagggcaagaggcccaagcctaagaccctgcatgagctgctggagcgcatcggcctggaggagcacacatccaccctcctgctcaatggctaccagacactggaagacttcaaagagctgcgagaaacacacctcaatgagctgaacatcatggatccacagcaccgggccaagctgctcacggccgccgagctgctgctggactatgacactggcagtgaggaggctgaagagggcgccgagagcagccaggagccagtggcacacacagtgtcggaacccaaggtggacatcccgcgcgactcaggctgctttgagggctcggagagcgggcgcgatgacgcagagctggcaggcactgaggagcagctgcaaggcctctccctggccggggcaccttgaggtggcggtggcaataggccaaggctgggacccagctgcaaaggctgtaggagtgggcccagcctcccgtggtggcccaggtcctgaggactggcactgagcctggccctgcttccccagggacacttagggccacagaggccaggccagggccctacaggttccaggctcagctggagtggttggggagtcgcccaagggcacatcccacctgcctgagccccgccctccaccagcgactgacagcgcagcccctcctggcaccaactgctcccctgccatggccacggccacagcaagtggggcactgggaaaccctgcccatgtccctcaccaacaaggcctccaaatcctcctcacccccacaccacctacccctgtcgcactgctcctgaaaagggggccaagtcaatgtttcaggtcagtctaaaaaccctagggaagctggccatttaaaagaacccaaactgaccatgggtaaatccagttcccctaaataaggcctgaagaaatccacaggtaccattcccactttccttctccctagctttcttagaggtttggccactaaatcttatgagacttgaaccaagtggcttcctctttctaggcttaggacgggttggggttagaaagggtgatcactgaaggccttgcctgctctgacattctgtgacattaaatgtctattctcctgttacctgtggcctgggacaccagtggggtttatcgaggggaccagaggggcctcaggctttcagatgaaatggctcctcctactcacccactttattcctctccatgtaattcaggacaagctgcaacttcccccagcttaacacaatgcccatacctcatacgatatgcgccctcccgttccatccctggccccctcaaacgagacttctcacaaggctgattacagatggtcaaacctggcttccaaggacagaattgcctctcggaagccagctgtggatctgagtccagagttggccacttgtgtgggtcctcacaagcaaagagagcactaaacttgacattgggggtccaccactccaactttgctttctgaaggttttggtgtacattgagccccagaaggaaaggagagtatctgtgagtgggggcctcccttgaccccagtacgaagtctatgccctgaatccccagagtagcccttcctggtgcccaactggcctggggacaaacagcgtccactacatctaggactgccggctaagtggacacacttcttgacctcctaccaggaactttggtaaaagctagctttggggaaggggttgggtgtaaatatgagagggtggagggagaccagctggtagcaataaacatgggtagaactaaa

SEQ ID NO: 200850 - DNA, 1143 bp, Artificial Sequence
  derived and/or modified sequence
atgctccggaggaaacccagtaatgcctccgaaaaagaaccaacacagaaaaagaaactgagcctccaaaggtcttcctcatttaaggattttgctaaatcaaagccctccagccctgtcgtgtctgagaaagaatttaacctcgacgataacattccagaagacgatagcggcgtaccgacccctgaagatgctgggaaaagcggcaaaaaactggggaagaagtggagggcggttatcagcagaacaatgaatagaaagatgggcaaaatgatggtcaaggccctgagcgaggagatggccgacactctcgaggaagggtcggccagcccaacaagccccgactatagtttggactcaccagggcctgagaaaatggccctggccttcagtgagcaagaagagcacgagctcccagtattgtccaggcaggcatctaccggctccgaactgtgttctccttcacctggaagtgggtcttttggcgaggagccccctgctccccagtacacagggccattttgtggtagggctcgcgttcacactgattttactccaagcccctatgatcatgatagcctgaaactccagaaaggcgacgtaatccagatcatagaaaagccgcctgtcggcacctggctcgggctcttgaatgggaaggtgggttccttcaaattcatctacgtggacgttctgccggaggaagcggtgggccacgcccgacccagtcgaaggcagtctaagggcaagcggcctaagcctaagaccctgcatgagttactcgagaggattggcctggaggagcacacgtctactcttcttctcaacggataccagacgctagaggatttcaaggagcttcgagagactcacttaaacgagctgaatatcatggatcctcagcaccgcgccaaactactaactgctgccgagctactgttagactacgacacaggctcagaggaggccgaggagggggctgaaagcagccaggagccggttgcccacaccgtctccgaaccaaaagtggacattccgagggactccggctgctttgaagggtcagaaagcggacgcgacgacgctgagctggctggcacggaagaacagctgcagggtctgtccctggccggagcaccatag

SEQ ID NO: 200851 - DNA, 1143 bp, Artificial Sequence
  derived and/or modified sequence
atgctgcggaggaagcccagcaatgccagcgagaaggagcccacccagaagaagaagctgagcctgcagaggagcagcagcttcaaggactttgccaagagcaagcccagcagccctgtggtgtctgagaaggagttcaacctggatgacaacatcccagaagatgattctggagtgcccaccccagaagatgctgggaagagcggcaagaagctgggcaagaagtggagggctgtgatcagcaggaccatgaacaggaagatgggcaagatgatggtgaaggccctgtctgaggagatggctgacaccctggaggagggcagcgccagccccaccagcccagactacagcctggacagccctggccctgagaagatggccctggccttcagcgagcaggaggagcacgagctgcctgtgctgagccggcaggccagcactggaagtgagctgtgcagccccagccctggcagcggcagctttggagaggagcccccagccccccagtacacaggccccttctgtggccgggcccgggtgcacacagacttcacccccagcccctatgaccatgacagcctgaagctgcagaagggagatgtgatccagatcatcgagaagccccctgtgggcacctggctgggcctgctgaatggcaaggtgggcagcttcaagttcatctacgtggatgtgctgcctgaggaggccgtgggccacgcccggcccagccggcggcagagcaagggcaagaggcccaagcccaagaccctgcacgagctgctggagcgcatcggcctggaggagcacaccagcaccctgctgctgaatggctaccagaccctggaggacttcaaggagctgcgggagacccacctgaatgagctgaacatcatggacccccagcaccgggccaagctgctgacagctgctgagctgctgctggactatgacaccggcagcgaggaggccgaggagggcgctgagagcagccaggagcctgtggcccacacagtgtctgagcccaaggtggacatcccccgggacagcggctgctttgagggcagcgagagcggcagagatgatgctgagctggccggcacagaggagcagctgcagggcctgagcctggccggggccccctag

SEQ ID NO: 200852 - DNA, 1143 bp, Artificial Sequence
  derived and/or modified sequence
atgctgcggcggaagcccagcaacgccagcgagaaggagcccacccaaaaaaaaaaactctcccttcaacgatcaagctcgttcaaggattttgcgaaatccaaaccctcaagtcctgtggtttctgaaaaggagtttaaccttgacgacaatattccagaggatgattcaggcgtacctacccccgaagacgccggcaaatcggggaagaagctgggcaagaaatggcgggccgtgatttcaaggaccatgaataggaaaatgggtaaaatgatggtgaaagcattatctgaggagatggcagataccctggaagaggggtcagcgagtccaacaagtcccgactactctctcgacagtcctgggcccgagaaaatggccttagccttctccgagcaggaggaacacgaactgcccgtgctgagtaggcaggccagcaccggctccgaactttgcagcccatcccccggtagcggttcctttggagaggaaccccctgctcctcagtataccgggccattttgtggcagggccagagttcacactgattttacgcccagcccgtacgatcatgactctctgaaattgcagaaaggggacgtaatacagatcatagaaaagccgcccgttggcacctggctcgggctgctgaacggcaaagttgggagctttaagttcatttatgtcgacgtgctccccgaagaggcggtggggcatgctcgcccctcccggaggcaatcaaaggggaagcgcccaaagcccaagactctgcacgaattgctggaacgtatcgggctggaggaacatacttccactttactgctcaatggctaccagactctggaagatttcaaagagctgcgggagactcacctgaatgaattaaatatcatggatcctcagcacagggcgaaactactgactgctgctgagctgctgctggactacgatacaggctcagaggaagcggaagagggggccgaatcctctcaggaacccgtcgcccacacagtgtccgagccaaaggtcgacatccctcgggatagtggatgttttgagggcagcgagtctggccgcgatgacgccgagctggccggtaccgaggagcagcttcagggtttaagcctggcaggcgccccctag

SEQ ID NO: 200853 - DNA, 1143 bp, Artificial Sequence
  derived and/or modified sequence
atgctccgccgtaaaccctccaatgcttctgaaaaagaaccaacccagaaaaagaagctgtctctgcagcgctctagctcctttaaggattttgctaagtcaaaaccatctagccccgttgtgtcagagaaggaattcaatcttgacgacaacattccggaggacgacagtggagtgcccactccagaggatgcaggtaagtctggtaaaaagctagggaagaaatggagggcggtcatcagcaggactatgaaccggaagatggggaagatgatggtgaaagcccttagcgaggaaatggccgatacactcgaagaaggtagtgcttctccaacatctcctgactacagcctggatagcccagggccagaaaaaatggctctcgcttttagcgagcaagaagaacatgaactgcccgtgctgtcccgacaagcgtcaaccggaagcgaactgtgtagccccagccccggtagtggaagcttcggggaagagcccccagccccacagtacaccggacctttctgcggtcgggcaagagtgcacacagattttacaccgtcaccctacgaccacgattctctgaaactccagaagggcgatgttatccagattattgaaaaacccccagtgggtacctggctcgggctgctgaacggtaaggtggggagttttaagttcatctatgtggatgtgctgccagaagaggccgtcggccatgctaggccctcccgccgacagtccaaagggaaaaggccaaaaccaaagacccttcacgaacttttggagcggatcggcctggaggaacatacctctaccctgctgctgaatgggtaccagacactggaagacttcaaagagctccgggaaactcacctcaacgagctgaacatcatggacccgcaacacagagccaagctactgacggcggctgagctgttactggactatgataccggttctgaggaggccgaggagggcgcagaatcttcccaagaacccgtggctcacaccgtgtcagagcctaaagtggacataccaagagacagtgggtgctttgaaggatccgagagcgggagagacgatgccgagctggctggcactgaggaacaactgcagggactttccctggccggagctccctag

SEQ ID NO: 200854 - protein, 1211 aa, Artificial Sequence
  derived and/or modified sequence
MLSLAAKLVAFFWRTADTPREEAGQLEPELAEGDTKLKTVRGVVTRYCSDYGMIDDMIYFSSDAVTSRVLLNVGQEVIAVVEENKVSNGLKAIRVEAVSDKWEDDSRNHGSPSDCGPRVLIGCVTSLVEGAGCISQTTYFSLESVCEGFEPCKGDWVEAEYRIRPGTWSSEATSVKPLRYKRVDKVCISSLCGRNGVLEESIFFTLDSLKLPDGYTPRRGDVVNAVVVESSQSCYVWRALCMTLVKRRDAAPVHEATHFYGTILLKNKGDIEVTQVTHFGTLKEGRSKTMVIWIENKGDIPQNLVSCKLAGWDKSKQFRFQMLDKDQMCPVVSFVSVPEKENSSDENINSLNSHTKNKTSQMSESSLVNNRGISPGDCTCKGENGEKDNILSRKQMTEPEPGGLVPPGGKTFIVVICDGKNPGRCKELLLLCFSDFLIGRYLEVNVISGEESLIAAREPFSWKKLKSSQALTSAKTTVVVTAQKRNSRRQLPSFLPQYPIPDRLRKCVEQKIDILTFQPLLAELLNMSNYKEKFSTLLWLEEIYAEMELKEYNMSGIILRRNGDLLVLEVPGLAEGRPSLYAGDKLILKTQEYNGHAIEYISYVTEIHEEDVTLKINPEFEQAYNFEPMDVEFTYNRTTSRRCHFALEHVIHLGVKVLFPEEIILQSPQVTGNWNHAQDTKSSGQSTSKKNRKTMTDQAEHGTEERRVGDKDLPVLAPFTAEMSDWVDEIQTPKARKMEFFNPVLNENQKLAVKRILSGDCRPLPYILFGPPGTGKTVTIIEAVLQVHFALPDSRILVCAPSNSAADLVCLRLHESKVLQPATMVRVNATCRFEEIVIDAVKPYCRDGEDIWKASRFRIIITTCSSSGLFYQIGVRVGHFTHVFVDEAGQASEPECLIPLGLMSDISGQIVLAGDPMQLGPVIKSRLAMAYGLNVSFLERLMSRPAYQRDENAFGACGAHNPLLVTKLVKNYRSHEALLMLPSRLFYHRELEVCADPTVVTSLLGWEKLPKKGFPLIFHGVRGSEAREGKSPSWFNPAEAVQVLRYCCLLAHSISSQVSASDIGVITPYRKQVEKIRILLRNVDLMDIKVGSVEEFQGQEYLVIIISTVRSNEDRFEDDRYFLGFLSNSKRFNVAITRPKALLIVLGNPHVLVRDPCFGALLEYSITNGVYMGCDLPPALQSLQNCGEGVADPSYPVVPESTGPEKHQEPS

SEQ ID NO: 200855 - protein, 338 aa, Artificial Sequence
  derived and/or modified sequence
MFRVGHFTHVFVDEAGQASEPECLIPLGLMSDISGQIVLAGDPMQLGPVIKSRLAMAYGLNVSFLERLMSRPAYQRDENAFGACGAHNPLLVTKLVKNYRSHEALLMLPSRLFYHRELEVCADPTVVTSLLGWEKLPKKGFPLIFHGVRGSEAREGKSPSWFNPAEAVQVLRYCCLLAHSISSQVSASDIGVITPYRKQVEKIRILLRNVDLMDIKVGSVEEFQGQEYLVIIISTVRSNEDRFEDDRYFLGFLSNSKRFNVAITRPKALLIVLGNPHVLVRDPCFGALLEYSITNGVYMGCDLPPALQSLQNCGEGVADPSYPVVPESTGPEKHQEPS

SEQ ID NO: 200856 - DNA, 3636 bp, Artificial Sequence
  derived and/or modified sequence
atgctcagcctcgccgctaaactggtggctttcttttggcggacggcggacacaccccgcgaggaggccggccagcttgagccagaattggccgaaggcgatactaagcttaagacagtgaggggcgtggtgactcgatactgttccgattacggaatgatcgatgatatgatctacttctcgagcgacgccgtgacatcccgtgtgttgctgaacgtggggcaggaagtcatcgcggtggtcgaagaaaataaggtttctaatgggctaaaggccatcagggtggaagctgtaagcgataaatgggaggatgacagccgcaaccatggttccccaagtgattgcggtccccgggttctgatcgggtgtgtcaccagcctcgtcgagggtgccggatgcattagccagacgacttacttttccctggaatcagtctgtgaaggatttgagccatgcaagggagattgggtcgaagccgagtaccgaatccggccaggcacatggtcaagtgaggccacttcagtgaagcctctgcgatacaagagggtggacaaagtgtgtatcagctcactgtgtggaaggaacggagtgcttgaggaaagtatcttctttacattagacagcctgaaactccccgacggatatacacccagaaggggggatgttgttaacgccgtcgtggttgaatcctcgcagagttgttatgtttggcgtgccctctgtatgacacttgtcaagagacgggatgcagctcctgtccacgaggcaacgcacttctatgggaccatcttgctgaagaataaaggggatatcgaggtgacacaggtaactcacttcggcaccctcaaggagggccgttcgaagaccatggtgatttggattgagaataagggagatattccgcaaaatctggtgagttgtaaactggccgggtgggacaaatcgaagcagtttcgtttccagatgttagataaagaccaaatgtgccccgtggtgtcttttgtatcagtcccagagaaggagaatagttcagacgagaatatcaacagccttaattctcacaccaagaataaaacatcacaaatgagcgagtctagtctcgtcaataatcgagggatctcccccggcgactgcacatgcaaaggcgagaacggcgagaaggacaacattctctcaaggaaacaaatgacagaacccgagccaggcggccttgtccctcccggcggaaaaactttcattgtcgtgatttgcgacggcaaaaatcctggccgctgtaaggagctcctgttgttgtgttttagcgattttttgatcggcagatatcttgaggttaacgttataagcggggaagagtccttgatcgccgcacgcgaacccttcagttggaagaaactgaaatcctcccaggccctcacctcagccaaaacaacggtggtcgtgacggcccaaaagaggaactctcgcaggcagttgccttctttccttccacagtaccctatcccggatcgtttacgcaaatgcgtggagcaaaaaatagatatcctaacgtttcaaccattattggcagagctgctgaatatgtccaattacaaagagaaattctccaccctgttgtggctggaggaaatttatgctgagatggaactcaaagaatataacatgtccggcataatcctcagacgtaatggcgatctattagttctcgaggtgccaggtctggccgaggggcggcccagtctctatgcgggagacaagcttatcttgaagacccaggagtataatggccacgcaattgaatacatctcctatgtaaccgagatccacgaagaagacgtgacacttaagattaacccagagtttgaacaggcctacaatttcgagcctatggacgtggaatttacgtacaatagaaccacgtcccgccgatgccactttgcactggaacacgtgatccatctgggggtgaaggtgctattcccagaggagattattttgcagtccccacaggtaactggcaactggaaccacgcacaggacacgaaatcatctggccaatctactagcaaaaagaatcgaaaaacgatgaccgaccaggcggagcatggaacggaggagagacgagtgggcgacaaggaccttccggtcttggccccattcaccgctgagatgagcgattgggtagacgaaatacagacaccaaaggctaggaaaatggaattctttaaccctgtgctgaatgagaaccagaagttggccgtgaaaaggatcttaagcggtgactgcagaccgctcccatacatcctgtttggccctcctggtactggtaagacagtgacaattatcgaggctgtgctgcaggtgcatttcgcactacccgactctcgcattttggtgtgtgccccgtcaaacagcgcagctgacttagtgtgcctcaggctgcatgaaagcaaagtgctgcaacctgcgaccatggttcgcgtaaatgcaacttgccggttcgaggagattgtcattgacgcagttaagccttattgtagagatggggaagacatttggaaggcaagtagatttcgaatcatcatcaccacctgttcctcctcaggcctcttctaccagataggggtgcgggtgggtcatttcacccacgtgtttgtggatgaggcgggacaggcgtccgagcccgagtgtctgatcccactggggctgatgtccgatattagtggccagatcgtgctggctggagatccaatgcagctcggacctgtgattaaatcccggctggcaatggcctatggattgaatgtgagcttcttggagcggctgatgtcccgcccagcctaccagcgagatgagaacgcgttcggcgcctgcggtgctcacaaccctctgctcgtcaccaaactggtcaagaactatcgatcacatgaagccctcctcatgctgccgagccggttgttctatcatcgtgaactggaagtgtgcgccgatcccacggtggtgactagcctgttaggatgggaaaagttgcccaagaagggcttccccttaatctttcacggagtacgtggtagtgaagccagagagggcaagtctccttcctggtttaaccccgcggaggcagttcaggtgctccgttactgctgtttgctagcccacagtataagctcccaagtctcggcttccgacatcggggtcatcacgccgtataggaagcaggttgagaagatccggatactgcttcgcaatgtggacctgatggacatcaaggtgggttccgttgaggaatttcaagggcaggaatacttggtcattattatttccaccgtgagatccaacgaggacagatttgaggacgatcggtacttcctgggatttctctcaaatagtaagcgtttcaatgttgcgattacccgccccaaggcattattgatcgtactgggcaaccctcatgtactcgtgcgggacccatgttttggggcgctccttgaatacagcatcacaaatggggtgtacatgggctgcgatctacccccagcgctccagtccttgcagaactgcggcgaaggggtcgccgacccctcgtacccggtggtcccagagtccaccggccccgaaaagcaccaagagccctcatag

SEQ ID NO: 200857 - DNA, 3636 bp, Artificial Sequence
  derived and/or modified sequence
atgctctcgctcgccgcaaaactcgtggcattcttctggcggactgcagacactccccgggaggaggctggtcaactggagccagaactggctgaaggggacacaaaacttaagacagtgaggggagtggtcacccgttattgttccgattacggcatgatagatgacatgatttatttctcctccgacgctgtgacctcgagagtgctgctgaatgttggccaggaggtaatcgccgtcgtggaagaaaacaaggtctcaaacggcttaaaagcgattcgcgtggaggcggtaagcgacaagtgggaagatgactcacgaaaccatggctctccaagcgattgcggtcctcgggttctcataggatgcgtgacttctcttgtggagggagccgggtgcatctctcagacaacgtattttagcctcgaatctgtgtgtgaaggcttcgagccatgcaagggagattgggttgaagcggagtaccgtattcggcccggcacttggagtagcgaggctacgtcggtgaaaccactgcgctacaagagagttgacaaggtgtgcattagctccctttgtggcagaaatggagtgctcgaagagtctatcttttttactcttgattccctgaaactgcctgatggttacaccccacgtaggggcgatgtagtgaacgcagtggttgtggagtccagccaatcttgctatgtgtggagggccctgtgcatgacactggtcaagcgacgtgacgccgcaccagtgcatgaggccactcatttctacggtaccattttattgaagaacaaaggggatattgaggtgacgcaggtgactcatttcggaaccttaaaagaaggtagaagtaaaaccatggttatctggatcgagaataagggagatatccctcagaatttagttagttgtaagctggcaggctgggacaagtctaaacagtttagatttcagatgctggacaaggatcagatgtgccctgtcgtgtcgtttgtttctgtgcccgagaaggagaacagttcagatgaaaatataaattctctgaactcccacacaaagaataagacatcgcagatgagtgaatcctctctcgtaaacaatcggggaatttcgcccggtgactgtacgtgtaaaggtgagaatggggagaaagataacatactttccaggaagcagatgactgagcctgagccagggggcctagtcccccccggaggtaaaacttttatagttgtcatctgtgacggcaagaatccaggtcggtgtaaggaactattgttactgtgcttctcagactttctgatcggccggtacctggaggtaaatgtgatcagtggcgaggaatcactgattgctgcgagagaaccttttagctggaagaaacttaaaagctcccaggccctcacgagcgccaagactactgtggttgttactgcccagaaacggaactcccggaggcagctcccatccttcctgccacagtaccctatcccggaccggctacgaaagtgcgtggaacagaaaatcgacattctgactttccagccactgctcgccgagctgcttaatatgagtaattataaggaaaaattctctacactcttatggcttgaagagatctacgccgagatggaactgaaagagtataacatgagcgggatcattctccgccgaaacggtgatctgttagtgctcgaggtgcctggactggcagaaggaagaccttcattatatgctggggacaagctgatccttaaaactcaagaatataacgggcatgccattgaatatatttcttatgtcactgaaatccacgaagaggacgtgacactcaaaataaatccggaatttgaacaggcctacaactttgagcccatggatgtggaattcacttacaaccgcaccacgtctagaagatgtcacttcgcgctcgaacatgtgattcacctcggcgtcaaagtgctcttccctgaagaaatcattctgcaaagcccacaggtgacaggcaattggaatcacgctcaagacaccaaatcttccggccaaagtacttccaaaaagaaccgaaagacaatgactgaccaggcagaacatggaacagaggagcgacgggtcggcgataaggacctacctgtattagcccccttcactgccgaaatgtctgactgggtagacgaaatccagacccctaaagcacgaaagatggaattctttaatcctgtcctgaatgaaaaccaaaaactggcggtgaagcggattctgtcaggagactgtcggcctctgccatatatccttttcggaccacctgggacaggtaaaacagttaccattattgaggctgtgctacaggtgcattttgctttgccagattcacggatcctggtttgtgctccttccaactctgcagccgacttggtgtgcctgaggctccatgagagcaaagtcttacagccagccacgatggtccgagtcaacgccacttgtcggttcgaagaaattgtgatagatgcggtaaagccctactgtcgcgatggtgaagacatatggaaagcctcccgatttagaatcattatcaccacgtgctccagctccggactgttttatcaaattggagttcgcgtgggacactttactcatgtgtttgtcgacgaggctggacaggcgtctgaacccgagtgtctgatacccttagggctgatgtccgatatcagcgggcagattgtccttgccggcgaccctatgcagctgggccccgtgattaagagcaggcttgcgatggcatacggtctcaacgtttccttcctcgaaaggctcatgtcccggccagcttaccagcgggatgagaatgcctttggtgcatgtggagcccataacccactgttagtgacaaagctggttaaaaactaccgtagtcacgaggccctattgatgctgccaagtcggctgttttatcatagagaactggaggtttgtgccgatccaaccgttgtcacctctctgttgggctgggagaagctgccaaagaaagggtttcctctaatatttcacggggtgaggggcagcgaagctagggagggaaagtcaccgtcgtggttcaatccagcagaagccgtgcaggtcctccgttattgctgcttattagcccattcgattagttcacaggtctcagcctcagatatcggtgtaatcacaccctacaggaagcaagtggagaaaatccggatccttctgaggaacgtcgatttgatggatattaaagtgggctctgtcgaggaattccaaggccaagagtatctggtgataatcatctctacggtcaggagtaatgaagaccggttcgaggatgacagatatttcctggggtttttgagtaattccaagaggttcaatgtcgctatcacaagacccaaagcgctcttgattgtgttggggaaccctcatgtcctcgtgagagatccatgctttggtgcactactggaatattctattacaaatggcgtctacatgggctgcgaccttcccccagcactacaaagcttacagaattgcggagaaggggtggccgacccatcttaccctgtggtgcccgaatctactggccccgaaaaacaccaggagccaagctag

SEQ ID NO: 200858 - DNA, 3636 bp, Artificial Sequence
  derived and/or modified sequence
atgctgagcctggccgccaagctggtggccttcttctggaggacagctgacaccccccgggaggaggccggccagctggagcctgagctggccgagggggacaccaagctgaagacagtgcggggcgtggtgacccgctactgcagcgactatggcatgattgatgacatgatctacttcagcagtgatgctgtgaccagccgggtgctgctgaatgtgggccaggaggtgattgctgtggtggaggagaacaaggtgtccaatggcctgaaggccatccgggtggaggccgtgtctgacaagtgggaggatgacagcagaaatcatggcagccccagcgactgtggcccccgggtgctgattggctgtgtgaccagcctggtggagggcgccggctgcatcagccagaccacctacttcagcctggagagcgtgtgtgagggctttgagccctgcaagggggactgggtggaggccgagtaccgcatccggcccggcacctggagcagcgaggccacctctgtgaagcccctgcgctacaagagggtggacaaggtgtgcatcagcagcctgtgtggcagaaatggagtgctggaggagagcatcttcttcaccctggacagcctgaagctgcctgatggctacacccccaggagaggagatgtggtgaatgctgtggtggtggagagcagccagagctgctacgtgtggagggccctgtgcatgaccctggtgaagagaagagatgctgcccctgtgcatgaggccacccacttctacggcaccatcctgctgaagaacaagggggacatcgaggtgacccaggtgacccacttcggcaccctgaaggagggccgcagcaagaccatggtgatctggattgaaaataaaggagacatcccccagaacctggtgtcctgcaagctggccggctgggacaagagcaagcagttccgcttccagatgctggacaaggaccagatgtgccctgtggtgtcctttgtgtctgtgcctgagaaggagaacagcagtgatgagaacatcaacagcctgaacagccacaccaagaacaagaccagccagatgtctgagagcagcctggtgaacaacagaggcatcagccctggggactgcacctgcaagggagaaaatggagagaaggacaacatcctgagcaggaagcagatgacagagcctgagcccggcggcctggtgcccccaggcggcaagaccttcatcgtggtgatctgtgatggcaagaaccctggccgctgcaaggagctgctgctgctgtgcttcagtgacttcctgattggccgctacctggaggtgaatgtcatcagcggggaggagagcctgattgctgcccgggagcccttctcctggaagaagctgaagagcagccaggccctgaccagcgccaagaccaccgtggtggtgacagcccagaagaggaacagccggcggcagctgcccagcttcctgccccagtaccccatcccagaccggctgaggaaatgtgtggagcagaagattgacatcctgaccttccagcccctgctggccgagctgctgaacatgagcaactacaaggagaagttcagcaccctgctgtggctggaggagatctatgcagagatggagctgaaggagtacaacatgagcggcatcatcctgcggagaaatggagacctgctggtgctggaggtgcccggcctggccgagggccggcccagcctgtatgctggggacaagctgatcctgaagacccaggagtacaacggccacgccatcgagtacatctcctatgtgacagagatccacgaggaggatgtgaccctgaagatcaaccctgagtttgagcaggcctacaactttgagcccatggatgtggagttcacctacaacagaaccaccagccgccgctgccactttgccctggagcacgtgatccacctgggcgtgaaggtgctcttccctgaggagatcatcctgcagagcccccaggtgactggaaactggaaccacgcccaggacaccaagagcagcggccagagcaccagcaagaagaacaggaagaccatgacagaccaggccgagcacggcacagaggagcggcgggtgggggacaaggacctgcctgtgctggcccccttcaccgctgagatgtctgactgggtggatgagatccagacccccaaggccaggaagatggagttcttcaaccctgtgctgaatgaaaaccagaagctggccgtgaagaggatcctgagcggggactgccggcccctgccctacatcctgtttggacctcctggcaccgggaagacagtgaccatcattgaagctgtgctgcaggtgcactttgccctgcctgacagccgcatcctggtgtgtgcccccagcaacagcgctgctgacctggtgtgcctgcggctgcacgagagcaaggtgctgcagcctgccaccatggtgcgggtgaatgccacctgccgctttgaggagatcgtgattgatgctgtgaagccctactgcagagatggagaggacatctggaaggccagccgcttccgcatcatcatcaccacctgcagcagcagcggcctcttctaccagattggagtgcgggtgggccacttcacccacgtgtttgtggatgaggccggccaggccagcgagccagaatgtctcatccccctgggcctgatgtctgacatcagcggccagatcgtgctggccggggaccccatgcagctgggccctgtgatcaagagccggctggccatggcctacggcctgaatgtgtccttcctggagcggctgatgagcaggcctgcctaccagagagatgaaaatgccttcggggcctgtggggcccacaaccccctgctggtgaccaagctggtgaagaactaccgcagccatgaggccctgctgatgctgcccagccgcctcttctaccaccgggagctggaggtgtgtgccgaccccaccgtggtgaccagcctgctgggctgggagaagctgcccaagaagggcttccccctcatcttccatggagtgcggggcagcgaggcccgggagggcaagagccccagctggttcaacccagctgaggccgtgcaggtgctgcgctactgctgcctgctggcccacagcatcagcagccaggtgtctgccagtgacattggagtcatcaccccctacaggaagcaggtggagaagatccgcatcctgctgagaaatgtggacctgatggacatcaaggtgggctctgtggaggagttccagggccaggagtacctggtgatcatcatcagcacagtgcgcagcaatgaagatagatttgaagatgaccgctacttcctgggcttcctgagcaacagcaagcgcttcaacgtggccatcacccggcccaaggccctgctgattgtgctgggcaacccccacgtgctggtgcgggacccctgcttcggggccctgctggagtacagcatcaccaacggggtgtacatgggctgtgacctgcccccagccctgcagagcctgcagaactgtggggagggcgtggccgaccccagctaccctgtggtgcctgagagcacaggccctgagaagcaccaggagcccagctag

SEQ ID NO: 200859 - DNA, 3960 bp, Artificial Sequence
  derived and/or modified sequence
attggtggcgggcggcgggagcggcgcgggcgcgtgcgggcggcggcagcggcggtgacggcagcctaggccgggcgagggccatgctgagcctcgcagccaagctggtggccttcttctggaggacggcggacacccctagggaggaagccgggcagctggagcccgagctcgcggaaggtgacactaagctgaaaactgtacggggtgtcgtgacaaggtactgcagcgattatggcatgattgatgatatgatctacttctccagtgatgctgtgactagcagagtgcttctgaatgttggacaggaagtgattgcagttgtggaagaaaataaagtgtccaatggactgaaagcaatcagggtagaagctgtctctgataagtgggaagacgacagcagaaaccatgggagtccctcagactgcggcccccgagtgttgattggctgtgtgacttccctggtggagggcgcaggctgtatcagtcagaccacctacttctctctggagagtgtgtgcgaaggcttcgagccctgcaagggagactgggtggaggctgagtaccggatccggcctggcacgtggagcagcgaagccacctcagtgaagccactgagatacaagcgcgtggacaaggtctgcatctctagcctctgtggaaggaacggggtgttagaggaaagcatcttctttaccttggactccttgaaactgccagatgggtacacaccccggagaggtgacgtggtcaatgcagtggtggtggagagcagccagtcatgctatgtctggagggcactttgtatgaccctagtgaagaggcgagacgccgcccctgttcatgaggccactcatttctatggaacgattttgctgaagaacaaaggtgatattgaagttacacaggtgacgcattttggaaccctaaaggaaggaagaagtaaaaccatggtgatctggatagagaataaaggagacattcctcaaaacttagtcagctgtaaactggctggctgggataaatctaaacaattcagattccaaatgctggataaagaccagatgtgccccgtggtatcttttgtttctgttcctgagaaggagaattcatcagatgaaaatattaattcattaaatagccacacaaaaaacaaaacctctcagatgtcggagagcagtttggtgaacaacagaggaatctctccaggtgattgtacctgtaaaggagaaaatggagaaaaagacaacattctatcaaggaagcagatgacagagcctgagcctggggggcttgtccctccagggggaaaaaccttcattgtggtcatctgtgacggaaaaaatcctggccgctgcaaggagctccttttgctctgtttttccgatttcctaattgggcgataccttgaagtaaatgttatcagtggggaggagtcactaattgctgcgcgcgaaccattttcttggaaaaagcttaaaagttcacaagcgttaacatccgcaaaaactacagttgttgtgaccgcacagaaaaggaactcaagacgacaacttccaagttttcttccccaatatccaatcccagatagacttagaaaatgtgtggaacaaaaaattgacatcctgactttccagccattacttgcagagcttctgaacatgtcaaattacaaggagaagttttcgactttgctgtggcttgaggagatttatgcagaaatggaactgaaagagtataacatgagcgggatcatcttaagaaggaatggggatctgctggttctggaggtcccagggttggccgaagggaggccttctctctacgcaggtgataaactgattttaaaaactcaagagtacaatggacatgccatcgaatacatcagctacgtgactgagattcatgaagaagatgtaactcttaaaattaatccagaatttgaacaagcctataactttgaacctatggatgtggaatttacatataataggaccacaagcagacggtgtcactttgcacttgaacacgtcatccacttaggtgtaaaagtgttgtttccagaagaaattattttacagtctccacaagtgacgggaaattggaaccatgcacaagacaccaaaagcagtggacagtccaccagcaaaaagaataggaaaacaatgacggaccaagctgagcatggaacagaggagaggcgtgttggtgacaaggacctgccggtgctggcaccctttactgcagagatgagcgattgggtagatgaaattcagacccctaaagcaagaaagatggagtttttcaacccagtgctaaatgaaaatcagaagttagcagttaaaaggattctgagtggtgactgccgtcccctcccgtatattctctttggacctcctggtactggaaagacagtgacaataatagaggctgttttacaggtacactttgccttgccggacagtcggattttagtctgtgcgccctccaacagtgctgctgacctcgtgtgtctgcggctgcacgagagcaaggtgctacagccggccaccatggtccgggtgaacgccacctgcaggttcgaggagatagttattgacgccgtcaaaccgtattgcagagacggagaagacatctggaaagcctcacgcttccggataatcatcaccacatgcagcagctcagggctgttttaccaaataggagtgagagttgggcacttcactcacgtgtttgtggacgaggctgggcaggcaagtgagccggaatgcctcattcctctggggctgatgtcggacatcagtggccagatcgtgctggcaggagaccccatgcagctcggcccagtcattaagtccagactcgccatggcctatgggctgaacgtgtcctttttggaacggctgatgtctcgacccgcgtaccagagggacgaaaatgctttcggtgcttgtggcgcacataatcccctgttggtcacaaagctggtgaagaactaccggtcccacgaggccctgctgatgctgccctcacggctgttctaccacagggaactcgaggtctgtgcggaccccacagtggtgacctccttgctgggctgggagaagttgcctaagaaaggcttccctctcatcttccatggtgtgcggggcagcgaggcacgggagggaaaaagcccatcgtggttcaacccggccgaggccgtccaggtcctgcgctactgctgcctcctggcccacagcatctccagtcaggtgtctgccagcgacattggcgtcatcacgccctaccggaagcaggtggagaaaatcagaattcttttgcgtaatgttgatctgatggatataaaggttggatcagtagaggagtttcaaggacaagagtatctggtcatcatcatttcgaccgtacggtcaaatgaagatagatttgaagatgatcgatattttttgggtttcttgtccaactcaaaaagatttaatgttgcaatcaccagacccaaagctttgctgatagtgctgggaaacccccatgttctcgttcgagacccctgttttggtgctttgctggaatacagtattacaaacggtgtttacatgggatgcgatttacctcctgcactgcagtctctgcaaaactgtggcgagggggtggcagacccctcctacccagtggtgccagaatccacaggaccagagaagcatcaggagcccagctgatctgcagtggctgacagcagggaggccatgtgctcagcctggccacgttgccgttacagtctgctccgtggctcctgtggcctgcccttgtctcgcagccaggcagggtcgtgtgtgggtgtggggctgccaggttggacgcagctgctgctgccctgactttggcatatgccagcctgttcctgccacagggcagtcactgccgcctaccctgaaataaaccctcgagtgacccccagaa

SEQ ID NO: 200860 - DNA, 3086 bp, Artificial Sequence
  derived and/or modified sequence
ccatgctgagcctcgcagccaagctggtggccttcttctggaggacggcggacacccctagggaggaagccgggcagctggagcccgagctcgcggaaggtgacactaagctgaaaactgtacggggtgtcgtgacaaggtactgcagcgattatggcatgattgatgatatgatctacttctccagtgatgctgtgactagcagagtgcttctgaatgttggacaggaagtgattgcagttgtggaagaaaataaagtgtccaatggactgaaagcaatcagggtagaagctgtctctgataagtgggaagacgacagcagaaaccatgggagtccctcagactgcggcccccgagtgttgattggctgtgtgacttccctggtggagggcgcaggctgtatcagtcagaccacctacttctctctggagagtgtgtgcgaaggcttcgagccctgcaagggagactgggtggaggctgagtaccggatccggcctggcacgtggagcagcgaagccacctcagtgaagccactgagatacaagcgcgtggacaaggtctgcatctctagcctctgtggaaggaacggggtgttagaggaaagcatcttctttaccttggactccttgaaactgccagatgggtacacaccccggagaggtgacgtggtcaatgcagtggtggtggagagcagccagtcatgctatgtctggagggcactttgtatgaccctagtgaagaggcgagacgccgcccctgttcatgaggccactcatttctatggaacgattttgctgaagaacaaaggtgatattgaagttacacaggtgacgcattttggaaccctaaaggaaggaagaagtaaaaccatggtgatctggatagagaataaaggagacattcctcaaaacttagtcagctgtaaactggctggctgggataaatctaaacaattcagattccaaatgctggataaagaccagatgtgccccgtggtatcttttgtttctgttcctgagaaggagaattcatcagatgaaaatattaattcattaaatagccacacaaaaaacaaaacctctcagatgtcggagagcagtttggtgaacaacagaggaatctctccaggtgattgtacctgtaaaggagaaaatggagaaaaagacaacattctatcaaggaagcagatgacagagcctgagcctggggggcttgtccctccagggggaaaaaccttcattgtggtcatctgtgacggaaaaaatcctggccgctgcaaggagctccttttgctctgtttttccgatttcctaattgggcgataccttgaagtaaatgttatcagtggggaggagtcactaattgctgcgcgcgaaccattttcttggaaaaagcttaaaagttcacaagcgttaacatccgcaaaaactacagttgttgtgaccgcacagaaaaggaactcaagacgacaacttccaagttttcttccccaatatccaatcccagatagacttagaaaatgtgtggaacaaaaaattgacatcctgactttccagccattacttgcagagcttctgaacatgtcaaattacaaggagaagttttcgactttgctgtggcttgaggagatttatgcagaaatggaactgaaagagtataacatgagcgggatcatcttaagaaggaatggggatctgctggttctggaggtcccagggttggccgaagggaggccttctctctacgcaggtgataaactgattttaaaaactcaagagtacaatggacatgccatcgaatacatcagctacgtgactgagattcatgaagaagatgtaactcttaaaattaatccagaatttgaacaagcctataactttgaacctatggatgtggaatttacatataataggaccacaagcagacggtgtcactttgcacttgaacacgtcatccacttaggtgtaaaagtgttgtttccagaagaaattattttacagtctccacaagtgacgggaaattggaaccatgcacaagacaccaaaagcagtggacagtccaccagcaaaaagaataggaaaacaatgacggaccaagctgagcatggaacagaggagaggcgtgttggtgacaaggacctgccggtgctggcaccctttactgcagagatgagcgattgggtagatgaaattcagacccctaaagcaagaaagatggagtttttcaacccagtgctaaatgaaaatcagaagttagcagttaaaaggattctgagtggtgactgccgtcccctcccgtatattctctttggacctcctggtactggaaagacagtgacaataatagaggctgttttacaggtacactttgccttgccggacagtcggattttagtctgtgcgccctccaacagtgctgctgacctcgtgtgtctgcggctgcacgagagcaaggtgctacagccggccaccatggtccgggtgaacgccacctgcaggttcgaggagatagttattgacgccgtcaaaccgtattgcagagacggagaagacatctggaaagcctcacgcttccggataatcatcaccacatgcagcagctcagggctgttttaccaaataggagtgagagttgggcacttcactcacgtgtttgtggacgaggctgggcaggcaagtgagccggaatgcctcattcctctggggctgatgtcggacatcagtggccaggtcacaaagctggtgaagaactaccggtcccacgaggccctgctgatgctgccctcacggctgttctaccacagggaactcgaggtctgtgcggaccccacagtggtgacctccttgctgggctgggagaagttgcctaagaaaggcttccctctcatcttccatggtgtgcggggcagcgaggcacgggagggaaaaagcccatcgtggttcaacccggccgaggccgtccaggtcctgcgctactgctgcctcctggcccacagcatctccagtcaggtgtctgccagcgacattggcgtcatcacgccctaccggaagcaggtacgccctgcccaggcacgcctggttctgtga

SEQ ID NO: 200861 - DNA, 3889 bp, Artificial Sequence
  derived and/or modified sequence
atgacgtcactcccaccaggcacctcgccttgtcaggagctgccaggcagcggcggtgacggcagcctaggccgggcgagggccatgctgagcctcgcagccaagctggtggccttcttctggaggacggcggacacccctagggaggaagccgggcagctggagcccgagctcgcggaaggtgacactaagctgaaaactgtacggggtgtcgtgacaaggtactgcagcgattatggcatgattgatgatatgatctacttctccagtgatgctgtgactagcagagtgcttctgaatgttggacaggaagtgattgcagttgtggaagaaaataaagtgtccaatggactgaaagcaatcagggtagaagctgtctctgataagtgggaagacgacagcagaaaccatgggagtccctcagactgcggcccccgagtgttgattggctgtgtgacttccctggtggagggcgcaggctgtatcagtcagaccacctacttctctctggagagtgtgtgcgaaggcttcgagccctgcaagggagactgggtggaggctgagtaccggatccggcctggcacgtggagcagcgaagccacctcagtgaagccactgagatacaagcgcgtggacaaggtctgcatctctagcctctgtggaaggaacggggtgttagaggaaagcatcttctttaccttggactccttgaaactgccagatgggtacacaccccggagaggtgacgtggtcaatgcagtggtggtggagagcagccagtcatgctatgtctggagggcactttgtatgaccctagtgaagaggcgagacgccgcccctgttcatgaggccactcatttctatggaacgattttgctgaagaacaaaggtgatattgaagttacacaggtgacgcattttggaaccctaaaggaaggaagaagtaaaaccatggtgatctggatagagaataaaggagacattcctcaaaacttagtcagctgtaaactggctggctgggataaatctaaacaattcagattccaaatgctggataaagaccagatgtgccccgtggtatcttttgtttctgttcctgagaaggagaattcatcagatgaaaatattaattcattaaatagccacacaaaaaacaaaacctctcagatgtcggagagcagtttggtgaacaacagaggaatctctccaggtgattgtacctgtaaaggagaaaatggagaaaaagacaacattctatcaaggaagcagatgacagagcctgagcctggggggcttgtccctccagggggaaaaaccttcattgtggtcatctgtgacggaaaaaatcctggccgctgcaaggagctccttttgctctgtttttccgatttcctaattgggcgataccttgaagtaaatgttatcagtggggaggagtcactaattgctgcgcgcgaaccattttcttggaaaaagcttaaaagttcacaagcgttaacatccgcaaaaactacagttgttgtgaccgcacagaaaaggaactcaagacgacaacttccaagttttcttccccaatatccaatcccagatagacttagaaaatgtgtggaacaaaaaattgacatcctgactttccagccattacttgcagagcttctgaacatgtcaaattacaaggagaagttttcgactttgctgtggcttgaggagatttatgcagaaatggaactgaaagagtataacatgagcgggatcatcttaagaaggaatggggatctgctggttctggaggtcccagggttggccgaagggaggccttctctctacgcaggtgataaactgattttaaaaactcaagagtacaatggacatgccatcgaatacatcagctacgtgactgagattcatgaagaagatgtaactcttaaaattaatccagaatttgaacaagcctataactttgaacctatggatgtggaatttacatataataggaccacaagcagacggtgtcactttgcacttgaacacgtcatccacttaggtgtaaaagtgttgtttccagaagaaattattttacagtctccacaagtgacgggaaattggaaccatgcacaagacaccaaaagcagtggacagtccaccagcaaaaagaataggaaaacaatgacggaccaagctgagcatggaacagaggagaggcgtgttggtgacaaggacctgccggtgctggcaccctttactgcagagatgagcgattgggtagatgaaattcagacccctaaagcaagaaagatggagtttttcaacccagtgctaaatgaaaatcagaagttagcagttaaaaggattctgagtggtgactgccgtcccctcccgtatattctctttggacctcctggtactggaaagacagtgacaataatagaggctgttttacaggtacactttgccttgccggacagtcggattttagtctgtgcgccctccaacagtgctgctgacctcgtgtgtctgcggctgcacgagagcaaggtgctacagccggccaccatggtccgggtgaacgccacctgcaggttcgaggagatagttattgacgccgtcaaaccgtattgcagagacggagaagacatctggaaagcctcacgcttccggataatcatcaccacatgcagcagctcagggctgttttaccaaataggagtgagagttgggcacttcactcacgtgtttgtggacgaggctgggcaggcaagtgagccggaatgcctcattcctctggggctgatgtcggacatcagtggccagatcgtgctggcaggagaccccatgcagctcggcccagtcattaagtccagactcgccatggcctatgggctgaacgtgtcctttttggaacggctgatgtctcgacccgcgtaccagagggacgaaaatgctttcggtgcttgtggcgcacataatcccctgttggtcacaaagctggtgaagaactaccggtcccacgaggccctgctgatgctgccctcacggctgttctaccacagggaactcgaggtctgtgcggaccccacagtggtgacctccttgctgggctgggagaagttgcctaagaaaggcttccctctcatcttccatggtgtgcggggcagcgaggcacgggagggaaaaagcccatcgtggttcaacccggccgaggccgtccaggtcctgcgctactgctgcctcctggcccacagcatctccagtcaggtgtctgccagcgacattggcgtcatcacgccctaccggaagcaggtggagaaaatcagaattcttttgcgtaatgttgatctgatggatataaaggttggatcagtagaggagtttcaaggacaagagtatctggtcatcatcatttcgaccgtacggtcaaatgaagatagatttgaagatgatcgatattttttgggtttcttgtccaactcaaaaagatttaatgttgcaatcaccagacccaaagctttgctgatagtgctgggaaacccccatgttctcgttcgagacccctgttttggtgctttgctggaatacagtattacaaacggtgtttacatgggatgcgatttacctcctgcactgcagtctctgcaaaactgtggcgagggggtggcagacccctcctacccagtggtgccagaatccacaggaccagagaagcatcaggagcccagctgatctgcagtggctgacagcagggaggccatgtgctcagcctggccacgttgccgttacagtctgctccgtggctcctgtggcctgcccttgtctcgcagccaggcagggtcgtgtgtgggtgtggggctgccaggttggacgcagctgctgctgccctgactttggcata

SEQ ID NO: 200862 - DNA, 3636 bp, Artificial Sequence
  derived and/or modified sequence
atgctgagcctggccgccaagctggtggccttcttctggcggaccgccgacacacccagggaagaggctggccagctggaacccgagctggccgagggagatacgaagctgaagaccgtcagaggtgtggtgacccggtactgctccgactacggaatgattgacgacatgatttactttagctctgacgccgtcacctctagagtgctgctcaatgtgggtcaagaggtcatcgctgtggtggaagaaaataaagtgtccaatggcctaaaggccatcagggtggaagctgtgagtgacaagtgggaggatgactcccgcaaccatgggagtccatctgactgcggccccagagtcttaatcggctgtgtgacatcactggtggaaggcgctgggtgtatctctcaaaccacttacttttcactggaatctgtgtgcgaaggtttcgagccttgcaaaggcgactgggtggaggcagagtaccgcatccgccccggaacatggtcaagcgaggcgacaagtgtaaagcctcttcggtacaagagggttgataaggtgtgcatatctagcctctgtggtcgaaacggagtcctggaagagagcatattctttacgctcgacagtttgaagctgcctgacggttacactccgagaaggggcgacgtggtaaacgcggtggtcgtcgaatccagccagtcatgttacgtgtggcgggcgttatgcatgacgctcgtgaaacgccgggacgcggccccagtccacgaggccacccacttttacggcactattctgctgaaaaacaaaggagatatcgaggtgacacaggttacccacttcggcacactgaaagaggggcgcagcaaaaccatggtgatatggatcgagaataagggggatatacctcagaacctggtgtcttgtaaactggccggctgggacaagtccaagcagttccgcttccagatgctagataaggaccagatgtgtcccgtggtgtcctttgtctctgtgccagaaaaggagaacagctcggatgaaaatatcaattccttgaactcccacacaaagaataaaacttcccagatgagcgagagctcactagtcaacaatcgaggaatctcaccaggcgactgcacgtgcaaaggggaaaatggcgagaaggataacatcctgagccggaaacaaatgaccgagcccgaacccggagggctagtcccccctgggggtaagacatttatagtagtgatttgtgacgggaagaatccgggccgttgcaaagaacttctgctgctgtgtttcagtgacttcctgattggtaggtacctcgaagtcaatgtgatttccggcgaagaaagcctgatcgcagccagggaacccttctcttggaagaagctcaagtcttcacaagctttgacctcagctaagaccacagtagtggtgaccgcacagaaacgaaattcaagaaggcaactccctagcttcctgccgcagtacccaattcctgacaggctgcggaaatgcgtcgaacagaagattgacatcctgacgttccagccactgctcgctgaattgctaaatatgtcaaactacaaggagaaatttagcaccctgctgtggcttgaagagatttacgccgaaatggagctaaaagagtataacatgtctggaattatcttgagaaggaatggcgaccttctcgtgctggaagtccctggcctggctgagggtaggccctccctatatgctggagataagctgattctcaaaactcaggaatacaacggtcatgccatcgagtacatctcatacgtgacagaaattcacgaggaagatgtgaccctcaagattaacccagaattcgagcaagcatacaatttcgagcctatggacgtggaatttacttacaatagaacaaccagtaggcgatgccactttgccctggaacacgtgatccatctcggcgtcaaagtcttgtttcctgaagagattatcttacaatcaccccaagtgaccggcaattggaatcatgctcaggacacaaagtcaagtggtcagtccaccagcaagaaaaatagaaaaactatgacagatcaagcagagcacggcactgaggaaagaagggtgggcgacaaggaccttcctgtgctcgcccctttcaccgcagaaatgtccgactgggtggacgagatacagacgcccaaagcccggaaaatggaattcttcaatcctgtcttgaatgagaaccaaaaactagctgtgaagaggatcctctccggcgactgccggccgttaccctacatcctatttggaccgcctgggacaggtaagacagttaccattatcgaggccgtgcttcaggtgcactttgctctgcctgactcgagaatattagtgtgtgcccctagcaactcagctgctgatttagtttgtctccgcctgcatgagagcaaggtgctccagccagcgacgatggttagagtaaacgccacatgtagattcgaggagatcgttattgatgccgtcaaaccatactgcagggatggagaggatatctggaaggcttccaggtttaggatcattatcaccacttgttcgtcctctggcctgttctatcaaatcggcgtcagagtcggccacttcacccatgtgtttgtcgacgaggcaggtcaggcctctgagcctgagtgcctgatccccctgggcttaatgagcgacatcagtggacagattgtgctggccggtgaccccatgcagctggggcccgtgatcaagtcccggctggccatggcttatggccttaatgtgagctttctggagagactcatgtctaggcccgcctatcagcgggacgagaatgccttcggggcctgtggcgctcacaatcccctgctggtcactaaactggtgaagaactacagatcacatgaagctctgcttatgctgccgagcagactgttctaccaccgcgaactggaagtgtgcgccgatcctaccgtggtcacttccctcctgggatgggagaagctgcccaagaaagggttcccactgatcttccacggcgtcagagggtcagaagcgagggagggaaaatcaccctcatggtttaatcctgccgaggctgtccaagtgctgcgctattgttgcttgctcgcacacagcatcagctctcaggtaagtgccagcgatatcggagtgattactccatacagaaaacaagttgaaaagattcggattctgcttagaaatgtggatctcatggacataaaagtgggaagcgtcgaagaattccagggccaggagtatctcgtgattattatctccaccgtgcggtctaatgaggacaggtttgaggacgacagatacttcctgggcttcctttccaactccaaaagattcaacgtggccatcacacggcccaaagccctcttaatagtgctcggaaatccacacgtgctcgttcgagacccctgtttcggggccttgctcgaatatagcataacaaatggtgtttatatgggctgtgatctgcctcccgccctgcaatccttgcaaaattgcggcgagggcgtagctgacccttcctatccagttgtgcctgaatccacggggcctgagaaacaccaagagcccagctag

SEQ ID NO: 200863 - DNA, 3636 bp, Artificial Sequence
  derived and/or modified sequence
atgctgagcctggccgccaagctggtggccttcttctggcggaccgccgatacaccaagagaagaggccggccagcttgaacctgagctggctgaaggcgatactaaactaaaaacagtgcggggtgtggtgacaaggtactgctccgattacggcatgattgacgacatgatatacttttcctctgacgccgtcacgtcccgggtgttgctgaacgtaggacaagaggttatagcggtcgtcgaagagaacaaggtctcaaatggcttaaaggcgattcgggttgaggcagtttcagacaagtgggaggatgattctcgtaatcatggttcaccctccgactgtggtccgcgggtgctgattggctgcgtcacctccctagtggagggagcggggtgcattagccagaccacgtacttttcactggagagtgtatgcgaggggtttgagccatgcaaaggggactgggttgaagctgagtaccgtatccgtccgggaacgtggagtagtgaagctacttccgtcaaacctctgcgttataagcgggtcgacaaggtgtgcatatcttcgctgtgcgggaggaatggggtgctagaagagagtatattttttaccctggattccctcaagctgccggatgggtacacaccaagacggggagatgtggtgaatgcagtggtggtggaatcctcccagtcctgttatgtgtggcgcgccctgtgcatgaccctcgtgaagaggagagacgccgcaccagtgcacgaggccacacacttctacggcactatactgctcaagaacaagggcgacattgaggtgacacaggtgacccacttcggtaccctgaaagagggaaggagcaagaccatggtcatttggatagagaacaagggagacattccacagaacctggtgagctgtaagcttgctggctgggataagtccaaacagttcagatttcaaatgctcgacaaagatcaaatgtgtccggtagtctcctttgtctccgtacctgagaaggagaacagtagtgatgaaaatattaatagcctgaactctcataccaaaaataagacaagccagatgagtgaatcaagcctggtgaacaacaggggaatctcccctggagactgtacctgcaagggagaaaatggggaaaaagacaacatcttgtctagaaagcaaatgacggaacccgaaccaggcggtctggtacctccaggaggcaagacctttattgttgtgatatgtgatgggaaaaatcctggccgttgcaaagaactgttacttctgtgttttagcgatttcctgattgggcgatacctggaggtcaacgtgattagcggcgaggaatctttaattgccgcgagggagcctttcagctggaaaaagctgaaatcatcacaggcattgacttccgccaagaccaccgttgttgtgaccgcacaaaaaaggaactctagaaggcagttaccttcattcctgccgcagtatccaatccctgaccggctgcggaaatgcgtagaacagaaaatagacatcctcacgtttcagccgctccttgccgagttgctcaacatgtccaactacaaagaaaagttcagcactctgctatggctcgaggagatttatgctgagatggaattaaaggaatataatatgagcggaattattttgcggcgaaacggcgatttgctggtgctggaggttcccgggctggccgagggacgcccttcgctgtatgccggtgacaagctaattctgaagacacaggaatataacggacatgccatagagtacattagttacgtgacagaaatccatgaggaggacgttactctgaaaattaatccggaatttgagcaggcttacaattttgaaccaatggatgtcgagttcacctacaacaggacgacctccaggagatgccacttcgcgctcgaacacgtgatccatctgggtgtgaaagtgctcttcccagaggaaattattctgcaaagtcctcaggtcactggcaactggaaccatgcacaagacaccaagtctagtggtcaatcaaccagcaagaagaaccggaaaacaatgaccgaccaggcggaacacgggacagaagagcgccgggtaggtgataaagatctcccagtcctggccccctttaccgcagaaatgagtgattgggtggacgagattcagaccccgaaagcacgtaaaatggaattcttcaatccggtgctcaatgagaatcagaagctcgctgtcaagcgcattttgtctggagactgccgaccactgccatatattttatttggccctcccgggactggcaagaccgttaccataatcgaggctgtgttgcaggtgcatttcgccctgccagactcacgaatcctggtgtgtgccccatccaattccgccgcggacttagtgtgcctcagactccacgaatctaaagtgttgcaaccagcaactatggtcagagtgaacgccacttgtcggtttgaagaaatcgtaattgatgccgtcaaaccctactgccgggacggggaggacatatggaaggcttctagatttcgcataatcatcacaacatgttctagtagcgggctgttctatcaaattggggttagggtcggccactttacccacgtcttcgtggacgaagccgggcaggccagcgagcctgagtgcctcattcccctggggctgatgtcagatatttccggccagattgtgctggcaggtgatcctatgcagctgggacccgtgatcaagtccaggctggctatggcatacggcctcaatgtgtcttttctagagaggctgatgtctcggcctgcatatcagcgggatgagaacgcctttggagcgtgcggcgcacacaaccctctattggtaaccaaactggttaagaattacaggtctcacgaagctctgttgatgttaccatctaggctgttctaccatcgagagctagaggtttgtgctgatcccacagttgtaacatccctcctaggatgggaaaaactgcccaagaagggattcccactcatcttccatggggtgaggggctccgaagcaagagaaggcaaaagtccatcctggttcaatccagccgaggccgtgcaggtgctgcgttactgttgcctcctcgcccactccatctcgtcccaggtgtctgcctctgacattggggtgattactccctaccgcaaacaggtagaaaaaattaggattctgctgcggaacgtggatctcatggacataaaagtgggatctgtcgaggaatttcaggggcaggagtaccttgttattataatatcaacagtcagaagcaatgaggaccggtttgaggatgaccgctatttccttggtttcctgagcaactccaagcggtttaatgtcgcaattacacgccccaaggcccttctgattgtcctcggcaatccccatgtgcttgttcgggatccatgttttggtgctttattggagtactctattacaaatggtgtatacatggggtgtgatctcccacctgctctccagtcattgcagaactgcggagagggtgttgcagacccatcctatcccgtggttcccgaaagtaccgggccagaaaagcaccaggaaccttcctag

SEQ ID NO: 200864 - DNA, 3636 bp, Artificial Sequence
  derived and/or modified sequence
atgctcagcctagccgcaaaacttgtggcttttttttggaggaccgcagatacccccagagaagaggccggacagctagagcctgaactggcggagggggatactaaactcaaaaccgtgcgaggagtagttacgaggtattgctctgactacggcatgatagacgacatgatttacttcagcagtgatgccgtgaccagcagggtgctccttaacgttgggcaagaagtcattgccgtggtcgaggaaaataaagtgtcaaatgggctgaaggccatccgtgtggaggccgtgagtgacaaatgggaggacgactccagaaatcacggatctcctagcgattgtggaccccgtgtgctcattggatgcgttacatcactggtcgagggcgctggctgcatcagccagaccacctacttcagtttggagtctgtctgtgaaggattcgaaccatgcaagggggactgggtcgaggccgagtatagaattaggcctggcacgtggagctctgaagcgacctccgtgaagccactgcggtacaaacgggtggacaaggtgtgtattagctccctttgtgggagaaacggtgttctcgaagagtccattttcttcacgctcgactcgttgaagttacctgatggttatactccacgccgtggggacgttgtgaacgccgtagtggtggagtcatctcaaagctgttacgtatggcgcgcactgtgcatgactctggtaaaacgtagggatgccgctcctgtccacgaggcaactcatttttacggaacaatccttctcaagaataagggggatatcgaggtgacccaggtcacacactttggtactctcaaggaagggcgttcaaaaaccatggtgatttggattgaaaataagggagacatcccacagaacctggtgagttgcaagttggccggatgggataaaagcaagcagttcaggtttcagatgttagataaagaccaaatgtgtccagtggtatcctttgtgtccgtccctgaaaaagaaaacagctccgatgagaatatcaattcattgaactctcacactaaaaataaaacctcccaaatgagtgagtctagcttggtgaacaaccggggaatcagcccaggagattgtacttgcaaaggagaaaatggcgaaaaagacaatattctttcaaggaaacagatgacagagccagagcctggcggtctggtgcccccaggcggaaagacatttatcgtcgtgatctgcgacggtaaaaacccaggtcgttgtaaggagctcctgctgctatgcttctcagacttcctgatcggccgataccttgaagttaacgtgatcagcggcgaggaatccttaattgcggctagagagcccttcagctggaagaagctgaagtcgtcacaggccttgaccagcgcgaaaaccactgtggtcgtgaccgctcagaaacgcaactccagaaggcagctccctagttttctgccccaatatcctatccccgataggctcagaaaatgtgttgagcagaagatagacatcctgacctttcaaccgttactggccgaattgttgaacatgtcgaactacaaggagaaattctcaaccctactgtggctggaagaaatctacgcagagatggaactcaaagagtacaacatgtctggaatcattttgcgtagaaacggtgatctactggtgttagaggtcccaggactggccgagggaaggccctcactgtacgccggagataagctaatcctgaaaacacaggagtacaacgggcatgctatcgaatatattagctatgtaaccgagatccacgaagaagatgtcacactgaaaatcaatcctgagtttgagcaggcctacaacttcgaacctatggatgtcgagttcacttataatcggaccacaagtcgccgatgtcattttgcccttgaacatgtcattcatcttggtgtgaaggtgcttttcccagaagaaattattttacagtccccacaggtcacagggaactggaaccacgcacaggatactaagagcagcggccaatccactagcaaaaaaaacaggaagacgatgacagaccaggctgagcacggcactgaggagcggagggtgggggataaagatttgcctgtcttggcgcctttcactgcagagatgtccgactgggtcgacgaaattcagactccaaaggcacgcaaaatggagttcttcaatcctgtgcttaacgagaatcagaagctggctgttaagcggatccttagcggtgattgcaggcctctcccctacatcctgttcggtccaccaggcacaggaaaaaccgtgactataatcgaagccgtgctgcaggttcacttcgcactgccagactcccgcatcctcgtctgcgccccaagcaacagcgccgctgacctcgtgtgcctaagactccacgagtctaaagtgttacagcccgctacaatggtccgggtcaatgcaacctgtcggtttgaggaaattgttatcgatgcagtcaaaccttattgccgagatggggaggatatatggaaggcctccagattccgcattattattactacctgcagctcctccggactattttaccagatcggcgtgagagtcggccattttactcacgtgttcgtcgacgaggcaggccaagcaagcgagccagagtgcctcatacctcttggtttgatgtcggatatctctgggcagattgttctagccggagaccctatgcagctcgggccagtgatcaaaagtagattggccatggcgtatggtctaaatgtgagtttccttgagcggctcatgtcccgtcccgcttaccagcgagatgaaaatgccttcggggcttgtggcgctcataacccactgttagtcacaaaactggtgaagaattaccgctcacacgaggcattgctcatgctaccgagtcggctcttttaccatagagaactcgaggtatgtgcagatccaacagtcgtaacctccctgcttggttgggaaaagttgcctaagaaaggcttcccactgatcttccacggtgtgagaggctcagaagctcgggagggcaaatccccctcctggtttaaccccgcagaagcagtacaggtgctacgctactgttgcctgctcgcccactctatctcttctcaggtttccgcttctgatatcggtgtgataaccccctaccggaaacaggtggaaaagatcagaatacttctgcgcaacgttgatctgatggatatcaaggttggctcggttgaggagtttcaagggcaggagtatcttgtcatcattatctcaacagttagatcaaacgaagatagattcgaagacgatagatacttcctgggctttctgtcgaatagcaagcgctttaatgtagcaatcacaagacctaaggcccttcttatcgtgctcgggaatccgcacgtcctggtgagagatccctgcttcggggcattgcttgaatacagcatcaccaatggcgtgtatatgggttgcgatctgcccccagcactacagagtctgcagaattgtggcgaaggagtcgctgatccctcttatccagttgtccctgaatcaaccggccctgaaaagcatcaggagccaagttag

SEQ ID NO: 200865 - DNA, 3636 bp, Artificial Sequence
  derived and/or modified sequence
atgctgtctctcgcggctaaactggtggcatttttctggagaacagctgatacccccagagaagaagcaggccagctagagcctgaactggctgagggagataccaagcttaagaccgtcagaggggtagttacccgatattgttccgattacggtatgattgatgatatgatctacttctcatccgatgccgtgaccagcagagttctgttgaacgtgggccaggaagtcattgctgtggtggaggaaaataaagtgagcaacgggctgaaagccatccgggtggaagctgtgtccgacaagtgggaggacgacagcaggaatcacggctccccatcagattgtggcccaagggttctcatcgggtgtgtcacttccctggtggagggcgctggatgcatttcccagacaacatacttttctctcgaaagtgtctgcgaagggtttgaaccctgcaaaggcgattgggtggaagctgagtatcggatacggccagggacgtggtctagcgaggcaacctcagtcaagccgttgagatacaagcgtgtcgacaaagtttgtatttcttctctgtgcggtaggaatggcgtgcttgaggagagcatatttttcacgcttgacagtctcaagctgccggatgggtatactccgaggagaggagatgtggtaaatgccgtggttgtcgagtccagccagagctgctacgtgtggagggccctgtgtatgactctggttaagcggagagacgctgccccagttcacgaggctacccacttttacgggacaatactgctaaagaacaagggcgatatcgaggtcactcaggttacacatttcggaacccttaaagagggccgttctaagacaatggtcatttggatcgaaaacaaaggtgatatcccacagaacctggtgtcctgcaagctggcaggatgggataaatccaagcaattcaggttccagatgctggataaggaccagatgtgcccggttgtgtcgttcgttagcgtgcccgagaaggaaaactcttcagacgagaatattaacagccttaacagtcacacaaaaaataagacttcccaaatgagcgagtcaagtctggttaataaccgaggcatttcccctggtgactgcacgtgcaagggcgagaacggtgaaaaggacaacattctcagccgtaaacagatgactgagccagagcccggaggactggtgcccccaggtggtaagacattcattgtggtaatctgcgacggaaagaatcccggaaggtgcaaggagctgctattattgtgtttttctgactttctgatcggcaggtatctggaagtgaatgtgatttccggcgaagagagccttatcgcggctcgagagccgttctcatggaagaagctgaagagctctcaagctttaacctccgctaaaactacagtagtcgtgactgcccagaagagaaatagccgacgccagttgccttccttcttgcctcaatatcccatccccgataggctccgcaagtgtgttgaacagaagatcgatatcctgacattccagcctcttcttgccgaactgctcaacatgagcaactataaagagaaatttagcacgctcctgtggctcgaagagatttacgcggaaatggagctaaaagaatataacatgtcaggcatcattctccgtagaaacggtgatctccttgttcttgaagtgcctgggttggcagaagggaggccatcattatacgcaggcgacaagcttattctgaagacccaggaatacaacggacatgccatcgagtacatctcttacgtgacagagatccatgaagaggatgttaccttgaagattaatccggagttcgaacaagcctacaactttgaaccgatggatgtggaatttacttacaatcgcacgacatctcggcgatgccacttcgcactcgaacatgtgatacacttgggggtcaaggtgttgttcccagaggagattattctccaaagtccgcaggtaaccggtaattggaaccacgcccaggatacaaagtctagtgggcaatccactagcaaaaaaaatagaaaaacaatgacagaccaggccgagcacggcaccgaggagcgccgagtgggcgataaagatctgccggtgttggccccttttacagccgagatgagtgattgggttgacgaaatccagacccccaaggcccgaaaaatggagttctttaatcccgtgctcaatgagaaccagaagctggccgtgaagaggatcctgtccggggactgccgccctctgccttacatcctgttcggccctcccggtacgggcaaaacagtaacaattatcgaggcggtgctgcaggtgcatttcgcccttcccgactcgcgtatcctggtttgcgccccttctaactccgccgcagacctcgtctgcttacggctgcatgaaagtaaagtcttacaaccggctacaatggtgagggttaacgctacatgccggtttgaagagatagtgattgacgccgtgaaaccttactgcagggacggcgaagacatctggaaggcttcccgattccggatcatcatcacgacatgcagttcttccggattattttaccagattggagtcagagtggggcacttcacccacgttttcgtggacgaggcgggacaggcaagcgaacctgagtgcctgatccccttggggctcatgtcagatatttctgggcagattgttctggccggagatcctatgcaacttggaccagttatcaagtctcgcctcgcaatggcatatgggctaaacgtctcctttttggaaaggctcatgtccaggcccgcataccagcgagacgaaaacgcgttcggtgcctgcggtgcacacaaccctctactggtaacaaaactggtcaagaattatagatcacacgaagctcttcttatgctcccttcccggctcttctatcacagggaactggaggtctgcgcagatcctaccgtggttacctccttgttaggatgggaaaagcttccaaagaaagggtttcctctgatctttcacggcgtgcggggatccgaggccagagaaggcaagtctccaagttggtttaaccccgctgaagcagtacaggttctccgatactgttgtcttctcgcgcactcaatatcttcacaggtctctgcaagtgatatcggcgtgatcaccccctacaggaaacaggtggagaaaatccggattctcctgcgcaatgttgacctaatggatatcaaggtaggctctgtcgaggagtttcagggccaggaatatcttgtaattattatttccacagttcgctctaatgaggatcgcttcgaggacgaccgctactttctaggttttctgagcaactccaagcgctttaacgtcgccattacacggccaaaggctctcctgattgttctgggaaatccccacgtcctcgtgcgagacccctgctttggagctctgcttgagtactctattacaaacggggtatatatgggctgcgacctaccgccagcactgcagtccctccaaaactgcggggaaggagtggctgacccctcttacccagtagtgcccgagtctacagggcctgagaagcaccaggaaccttcctag

SEQ ID NO: 200866 - DNA, 3636 bp, Artificial Sequence
  derived and/or modified sequence
atgctgagcctggccgccaagctggtggccttcttctggagaaccgccgacacccccagagaggaggccggccagctggagcccgagctggccgagggcgacaccaagctgaagaccgtgagaggcgtggtgaccagatactgcagcgactacggcatgatcgacgacatgatctacttcagcagcgacgccgtgaccagcagagtgctgctgaacgtgggccaggaggtgatcgccgtggtggaggagaacaaggtgagcaacggcctgaaggccatcagagtggaggccgtgagcgacaagtgggaggacgacagcagaaaccacggcagccccagcgactgcggccccagagtgctgatcggctgcgtgaccagcctggtggagggcgccggctgcatcagccagaccacctacttcagcctggagagcgtgtgcgagggcttcgagccctgcaagggcgactgggtggaggccgagtacagaatcagacccggcacctggagcagcgaggccaccagcgtgaagcccctgagatacaagagagtggacaaggtgtgcatcagcagcctgtgcggcagaaacggcgtgctggaggagagcatcttcttcaccctggacagcctgaagctgcccgacggctacacccccagaagaggcgacgtggtgaacgccgtggtggtggagagcagccagagctgctacgtgtggagagccctgtgcatgaccctggtgaagagaagagacgccgcccccgtgcacgaggccacccacttctacggcaccatcctgctgaagaacaagggcgacatcgaggtgacccaggtgacccacttcggcaccctgaaggagggcagaagcaagaccatggtgatctggatcgagaacaagggcgacatcccccagaacctggtgagctgcaagctggccggctgggacaagagcaagcagttcagattccagatgctggacaaggaccagatgtgccccgtggtgagcttcgtgagcgtgcccgagaaggagaacagcagcgacgagaacatcaacagcctgaacagccacaccaagaacaagaccagccagatgagcgagagcagcctggtgaacaacagaggcatcagccccggcgactgcacctgcaagggcgagaacggcgagaaggacaacatcctgagcagaaagcagatgaccgagcccgagcccggcggcctggtgccccccggcggcaagaccttcatcgtggtgatctgcgacggcaagaaccccggcagatgcaaggagctgctgctgctgtgcttcagcgacttcctgatcggcagatacctggaggtgaacgtgatcagcggcgaggagagcctgatcgccgccagagagcccttcagctggaagaagctgaagagcagccaggccctgaccagcgccaagaccaccgtggtggtgaccgcccagaagagaaacagcagaagacagctgcccagcttcctgccccagtaccccatccccgacagactgagaaagtgcgtggagcagaagatcgacatcctgaccttccagcccctgctggccgagctgctgaacatgagcaactacaaggagaagttcagcaccctgctgtggctggaggagatctacgccgagatggagctgaaggagtacaacatgagcggcatcatcctgagaagaaacggcgacctgctggtgctggaggtgcccggcctggccgagggcagacccagcctgtacgccggcgacaagctgatcctgaagacccaggagtacaacggccacgccatcgagtacatcagctacgtgaccgagatccacgaggaggacgtgaccctgaagatcaaccccgagttcgagcaggcctacaacttcgagcccatggacgtggagttcacctacaacagaaccaccagcagaagatgccacttcgccctggagcacgtgatccacctgggcgtgaaggtgctgttccccgaggagatcatcctgcagagcccccaggtgaccggcaactggaaccacgcccaggacaccaagagcagcggccagagcaccagcaagaagaacagaaagaccatgaccgaccaggccgagcacggcaccgaggagagaagagtgggcgacaaggacctgcccgtgctggcccccttcaccgccgagatgagcgactgggtggacgagatccagacccccaaggccagaaagatggagttcttcaaccccgtgctgaacgagaaccagaagctggccgtgaagagaatcctgagcggcgactgcagacccctgccctacatcctgttcggcccccccggcaccggcaagaccgtgaccatcatcgaggccgtgctgcaggtgcacttcgccctgcccgacagcagaatcctggtgtgcgcccccagcaacagcgccgccgacctggtgtgcctgagactgcacgagagcaaggtgctgcagcccgccaccatggtgagagtgaacgccacctgcagattcgaggagatcgtgatcgacgccgtgaagccctactgcagagacggcgaggacatctggaaggccagcagattcagaatcatcatcaccacctgcagcagcagcggcctgttctaccagatcggcgtgagagtgggccacttcacccacgtgttcgtggacgaggccggccaggccagcgagcccgagtgcctgatccccctgggcctgatgagcgacatcagcggccagatcgtgctggccggcgaccccatgcagctgggccccgtgatcaagagcagactggccatggcctacggcctgaacgtgagcttcctggagagactgatgagcagacccgcctaccagagagacgagaacgccttcggcgcctgcggcgcccacaaccccctgctggtgaccaagctggtgaagaactacagaagccacgaggccctgctgatgctgcccagcagactgttctaccacagagagctggaggtgtgcgccgaccccaccgtggtgaccagcctgctgggctgggagaagctgcccaagaagggcttccccctgatcttccacggcgtgagaggcagcgaggccagagagggcaagagccccagctggttcaaccccgccgaggccgtgcaggtgctgagatactgctgcctgctggcccacagcatcagcagccaggtgagcgccagcgacatcggcgtgatcaccccctacagaaagcaggtggagaagatcagaatcctgctgagaaacgtggacctgatggacatcaaggtgggcagcgtggaggagttccagggccaggagtacctggtgatcatcatcagcaccgtgagaagcaacgaggacagattcgaggacgacagatacttcctgggcttcctgagcaacagcaagagattcaacgtggccatcaccagacccaaggccctgctgatcgtgctgggcaacccccacgtgctggtgagagacccctgcttcggcgccctgctggagtacagcatcaccaacggcgtgtacatgggctgcgacctgccccccgccctgcagagcctgcagaactgcggcgagggcgtggccgaccccagctaccccgtggtgcccgagagcaccggccccgagaagcaccaggagcccagctag

SEQ ID NO: 200867 - protein, 356 aa, Artificial Sequence
  derived and/or modified sequence
MPEGEDFGPGKSWEVINSKPDERPRLSHCIAESWMNFSIFLQEMSLFKQQSPGKFCLLVCSVCTFFTILGSYIPGVILSYLLLLCAFLCPLFKCNDIGQKIYSKIKSVLLKLDFGIGEYINQKKRERSEADKEKSHKDDSELDFSALCPKISLTVAAKELSVSDTDVSEVSWTDNGTFNLSEGYTPQTDTSDDLDRPSEEVFSRDLSDFPSLENGMGTNDEDELSLGLPTELKRKKEQLDSGHRPSKETQSAAGLTLPLNSDQTFHLMSNLAGDVITAAVTAAIKDQLEGVQQALSQAAPIPEEDTDTEEGDDFELLDQSELDQIESELGLTQDQEAEAQQNKKSSGFLSNLLGGH

SEQ ID NO: 200868 - DNA, 3145 bp, Artificial Sequence
  derived and/or modified sequence
atccaatgaaggttactggctgagcggggacaccttctcacaggactggagagagaatgcggggcagctgggcagggctcacttccagccgcctgtcacagtactgggagtaagaggtgacctatttatttttagaagggggcagtgataataacccagctcctagcttcattcaagggaggcaggcgctttggaagtttgtaaacaccaactttctgagtaagggaggagcactttttttccaaaaaggaaagaacgtctctactgggtttttttcctcctgatattcagcattagagtagaaaagaaactattgtttggccacattagccgtggttagcaggtgctgcagcctttgccactgttattatttttaaagggcagaaatgcctgaaggtgaagactttggaccaggcaaaagctgggaagttatcaattccaaaccagatgaaagacccaggctcagccactgtattgcagaatcatggatgaatttcagcatatttcttcaagaaatgtctctttttaaacagcagagccctggcaagttttgtctcctggtctgtagtgtgtgcacattttttacgatcttgggaagttacattcctggggttatactcagctatctactgttactgtgtgcatttttgtgtccattgtttaaatgtaatgatattggacaaaaaatttacagcaaaattaagtcagttctgctgaaactggattttggaattggagaatatattaatcagaagaaacgtgagagatctgaagcagacaaagaaaaaagtcacaaagatgacagtgaattagacttttcagctctttgtcctaagattagcctcacggttgctgccaaagagttatctgtgtctgacacagacgtctcagaggtatcctggactgataatgggaccttcaacctttcagaaggatacactccacagacagacacttctgatgatcttgaccgacccagtgaggaagttttctctagagatctttcagattttccatctctagaaaatggcatgggaacaaatgatgaagatgaattaagccttggtttgcccactgagctcaagagaaagaaggaacagttggacagtggtcacagaccaagcaaagagacgcaatcagcagctggtctcacccttcctctgaacagtgaccaaacctttcacctgatgagcaacctggctggggatgttatcacagctgcagtgactgcagctatcaaagaccagttagagggtgtgcagcaagcactttctcaggctgcccccatcccagaagaggacacagacactgaagaaggtgatgactttgaactacttgaccagtcagagctggatcaaattgagagtgaattgggacttacacaagaccaggaagcagaagcacagcaaaataagaagtcttcaggtttcctttcaaatctgctgggaggccattaatctaggaatcagcttgcaacagagcacaaaaaacaccaaaaaaatttcaaacaagaaaaaaaaaaaaaaaaggaaaagaaaaaaattgaactgtaagctttaatgattactttagatttgttttattttccctcctgcagtgaattaattggatatatatcagctgacactgatagattgatatttctgatcgttatttttgtgtaataagcatggaaatgaactttatacacaccactgtgttgtcagagataaatattaggggttgtttttaaagcaaaaagaaaaaaacaaaaaccaaactattaaaatcctcctataaatattctttttctttacagtttttcaagcatgcaaaacagtttattgtaacttactgaaaaatattaacaattaattgtgaatacatgctgttaccagcttccttattcctaatacctggaaaatttttttttcaacggatagattttgatgtaaaaaagaccgaaattatcaaggtatcttagttgaaggacttgggaaatactatcaaaattaatttcttaggaaaaaatttaaaagtatatttaagtactctggatagactgaaacgtttccatgttatttctgcagttgtagacttaggcttatttgtaaagaagcatgctccattgactgccatctctagtcttgcagtgggtggtattaacccatagaaagcaagcagttgtgtatcacatagacaatggttatgatgtaaacagattcagttgttttgttgttcattcgtcatatgtttgtgatagggatgttgggagcacagctctattctgcctgctcagacttaagttagacccttatcttttatattatgtcatgaaaaaagtctcctaaaattgtgaaactagttcttgatgagtgatgtgatcatcagcaataaagatataataactctgttttcttagcctgtatagaggagaggaacttgcttggctttaaaatatatttatttgccatttaagtataaatatggaatctgtttcttattgggaagatagaatatatatattttcctttaaactttttaaggtcacttttaaataaccaaatttgatttatggtttttaacaaaggactaaagagctgaaaccaacctagttttgtttttgtgatataaactttaagtgtcgagggaccatgccagcaactaccaaaaatctcttaaatcttcaggtacagctggcattttggcagatgcatagagacatctgagaccctcagaaaggaaggataatccaagaatataggaaatctgtgttctcttcctttcattttatcccttatatttctaaagactaattataagtaatctgacattttaatgtagctactcttatttattttttctttctgaggtattaaaatatctggactgagttttgccaaatgttaaagggagaagagttactgaagactttgaacacttgctttttgtgattgcttatgtcattagtgcctcatgactgtgtttgatgtcctttattgatacaaagtgagcctgtgccttcattatcttgcccattttaatacaaatggaaacctggtgtttgaaaatctctgaactgtgtgggttttggaggaatatacctgaattttattcaataacagtttctggacaggaagaaaaatacagttacatatttataaaa

SEQ ID NO: 200869 - DNA, 1071 bp, Artificial Sequence
  derived and/or modified sequence
atgcctgagggcgaggacttcgggcccggaaagagctgggaagtcattaacagcaagcctgatgagcgccctcggttgagtcattgcatagctgagtcatggatgaatttcagcattttcttgcaggagatgtccctctttaaacagcagagtcctggaaagttttgtcttctggtgtgctcagtgtgcacttttttcaccatactgggaagctacatccctggcgtgatcctaagttacctgctgctgctctgcgcgttcctgtgccctctcttcaagtgtaacgatataggtcagaagatttacagcaagattaaaagcgttctgctgaaactggacttcggtataggggagtatatcaaccagaaaaagcgcgagcgctcggaggctgataaggagaagtcgcataaggacgatagtgaacttgacttcagtgctctatgtccaaaaatctcattgactgtggccgctaaggagctaagtgtgagcgatactgatgtgagcgaggtgagttggaccgataacggaacattcaacctgtctgaagggtatacccctcaaacggacacatctgacgatctcgaccgccccagcgaggaagtgttcagtcgtgacctcagcgacttcccaagcctagagaatgggatgggcactaatgacgaggatgagctatcactgggccttcctactgagctcaagaggaagaaggaacagttagacagtgggcatagacctagcaaggagacccagagcgccgccggattgacattaccacttaactccgatcaaacatttcatcttatgtctaatctggccggggacgttattaccgcagccgtgacagccgctatcaaggatcaactagaaggcgtccagcaggctttgagccaggccgcacctatccccgaggaggatactgatacagaagaaggggacgattttgaactgctggatcaatcagaattggaccagatcgagtccgaattaggcttaacccaggaccaggaggcggaagcccaacagaacaaaaaatctagcggattcctgtctaatctgctgggcggccactag

SEQ ID NO: 200870 - DNA, 1071 bp, Artificial Sequence
  derived and/or modified sequence
atgccagaaggagaagattttggacctgggaagtcctgggaggtgatcaacagcaagccagatgagcggccccggctgagccactgcatcgccgagagctggatgaacttcagcatcttcctgcaggagatgagcctcttcaagcagcagagccctgggaagttctgcctgctggtgtgcagcgtgtgcaccttcttcaccatcctgggcagctacatccctggggtcatcctgagctacctgctgctgctgtgtgccttcctgtgccccctcttcaagtgcaatgacatcggccagaagatctacagcaagatcaagtctgtgctgctgaagctggactttggcatcggggagtacatcaaccagaagaagcgggagaggtctgaggccgacaaggagaagagccacaaggatgacagcgagctggacttcagcgccctgtgccccaagatcagcctgactgtggccgccaaggagctgtctgtgtctgacacagatgtgtctgaggtgtcctggacagacaatggcaccttcaacctgtctgagggctacaccccccagacagacaccagtgatgacctggaccggcccagcgaggaggtgttcagccgggacctgagtgacttccccagcctggagaatggcatgggcaccaatgatgaagatgagctgagcctgggcctgcccacagagctgaagaggaagaaggagcagctggacagcggccaccggcccagcaaggagacccagagcgctgctggcctgaccctgcccctgaacagcgaccagaccttccacctgatgagcaacctggccggagatgtgatcacagctgctgtgacagctgccatcaaggaccagctggagggcgtgcagcaggccctgagccaggccgcccccatccctgaggaggacacagacacagaggagggagatgactttgagctgctggaccagagcgagctggaccagattgaaagtgagctgggcctgacccaggaccaggaggccgaggcccagcagaacaagaagagcagcggcttcctgagcaacctgctgggcggccactag

SEQ ID NO: 200871 - DNA, 1071 bp, Artificial Sequence
  derived and/or modified sequence
atgcccgagggcgaggacttcggccccggcaagagctgggaggtgataaactccaaaccagatgagcgaccaagactctcacattgtattgctgagagctggatgaatttcagcatattcctgcaggaaatgtctctctttaagcaacagtcccctgggaagttttgtttactcgtatgtagcgtgtgcaccttctttactattttgggaagttacatcccgggtgttattctctcctacctgctgctcctttgcgccttcctgtgtccactttttaaatgcaacgatatcggacagaagatctattcaaaaataaagtccgtccttctaaagctggatttcggcatcggggagtatataaaccaaaagaagcgggagcgctccgaagcagacaaagaaaagtctcataaggatgatagtgagctggattttagtgctctctgccctaaaatttccctcaccgtggcggccaaagaactgagcgtctcagatacggacgttagcgaagtgtcatggacagacaacgggacattcaacctgagcgagggctatacaccccaaacggatacatcagacgatttagatcgccccagtgaagaagtctttagcagagacctgagcgattttccttcactggaaaatggaatggggacaaatgatgaagacgagctttccctgggcctcccaactgaactcaaacgtaaaaaggagcagcttgatagtggacaccggccatccaaagagacgcaatccgctgccgggctgactctccccctaaactcagaccagacattccatttgatgagcaacttggcaggcgacgtgatcacggctgctgtcacagcagccatcaaggaccagctggagggcgtgcagcaggccctaagtcaggctgcgccaattccagaggaggacaccgacaccgaggaaggcgatgacttcgaattactggaccagtcagagctggatcagatcgagtccgagctcgggctgacgcaggaccaggaagccgaggcccagcaaaataaaaagtccagcgggtttctctccaacctgcttggaggacattag

SEQ ID NO: 200872 - DNA, 1071 bp, Artificial Sequence
  derived and/or modified sequence
atgccagaaggagaagactttggccctggcaaaagctgggaggtgatcaactccaaacccgacgaacgtccaaggctgtctcattgcattgctgagagttggatgaattttagtatctttctccaggaaatgtcactttttaagcagcaatcaccaggcaagttttgcttactggtgtgctccgtttgcacatttttcaccatcctcgggagctatatccccggagttattctgagctatctcctgctcctttgcgcattcctttgtccacttttcaaatgcaatgacattggacagaagatctattcaaagatcaaatcagtcctcctgaagctggattttggcatcggggagtacattaatcaaaagaaacgcgagcggtcggaggctgacaaggaaaaatcacacaaggacgatagtgagctggatttcagtgctttgtgccctaaaatttcactgactgtcgcagccaaagagctttccgtgagcgacactgatgtgtcagaggtgagctggactgacaacggaacatttaatttgtccgaggggtatacccctcaaaccgatacgtcggacgatctcgacagaccatccgaggaagtgttttctagagatttatccgactttccctctctcgaaaacggcatgggcactaacgacgaggacgaactttctcttggattgccgacggagctgaagagaaagaaagagcaactggactccggtcaccgtcccagcaaagagacccagagtgccgcaggtctgactctgccgttgaacagcgaccagactttccatctgatgagcaacctggcaggtgacgtgatcacagcagccgtgactgccgctatcaaggatcagctggagggtgtgcaacaggctcttagtcaggctgcgcctatcccagaagaggacacagacactgaggagggagatgattttgagttgctcgaccaatccgaattggatcagattgagtcagaattgggtctaacacaagatcaggaagccgaggcacaacagaataaaaagtcctccgggtttttatcgaacctactgggtggacattag

SEQ ID NO: 200873 - DNA, 1071 bp, Artificial Sequence
  derived and/or modified sequence
atgcccgagggcgaggacttcggccccggcaagagctgggaggtgatcaacagcaagcccgacgagagacccagactgagccactgcatcgccgagagctggatgaacttcagcatcttcctgcaggagatgagcctgttcaagcagcagagccccggcaagttctgcctgctggtgtgcagcgtgtgcaccttcttcaccatcctgggcagctacatccccggcgtgatcctgagctacctgctgctgctgtgcgccttcctgtgccccctgttcaagtgcaacgacatcggccagaagatctacagcaagatcaagagcgtgctgctgaagctggacttcggcatcggcgagtacatcaaccagaagaagagagagagaagcgaggccgacaaggagaagagccacaaggacgacagcgagctggacttcagcgccctgtgccccaagatcagcctgaccgtggccgccaaggagctgagcgtgagcgacaccgacgtgagcgaggtgagctggaccgacaacggcaccttcaacctgagcgagggctacaccccccagaccgacaccagcgacgacctggacagacccagcgaggaggtgttcagcagagacctgagcgacttccccagcctggagaacggcatgggcaccaacgacgaggacgagctgagcctgggcctgcccaccgagctgaagagaaagaaggagcagctggacagcggccacagacccagcaaggagacccagagcgccgccggcctgaccctgcccctgaacagcgaccagaccttccacctgatgagcaacctggccggcgacgtgatcaccgccgccgtgaccgccgccatcaaggaccagctggagggcgtgcagcaggccctgagccaggccgcccccatccccgaggaggacaccgacaccgaggagggcgacgacttcgagctgctggaccagagcgagctggaccagatcgagagcgagctgggcctgacccaggaccaggaggccgaggcccagcagaacaagaagagcagcggcttcctgagcaacctgctgggcggccactag

SEQ ID NO: 200874 - protein, 1706 aa, Artificial Sequence
  derived and/or modified sequence
MGVPKFYRWISERYPCLSEVVKEHQIPEFDNLYLDMNGIIHQCSHPNDDDVHFRISDDKIFTDIFHYLEVLFRIIKPRKVFFMAVDGVAPRAKMNQQRGRRFRSAKEAEDKIKKAIEKGETLPTEARFDSNCITPGTEFMARLHEHLKYFVNMKISTDKSWQGVTIYFSGHETPGEGEHKIMEFIRSEKAKPDHDPNTRHCLYGLDADLIMLGLTSHEAHFSLLREEVRFGGKKTQRVCAPEETTFHLLHLSLMREYIDYEFSVLKEKITFKYDIERIIDDWILMGFLVGNDFIPHLPHLHINHDALPLLYGTYVTILPELGGYINESGHLNLPRFEKYLVKLSDFDREHFSEVFVDLKWFESKVGNKYLNEAAGVAAEEARNYKEKKKLKGQENSLCWTALDKNEGEMITSKDNLEDETEDDDLFETEFRQYKRTYYMTKMGVDVVSDDFLADQAACYVQAIQWILHYYYHGVQSWSWYYPYHYAPFLSDIHNISTLKIHFELGKPFKPFEQLLAVLPAASKNLLPACYQHLMTNEDSPIIEYYPPDFKTDLNGKQQEWEAVVLIPFIDEKRLLEAMETCNHSLKKEERKRNQHSECLMCWYDRDTEFIYPSPWPEKFPAIERCCTRYKIISLDAWRVDINKNKITRIDQKALYFCGFPTLKHIRHKFFLKKSGVQVFQQSSRGENMMLEILVDAESDELTVENVASSVLGKSVFVNWPHLEEARVVAVSDGETKFYLEEPPGTQKLYSGRTAPPSKVVHLGDKEQSNWAKEVQGISEHYLRRKGIIINETSAVVYAQLLTGRKYQINQNGEVRLEKQWSKQVVPFVYQTIVKDIRAFDSRFSNIKTLDDLFPLRSMVFMLGTPYYGCTGEVQDSGDVITEGRIRVIFSIPCEPNLDALIQNQHKYSIKYNPGYVLASRLGVSGYLVSRFTGSIFIGRGSRRNPHGDHKANVGLNLKFNKKNEEVPGYTKKVGSEWMYSSAAEQLLAEYLERAPELFSYIAKNSQEDVFYEDDIWPGENENGAEKVQEIITWLKGHPVSTLSRSSCDLQILDAAIVEKIEEEVEKCKQRKNNKKVRVTVKPHLLYRPLEQQHGVIPDRDAEFCLFDRVVNVRENFSVPVGLRGTIIGIKGANREADVLFEVLFDEEFPGGLTIRCSPGRGYRLPTSALVNLSHGSRSETGNQKLTAIVKPQPAVHQHSSSSSVSSGHLGALNHSPQSLFVPTQVPTKDDDEFCNIWQSLQGSGKMQYFQPTIQEKGAVLPQEISQVNQHHKSGFNDNSVKYQQRKHDPHRKFKEECKSPKAECWSQKMSNKQPNSGIENFLASLNISKENEVQSSHHGEPPSEEHLSPQSFAMGTRMLKEILKIDGSNTVDHKNEIKQIANEIPVSSNRRDEYGLPSQPKQNKKLASYMNKPHSANEYHNVQSMDNMCWPAPSQIPPVSTPVTELSRICSLVGMPQPDFSFLRMPQTMTVCQVKLSNGLLVHGPQCHSENEAKEKAALFALQQLGSLGMNFPLPSQVFANYPSAVPPGTIPPAFPPPTGWDHYGSNYALGAANIMPSSSHLFGSMPWGPSVPVPGKPFHHTLYSGTMPMAGGIPGGVHNQFIPLQVTKKRVANKKNFENKEAQSSQATPVQTSQPDSSNIVKVSPRESSSASLKSSPIAQPASSFQVETASQGHSISHHKSTPISSSRRKSRKLAVNFGVSKPSE

SEQ ID NO: 200875 - DNA, 5121 bp, Artificial Sequence
  derived and/or modified sequence
atgggcgtgccgaagttttatagatggatcagtgagcggtacccttgtctctctgaagtggtaaaggaacaccagattcccgaatttgataacctctatctggacatgaacggtataatccaccagtgttcccatccaaatgacgacgacgtgcattttcgcatctcagatgacaaaattttcaccgatattttccattacctagaagttttattccgaataataaaaccaaggaaagtgttctttatggcggtggacggagtggccccacgcgcaaagatgaaccaacaacggggccggaggtttagatctgccaaagaagctgaggacaagattaaaaaggccatcgagaagggggagaccctccccactgaagctcgttttgattcgaactgtattaccccgggcaccgaattcatggcaaggctgcacgagcacctcaagtatttcgtgaacatgaagatttctacagacaagtcttggcagggcgtgaccatctacttttccggccacgagacgccaggagagggtgagcacaaaatcatggaattcatccggtctgagaaagccaagcccgaccacgatcctaacacacggcactgcctatacggccttgatgctgacctgattatgctgggactgacttctcatgaggctcatttctctctcctgagagaggaggtaaggttcggcgggaagaagactcagagggtgtgtgcccctgaagagaccactttccatttactgcatctgtctctgatgagggaatacattgattacgaattctctgtgcttaaggagaagattaccttcaagtacgacatcgaacgtataatcgatgattggatcttgatggggttcctcgtcggaaatgactttatcccgcatcttccccatctccacataaaccatgacgcactgcctctactttacggtacttacgtgactatactacccgagttggggggatatattaatgaatcagggcatcttaatctgccccggtttgagaaatacctcgtaaaactgagcgattttgacagggagcacttcagtgaagtttttgtcgatcttaaatggttcgagtctaaggtgggaaacaagtatcttaacgaggctgcaggcgtggctgccgaagaagctcgtaactataaggagaagaagaaactcaagggccaggagaattcattatgctggactgcgttagataaaaacgagggcgaaatgatcactagtaaagacaatctggaggatgagaccgaggacgatgatctttttgaaactgagtttcggcaatataaaaggacttactatatgacaaaaatgggagtggacgtggtaagcgatgactttttggctgaccaggccgcatgctacgtacaagcaatccagtggatcctgcactattattatcacggcgttcaatcctggtcttggtattacccctaccattacgcaccatttctctccgacatacataatatctctaccttgaagattcatttcgagctaggaaagccgtttaaaccattcgagcagttactagcagtcctgccagcagcaagcaaaaatcttctgcccgcttgttaccagcaccttatgacaaacgaggacagccctatcatagagtactacccgcctgacttcaagaccgatctcaatggaaagcagcaggaatgggaggctgtcgttctgataccctttattgatgagaaacggttgctggaagccatggagacttgcaaccactccctaaagaaagaggagcgcaaacgaaatcagcactccgagtgcctgatgtgctggtacgatcgagacactgagttcatctatccaagcccatggcctgagaaattcccagctattgaacgctgttgtacaaggtataagatcatcagtctggacgcttggcgggtcgacataaacaagaacaagatcacaagaatcgaccagaaggccctgtatttttgtggattcccaacgctcaaacacatcaggcacaagttctttctgaagaagagcggtgtgcaggttttccagcagagtagcagaggcgagaacatgatgctcgagatccttgtcgatgcggagtcagacgagttaacagtcgaaaatgttgctagttctgtgttaggtaagtctgtgtttgttaactggccccacctggaagaagcccgtgtcgtcgccgttagtgatggtgagacgaaattctacttggaagagccaccggggacccaaaaattgtactcggggaggacagcccctcctagtaaggtcgttcacttgggtgataaggagcagagtaactgggcaaaggaagtccaggggatatcagagcactatttgcgacgcaagggaataataatcaatgaaacgtcagcagttgtgtacgcacagcttttaactggcagaaagtaccagatcaatcaaaatggagaggtccggttagaaaaacagtggtccaagcaagtagtgccattcgtgtatcaaacgatcgtcaaggacatccgagccttcgatagtaggtttagcaacataaagacattggacgatcttttcccccttcgctcaatggtctttatgctggggactccttattacggctgcacgggggaggtgcaagactctggggatgtcatcacagaagggcgtatcagagtcattttttcaattccttgtgagcctaacctcgacgctctgattcagaatcagcataagtactctattaaatacaatccaggatacgtacttgcatccaggctgggggtctcgggctatctggtttctaggtttacaggttctattttcattggccgaggatccaggcggaatccccatggggatcacaaagcaaatgtaggcctgaatttaaagttcaacaaaaaaaatgaggaagtgcctgggtacacgaagaaagtgggcagcgaatggatgtatagcagtgccgcagaacagctgctcgcagagtatctggaacgggcccccgaattgttcagttacatagcaaaaaactcacaggaagatgtcttttatgaggacgacatctggccgggcgagaacgagaatggcgccgaaaaggtgcaggaaatcataacatggttgaaagggcacccggtgtcgacactgagccgatcctcttgcgatctgcagatcctggatgccgccatcgtggagaaaatagaggaagaagtggaaaagtgtaaacagcgcaaaaataacaaaaaggttcgagtcactgttaagccccatctgctctaccggccccttgagcaacaacacggagttatccccgatagagatgcagaattctgcttgtttgatcgggtggttaatgtgcgggagaatttcagtgtgccagtgggtctgcgaggaaccattattgggattaagggcgcaaatcgggaagcagacgtgctgttcgaagtgctattcgacgaagagtttcccggaggcctgacaatcagatgtagtcccgggaggggctataggttacccaccagcgcgctcgtaaacctatctcacgggagccggagtgagaccggcaaccagaaactcaccgccattgttaagccacagcctgcggtgcaccagcacagttcaagtagctctgtctcctcaggccatttaggcgccctaaatcactccccccagtccctctttgtaccaacacaggtccctacaaaggatgacgatgaattttgtaatatatggcagtcattacagggctcaggaaaaatgcagtatttccagcccaccatccaggaaaaaggagctgtcttgccccaggagatttcccaggtgaatcagcatcacaaatcaggctttaacgacaatagtgttaaataccaacaaaggaaacacgacccccatcgaaaatttaaagaagaatgtaaatctcctaaggcagaatgttggagccaaaagatgtctaataagcagcctaacagcgggattgaaaatttcctcgcctctctcaacatttctaaagaaaacgaggtgcagtcctctcatcatggggaaccccctagcgaagaacatctgtcccctcagagcttcgcgatgggtacccggatgctcaaggagatattaaaaatcgatggttctaacaccgtcgaccacaagaatgagattaaacagatcgccaacgagatcccagtcagctccaatcgacgggatgagtatggcctgccctctcagccaaaacagaacaaaaagctggcctcctacatgaacaaacctcactccgcgaatgaatatcataacgttcaatctatggacaatatgtgttggcccgcacctagccaaatccctcccgtgagcaccccggtgacggagctctccaggatctgctccctggtggggatgccgcagccagatttctcattccttcgaatgcctcagaccatgaccgtgtgccaggtcaaacttagcaacgggctcctcgtccacggcccccagtgccacagtgagaacgaagccaaagaaaaagctgccttattcgcacttcagcaacttgggagcctgggcatgaatttccctcttccgtcacaagttttcgccaattacccaagtgcagtgcctcctggcacaatcccaccggcttttcctcctccgaccggatgggatcactacggcagcaactatgccctcggggccgccaacattatgccctctagtagccacctgttcggctccatgccatggggaccaagtgtgccagtaccaggcaagcccttccatcacacattgtattctggtaccatgcccatggccgggggtattcccgggggggtgcataatcagtttatcccgttgcaagtgacaaaaaagcgcgtcgcgaacaagaaaaattttgagaacaaggaagcacaatcctctcaggcaacacccgtccagacctcacagcctgattcctcgaacatcgtgaaggtgagtccccgcgagtcaagcagcgcttcgcttaagtcctcgcccattgcccaacctgcatctagtttccaagtggaaaccgccagccaaggtcatagcatcagccaccataagagcactcccatcagctcgtctcgaagaaagtctcggaaactggctgtcaatttcggtgtgtctaaaccgagcgaatag

SEQ ID NO: 200876 - DNA, 10143 bp, Artificial Sequence
  derived and/or modified sequence
atggtcggccgggcggtgtgttgtcatccgcggagcgacgaccggaggctgcggcggagccccggcggggcgtttggtttcggtttggccctgactgggattagtgttgacgatcgaaatgggagtccccaagttttacagatggatctcagagcggtatccctgtctcagcgaagtggtgaaagagcatcagattcctgaatttgacaacttgtacctggatatgaatggaattatacatcagtgctcccatcctaatgatgatgatgttcactttagaatttcagatgataaaatctttactgatatttttcactacctggaggtgttgtttcgcattattaaacccaggaaagtgttctttatggctgtagatggtgtggctcctcgagcaaaaatgaaccagcagcgtgggaggcgttttaggtcagcaaaggaggcagaagacaaaattaaaaaggcaatagagaagggagaaactcttcctacagaggccagatttgattccaactgtatcacaccaggaactgaatttatggccaggttacatgaacatctgaagtattttgtaaatatgaaaatttccacagacaagtcatggcaaggagttaccatctacttctcaggccatgagactcctggagaaggagagcataaaatcatggaatttatcagatccgagaaagcaaagccagatcatgatccaaacaccagacactgtctttatggtttagatgctgacttgattatgcttggattaacaagtcatgaggcacatttttctctcttaagagaagaagttcgatttggtggcaaaaaaacacaacgggtatgtgctccagaagaaactacatttcaccttctacacttgtctttaatgagagagtatattgactatgagttttcagtattaaaagaaaagatcacatttaaatatgatattgaaaggataatagatgattggattttgatggggtttcttgttggtaatgattttatccctcatctacctcatttacatattaatcatgatgcactgcctcttctttatggaacatatgttaccatcctgccagaacttgggggttatattaatgaaagtgggcacctcaacttacctcgatttgagaaataccttgtgaaactatcagattttgatcgggagcacttcagtgaagtttttgtggacctaaaatggtttgaaagcaaagttggtaacaagtacctcaatgaagcagcaggtgtcgcagcagaagaagccaggaactacaaggaaaagaaaaagttaaagggccaggaaaattctctgtgttggactgctttagacaaaaatgaaggcgaaatgataacttctaaggataatttagaagatgagactgaagatgatgacctatttgaaactgagtttagacaatataaaagaacatattacatgacgaagatgggggttgacgtagtatctgatgactttctggctgatcaagctgcatgttatgttcaggcaatacagtggattttgcactattactatcatggagttcagtcctggagctggtattatccttatcattatgcacctttcctgtctgatatacacaacatcagtacactcaaaatccattttgaactaggaaaaccttttaagccatttgaacagcttcttgctgtacttccagcagccagcaaaaatttacttcctgcatgctaccagcatttgatgaccaatgaagactcaccaattatagaatattacccacctgattttaaaactgacctaaatgggaaacaacaggaatgggaagctgtggtgttaatcccttttattgatgagaagcgattattggaagccatggagacatgtaaccactccctcaaaaaggaagagaggaaaagaaaccaacatagtgagtgcctaatgtgctggtatgatagagacacagagtttatctatccttctccatggccagaaaagttccctgccatagaacgatgttgtacaaggtataaaataatatccttagatgcttggcgtgtagacataaacaaaaacaaaataaccagaattgaccagaaagcattatatttctgtggatttcctactctgaaacacatcagacacaaattttttttgaagaaaagtggtgttcaagtattccagcaaagcagtcgtggagaaaacatgatgttggaaatcttagtggatgcagaatcagatgaacttaccgtagaaaatgtagcttcatcagtgcttggaaaatctgtctttgttaattggcctcaccttgaggaagctagagtcgtggctgtatcagatggagaaactaagttttacttggaagaacctccaggaacacagaagctttattcaggaagaactgccccaccatctaaagtggttcatcttggagataaagaacaatctaactgggcaaaagaagtacaaggaatttcagaacactacctgagaagaaaaggaataataataaatgaaacatctgcagttgtgtatgctcagttactcacaggtcgtaaatatcaaataaatcaaaatggtgaagttcgtctagagaaacagtggtcaaaacaagttgttccttttgtttatcaaactattgtcaaggacatccgagctttcgactcccgtttctccaatatcaaaacattggatgatttgtttcctctgagaagtatggtctttatgctgggaactccctattatggctgcactggagaagttcaggattcaggtgatgtgattacagaaggtaggattcgtgtgattttcagcattccatgtgaacccaatcttgatgctttaatacagaaccagcataaatattctataaagtacaacccaggatatgtgttggccagtcgccttggagtgagtggataccttgtttcaaggtttacaggaagtatttttattggaagaggatctaggagaaaccctcatggagaccataaagcaaatgtgggtttaaatctcaaattcaacaagaaaaatgaggaggtacctggatatactaagaaagttggaagtgaatggatgtattcatctgcagcagaacaacttctggcagagtacttagagagagctccagaactatttagttatatagccaaaaatagccaagaggatgtgttctatgaagatgacatttggcctggagaaaatgagaatggtgctgaaaaagttcaagaaattattacttggctaaaaggacatcctgtcagtactttatctcgttcttcttgtgatttacaaattctggatgcagctattgttgagaaaattgaggaagaagtcgaaaagtgcaagcaaagaaagaataataagaaggtgcgagtaacagtgaaaccccatttgctatacagacctttagaacagcaacatggagtcattcctgatcgggatgcagaattttgtctttttgaccgtgttgtaaatgtgagagaaaacttctcagttccagttggccttcgaggcaccatcataggaataaaaggagctaatagagaagccgatgtactatttgaagtattatttgatgaagaatttcctggagggttaacaataagatgctcacctggtagaggttatcgactgccaacaagtgccttggtgaacctttctcatgggagtcgctctgaaactggaaatcagaagttgacagccatcgtaaaaccacaaccagctgtacatcaacatagctcaagttcatcagtttcctctgggcatttgggagccctcaaccattcccctcaatcactttttgttcctactcaagtacctactaaagatgatgatgaattctgcaacatttggcagtccttacagggatctggaaagatgcaatactttcagccaactatacaagagaagggtgcagttctacctcaagaaataagccaagtaaatcaacatcataaatctggctttaatgacaacagtgttaaatatcagcaaagaaaacatgaccctcacagaaaatttaaagaagagtgtaagagtcctaaagctgagtgttggtcccaaaaaatgtccaataagcagcctaactctggaattgagaactttttagcatctttgaatatctccaaagaaaatgaagtacagtcatctcatcatggggagcctccaagtgaagagcatttgtcaccacagtcatttgccatgggaacacggatgcttaaagaaattctaaaaattgatggctctaacactgtggaccataagaatgaaatcaaacagattgctaatgaaatccctgtttcctctaacagaagagatgaatatggattaccctctcagcctaaacaaaataagaaattagcatcttatatgaacaagcctcacagtgctaatgagtaccataatgttcagtctatggacaatatgtgttggcctgcccccagccagatccctcctgtatccacaccagtaactgaactttctcgaatttgttcccttgttggaatgccacaacctgatttctcctttcttaggatgccacagacaatgaccgtttgccaagtaaaattatctaatggcttactggtacatgggccacagtgccactctgaaaatgaagccaaagagaaagctgcactttttgctttacaacagttgggctccttaggcatgaatttccctttgccttcacaagtatttgcaaattatccttcagctgtaccacctggaaccattcctccagcctttcccccacctactggctgggatcactatggaagcaactatgcattgggggcagctaatataatgccttcgtcgtctcatctctttggctcaatgccatggggaccatcggtgccagttcctgggaagcccttccatcatactttatattctgggaccatgcccatggctgggggaataccagggggtgtgcacaatcagtttatacctctgcaggttactaaaaaaagggttgcaaacaaaaagaactttgagaataaggaagcccagagttctcaagccactccagttcagactagccagccagattcttccaacattgtcaaagtaagtccacgggagagctcatcagcttctttgaagtcctctccgattgctcaacctgcatcttcttttcaagttgaaactgcctctcaaggccatagtatatctcaccataagtcaacaccaatctcttcttcaagaagaaaatcaagaaaactggctgttaattttggtgtttctaaaccttctgagtaaatttggctcttagaattaagttaatttcttctctttccatctacctttttataaatacatatctatgtctcataaaaattagaatgtactattttaaaataatatgtgtaaattgaaatttttttcatttttaagttatcaggcacttttcatgctgtttaaaagactgtgtatcaaattgtgcactttaagtatgtgcagtttgttgtatgtcaattatacctcaataaatctgtaataaaaaactaaattaaaccttgcattaaaataatatcacagtatcagtggactaaacattaaaatgtaccactctaatcattggcctcatgattgaagcatcctgaactatgaattagacatcagttagcaataataagcattttttacactatcattgaggaataattacatggagcatgaaatttgggcctccagtataacttactgaatgtggattttatttctctttttaatgatgtaagaaaattgtcaggagaatggctcttatttatgtgtgttttaacttatgctttgttgcctctgagggtctttagacctgctgtgaaaggatcacatttgttgtggtgctgccagttttgctttattctaaattttgtaccaaagcaactttagaataatcagaatatttcatctaactgcttagaactataaatagcattctaaatttgagtaaatacaattttttaggttactcaagaaccagcattagtaatttctagtaaaattgtttcaaaatctacagggtacaatgattacaaattaatcttctaacaaaataaaatatgaaatattagtcatgttaattaataaactgtattattttgtatagctttttatttgcttacctgacattttatgagagcttcatagttggtcggtatgtagtgcttcttgggactgaagaaattctaattgttgtttaagttccaaggtgtgctacaatataggaggcacagtcatcagtttgtgacatacattatttactgcctatttcattctgattctatatttttagctttatgctgaactgttcaatgatgctgggattctctctttgcatgtcatatgtgaatgtgtggttcaagctgtaactgttgaaattattttagaatttatgacgatttctcagcagggcctatgtttatatatatatatatatttattctttagtttttgtgatatgcttatatttttaaggaagtaagttatagcatacttttttaaaagtaggaaccacaatctttatatggagcagcttgttatatctgattttcatgtaactcattggaaactctgccatgactcttaaagtagtcttacttgttttttaaaatgctggtattaaactaaatggactcctttcactaactgctgatttcagagtttaaatgttagcaggatatttgtgtattagcagtgccttcagtataagagagaaatattcattatctgtcatttatcatagtcgtataagtttccatgattttattttctgttattttcataagttcagatgtttatcagttcccaacattgtttctttatctgtagtgggatcttgagtaatgaggctcaagtaaatcctcaatgtgtataattattgcctcataaactctctctttgtttttaaaggaaacatctattatggtaatacaaagaaaagttaaattgtgacagtaatgttatattaacctcttcctactttaaagtgtgaaatgtttcacctcagctgtacaaactccagcattgagaatttgcctcactcattactcctgtgtgacagttatataaatagcatgcagctcacatctgttttagagcatagaagaagcggcacctgccatcttctgaaaactccaaagggaaatttcagtagacatagtgcactaaacccataaggatacttgaccaatatttgagcacagcaagctgacagttctatacagataggcagtgaaagagttttattttccagccaggcgcagtggctcaaatcccagcacttcgggaggctaaggcaggcggatcacttgaggtccggagttccagacaagcctggccaacatgatgaagccctgtctctactaaaaatacaaaaattagccgggcgtgatggcacatgcctttagtcccagctactcgggaggctgaggcatgagaatcatttgaacccgcgaggcagagtctgcagtgagccgagattgcaccactgcactccagcctggagagcagagcaagactctgtctcaaaaaaaagaaaaaagttttattatccttactttttttttaacattattattctaaaggtcaaaactgagaagagattaagataggagagagctccataatggctggatagtggtcaggcattctctattcttttccccctgtagacccattctaaatgtgggcctgaggtcaatgggagatgtgccctccctatggaggatgtaagaagcagaggccatttctgccccatgttgaggaaacaatctgttgatagacctggaatttagagtatatctgaaaagcagttggacttcaagaaatttaaaattctctctttgagatggggtggactaagaccacccccaaagtttaaaaatatgctcattcaacttgaatcttctgaggactttttgtgaaaatggtggactgtttagggcataggacagattccccaaattgctttatgcttccacataactagagcacttcaatctatttaagcctttgtctcctaactgaaacattatttctaaatatttctattcaataagttttttcttttttgagcaacttaagtgaattttgaagattgctccttccagtctcgttccttttcacattttcctgcattacctaataattacctcagcgttagaatttgaatgtattaattgatttaaacatcatgtagactaaagtcttaaacatctaagactcagttgtagttgcagaaaaaaattaaagtcacctctactgaaccttggtttcaatttaagatttttcttgcttttcaaaggggtaactaataaagattgaagggtttttttcccgattggtggaggaatgaagaactattgatgcaagtttttttattgtttctttctatgatcaggtacctgctttcattttagactgctacttccaaactaagctagattcttggttttaatgagaggaggcagagagagggaggcagatggaagaagaaaaacagttaaataagacatacccagtcactgcatttttggactataccgtatctttctagcacaaggaaatagataaactgtaaggtcttttttactcactttttatttatgtgttctatttgtgttagtcataactgtttatagtggttgtctaatttttacttttattatatgagatagagctgtgcagatcttcactcaagttagttctgtcacgcttcttcccattatttagagcacagttttttaaagcaactgtacaatttctcagccttatgagcttgctgtatttcttggtatcatgttgcttccaaattttgtttttactgtagaagacaattaatttattgtagagaagtggctgtgaaagtcgttctctgtctttaaaaatcaattgcagaagttcatttgtcatttttctagagataaattatagtactcaaactggcagtgctcagtatatacattttgtaagctttgtcagtgaaaccatcagttttgcaggagcttcctttcctagtcaagataaagcttaaaattccagaaattaatgtcgttcggactgactttattcatatttccatcaaacttctccaatacagtaagagatagtgttgaaccagcatcaagtctccagaaacatggcagagcagacaggccgttaagtttcacagacatcatagatccttttcttaaagaagaaaaacatgtataaaatagttttagtagtccaaaatgtcaactatctgtagctgcttttgtgtgtgtgtcagtgaacaaataataatgccttgctcaatcaatgcattcagccatctcaagtgcaatttgtgaaggagactatggtttccaaaagatacatttttttacaaagttaaacctgtaaaaagtctttttttttttccctccagccgtacaccaactgcacttggttgtttcagcagttggtatactattaaattgtccaggccaaataggtttctgtagctgttttagtaatttgaagccaaattctcatgctgtttctcattaaaaagaatgagaatttggtccatagttagctttaagttctctcttcctttctttcccttacagttaagggtttggtgggggatggggaggttgttttcgttttttggatttttttgtcttttggctttaagtatcatattttcttttgcctgtatccaactgcttctttgagtattttcatctagtttaatgtgagtaatagatgctgtgctgtcattgaagtgttcaacattttgttcatttaaacaaaagtgtaattcatacatatatagatacatatcttaattgatttctcaactattttataagtaactggaatttttcattagatcttatacagagaagtattttattaaaaattcaaaagggaagacttttatgtgctcattttgtaatttttgattttaaatatctttacattgtctgccaattaaagtgttttaaacttgcattggaatggactccgaatgtatttttgtggtgttacgttatccgtagatttctagcatgaagttagcctcacgatgctgtgcaaaggattttaaaatatgagagtcactgaaagagtttaaacatctgttcatgttaaatgctctatggattttaattaaagacttgagaatgattttataa

SEQ ID NO: 200877 - DNA, 5121 bp, Artificial Sequence
  derived and/or modified sequence
atgggcgtgcccaagttctaccgctggatcagcgagcgctacccctgcctgtctgaggtggtgaaggagcaccagatccctgagtttgacaacctgtacctggacatgaatggcatcatccaccagtgcagccaccccaatgatgatgatgtgcacttccgcatcagtgatgacaagatcttcacagacatcttccactacctggaggtgctcttccgcatcatcaagcccaggaaggtgttcttcatggctgtggatggagtggccccccgggccaagatgaaccagcagaggggccgccgcttccgcagcgccaaggaggccgaggacaagatcaagaaggccatcgagaagggggagaccctgcccacagaggccaggtttgacagcaactgcatcaccccaggcacagagttcatggcccggctgcacgagcacctgaagtactttgtgaacatgaagatcagcacagacaagtcctggcagggcgtgaccatctacttcagcggccacgagaccccaggagagggggagcacaagatcatggagttcatccgctctgagaaggccaagccagaccatgaccccaacaccaggcactgcctgtatggcctggatgctgacctgatcatgctgggcctgaccagccatgaggcccacttcagcctgctgcgggaggaggtgcgctttggaggcaagaagacccagagggtgtgtgcccctgaggagaccaccttccacctgctgcacctgagcctgatgagggagtacatcgactatgagttctctgtgctgaaggagaagatcaccttcaagtatgacatcgagcgcatcattgatgactggatcctgatgggcttcctggtgggcaatgacttcatcccccacctgccccacctgcacatcaaccatgatgccctgcccctgctgtatggcacctacgtgaccatcctgcctgagctgggcggctacatcaatgaaagtggccacctgaacctgcccaggtttgagaagtacctggtgaagctgagtgactttgaccgggagcacttcagcgaggtgtttgtggacctgaagtggtttgagagcaaggtgggcaacaagtacctgaatgaagctgctggggtggccgctgaggaggccaggaactacaaggagaagaagaagctgaagggccaggagaacagcctgtgctggacagccctggacaagaatgaaggagagatgatcaccagcaaggacaacctggaggatgaaacagaagatgatgacctgtttgaaacagagttccggcagtacaagaggacctactacatgaccaagatgggcgtggatgtggtgtctgatgacttcctggccgaccaggccgcctgctacgtgcaggccatccagtggatcctgcactactactaccacggcgtgcagagctggagctggtactacccctaccactacgcccccttcctgagtgacatccacaacatcagcaccctgaagatccactttgagctgggcaagcccttcaagccctttgagcagctgctggccgtgctgcctgctgccagcaagaacctgctgcctgcctgctaccagcacctgatgaccaatgaagacagccccatcatcgagtactaccccccagacttcaagacagacctgaatggcaagcagcaggagtgggaggccgtggtgctgatccccttcattgatgagaagaggctgctggaggccatggagacctgcaaccacagcctgaagaaggaggagaggaagaggaaccagcacagtgaatgtctgatgtgctggtatgaccgggacacagagttcatctaccccagcccctggccagagaagtttcctgccatcgagcgctgctgcacccgctacaagatcatcagcctggatgcctggagggtggacatcaacaagaacaagatcaccagaattgaccagaaggccctgtacttctgtggcttccccaccctgaagcacatccgccacaagttcttcctgaagaagagcggcgtgcaggtgttccagcagagcagcagaggagagaacatgatgctggagatcctggtggatgctgagagtgatgagctgactgtggagaatgtggccagctctgtgctgggcaagtctgtgtttgtgaactggccccacctggaggaggcccgggtggtggccgtgtctgatggagagaccaagttctacctggaggagcccccaggcacccagaagctgtacagcggccgcacagccccacccagcaaggtggtgcacctgggggacaaggagcagagcaactgggccaaggaggtgcagggcatcagcgagcactacctgcggaggaagggcatcatcatcaatgagaccagcgctgtggtgtatgcccagctgctgaccggcaggaagtaccagatcaaccagaatggagaggtgcggctggagaagcagtggagcaagcaggtggtgccctttgtgtaccagaccatcgtgaaggacatccgggcctttgacagccgcttcagcaacatcaagaccctggatgacctcttccccctgcgctccatggtgttcatgctgggcaccccctactacggctgcaccggggaggtgcaggacagcggagatgtgatcacagagggccgcatccgggtcatcttcagcatcccctgtgagcccaacctggatgccctgatccagaaccagcacaagtacagcatcaagtacaaccctggctacgtgctggccagccggctgggcgtgtctggctacctggtgagccgcttcaccggcagcatcttcatcggccggggcagcagaagaaacccccacggggaccacaaggccaacgtgggcctgaacctgaagttcaacaagaagaatgaggaggtgcccggctacaccaagaaggtgggcagcgagtggatgtacagcagcgctgctgagcagctgctggccgagtacctggagcgggcccctgagctgttctcctacatcgccaagaacagccaggaggatgtgttctatgaagatgacatctggccaggagaaaatgaaaatggagctgagaaggtgcaggagatcatcacctggctgaagggccaccctgtgtccaccctgagccgcagcagctgtgacctgcagatcctggatgctgccatcgtggagaagattgaggaggaggtggagaagtgcaagcagaggaagaacaacaagaaggtgcgggtgacagtgaagccccacctgctgtaccggcccctggagcagcagcacggcgtcatcccagacagagatgctgagttctgcctgtttgacagagtggtgaatgtgcgggagaacttctctgtgcctgtgggcctgcggggcaccatcatcggcatcaagggggccaaccgggaggctgatgtgctgtttgaggtgctgtttgatgaggagttccctgggggcctgaccatccgctgcagccctggccggggctaccgcctgcccaccagcgccctggtgaacctgagccacggcagccgctctgagaccggcaaccagaagctgacagccatcgtgaagccccagcctgctgtgcaccagcacagcagcagcagctctgtgagcagcggccacctgggcgccctgaaccacagcccccagagcctgtttgtgcccacccaggtgcccaccaaggatgatgatgagttctgcaacatctggcagagcctgcagggcagcggcaagatgcagtacttccagcccaccatccaggagaagggagctgtgctgccccaggagatcagccaggtgaaccagcaccacaagagcggcttcaatgacaacagcgtgaagtaccagcagaggaagcatgacccccacaggaagttcaaggaggagtgcaagagccccaaggccgagtgctggagccagaagatgagcaacaagcagcccaacagcggcatcgagaacttcctggccagcctgaacatcagcaaagaaaatgaggtgcagagcagccaccacggggagcccccatctgaggagcacctgagcccccagagctttgccatgggcaccaggatgctgaaggagatcctgaagattgatggcagcaacacagtggaccacaagaatgagatcaagcagatcgccaatgagatccctgtgagcagcaacagaagagatgaatatggcctgcccagccagcccaagcagaacaagaagctggccagctacatgaacaagccccacagcgccaatgagtaccacaacgtgcagagcatggacaacatgtgctggccagcccccagccagatcccccctgtgtccacccctgtgacagagctgagccgcatctgcagcctggtgggcatgccccagcctgacttctccttcctgaggatgccccagaccatgacagtgtgccaggtgaagctgagcaatggcctgctggtgcacggcccccagtgccacagtgaaaatgaggccaaggagaaggccgccctgtttgccctgcagcagctgggcagcctgggcatgaacttccccctgcccagccaggtgtttgccaactaccccagcgctgtgcccccaggcaccatccccccagccttccccccacccaccggctgggaccactacggcagcaactatgccctgggcgccgccaacatcatgcccagcagcagccacctgtttggctccatgccctggggccccagcgtgcctgtgcctgggaagcccttccaccacaccctgtacagcggcaccatgcccatggccggcggcatccctggaggagtgcacaaccagttcatccccctgcaggtgaccaagaagagggtggccaacaagaagaactttgagaacaaggaggcccagagcagccaggccacccctgtgcagaccagccagcctgacagcagcaacatcgtgaaggtgagcccccgggagagcagcagcgccagcctgaagagcagccccatcgcccagcctgccagcagcttccaggtggagacagccagccagggccacagcatcagccaccacaagagcacccccatcagcagcagcaggaggaagagcaggaagctggccgtgaactttggagtgtccaagcccagcgagtag

SEQ ID NO: 200878 - DNA, 5121 bp, Artificial Sequence
  derived and/or modified sequence
atgggcgtgcccaagttctaccggtggatcagcgagcggtacccctgcttatctgaagtggtgaaagagcatcagatccctgagttcgataatttgtaccttgatatgaacggaattatacatcagtgttctcatcctaacgatgacgacgtccattttcggatcagcgatgataagatcttcactgacatcttccactacttggaggtactctttaggatcattaagccaagaaaggtgtttttcatggcagtagatggcgttgccccgagagcaaaaatgaaccagcaaaggggccggcgcttccgttccgcaaaggaagcagaagacaagattaaaaaggctattgagaagggagagacacttcctaccgaagcacgttttgactccaactgtataacccctggaaccgagttcatggcacggttgcatgagcatctgaaatatttcgtcaatatgaagattagcaccgacaagtcctggcagggagtcacaatctatttctcaggacacgagacgccaggtgagggggaacacaaaatcatggagttcattaggtctgagaaggccaaacctgaccacgatcctaatactcgacattgtttgtatggccttgatgctgatctgattatgcttggcctcaccagccatgaggctcacttctctctgcttcgtgaggaggtccgcttcgggggtaagaaaactcagcgcgtgtgcgctcccgaggaaactacgttccacctcctccatttgagcttgatgagagagtatattgattacgaattctcagtccttaaagagaagataacattcaagtacgacatcgagcgtattatagacgattggattcttatggggtttctggtgggaaatgacttcatcccacatctccctcacctgcatatcaaccacgatgcccttccactgctttatgggacatatgttaccattttgcctgaactcggcggatacattaatgagtcgggccacttgaatctcccaagatttgaaaagtacctggtaaagttgagtgatttcgacagagagcacttcagcgaggtgttcgtggacctgaagtggtttgagtctaaggtaggtaacaaatatctgaatgaagccgcaggcgtggcagccgaggaggcccgcaactataaggagaagaaaaaacttaaagggcaggagaatagtctttgctggaccgcgctggataagaacgaaggggagatgatcacttccaaggataatctggaagatgagacagaggatgatgatctgttcgaaacagaattcaggcagtacaagagaacatactacatgactaagatgggtgtggacgtggtaagcgatgatttcctggctgatcaggcagcttgctatgtacaggctatacaatggatccttcattattactaccacggcgttcagagttggtcctggtactacccttatcattacgccccttttttatccgatatacataatatttctacgctgaaaatccattttgagcttggcaagcccttcaaaccattcgagcagctcttggctgtgttacccgccgcatcgaagaacctgctcccggcctgctaccagcacctgatgaccaatgaagactctcccatcatcgaatattaccccccagattttaaaaccgatctcaatggtaaacagcaagaatgggaagccgtggtgctcataccgttcatagacgagaaacgcctcctggaggcgatggaaacatgtaaccacagtctcaagaaggaagaacgaaagcggaatcagcattcagaatgtctgatgtgctggtacgaccgcgacacggaattcatctacccatccccctggccagaaaagttccctgccatcgagaggtgctgtactcggtacaagattatttctctcgatgcctggcgcgtggatatcaacaaaaacaaaatcacacggattgatcaaaaagctttatatttttgtggattcccaacactgaaacatattcggcacaaattttttctaaaaaaatccggcgtccaggttttccagcagtcatcccggggtgaaaacatgatgttagaaattcttgtagatgccgaaagcgacgagttaactgttgagaatgtggcctcaagcgtcctggggaaatctgtctttgtgaactggccacacttggaggaagcccgggtcgtagcggtgagcgacggcgaaacgaaattctacctcgaggaaccacccggtacccaaaagctgtactccggaaggaccgcccccccaagtaaagtcgtgcacttgggcgataaagaacagtctaattgggccaaggaggtgcagggcatcagcgaacactatctgaggcggaaaggcattatcatcaacgagacatctgccgtagtctatgctcagctcctgaccggtagaaagtaccagattaaccagaatggagaggtcaggctcgagaagcaatggagcaagcaggtcgtccctttcgtgtaccagaccattgtcaaggacatccgagccttcgacagccgcttttccaacatcaagacgcttgacgatctcttcccattaaggtccatggtttttatgctgggcaccccatactatggctgtaccggagaagtgcaggactctggggacgtcatcaccgaggggagaatccgcgtgatcttctcaatcccctgcgagccgaatctcgacgccctgatacaaaaccaacacaaatattccatcaaatataacccagggtacgtcctggcgtctaggctaggcgtgtcaggctacttggtgtctaggttcactgggagcattttcatcgggcgaggttcccgtaggaatccccacggtgatcacaaggcaaacgtcggcctgaatttgaaatttaacaagaagaacgaggaggtacctggctacacgaagaaggttgggtctgagtggatgtactcctcagcagctgaacaactgttggcagagtatcttgagcgcgccccagaattattctcctatatagctaaaaactcccaggaagacgtgttttacgaggatgacatttggccaggcgagaacgagaatggggccgagaaggtccaggagattatcacctggctgaaaggacatcccgtgagcacgctgagccgaagctcctgtgacttgcagattctcgatgcagctatcgtcgagaaaattgaggaggaagtggagaagtgtaagcagcggaagaacaataaaaaagtgagagtcaccgtgaagcctcatctcctttacagaccactcgaacagcaacacggcgtgatccccgatagggatgctgaattctgcctcttcgatcgtgtagtgaatgttagggagaactttagtgtgccagtgggccttcgcggaaccattatagggatcaagggagccaaccgcgaggccgatgtgctgtttgaggtgttgtttgacgaagagtttccgggaggtttaacgattcgttgtagcccaggccgtgggtaccgcctccccacaagtgctttggtaaatctctcacacggcagtcgttctgagacagggaaccaaaaattgacagccatcgtgaagcctcagcctgctgtgcaccagcatagcagctcatccagcgtctcttcaggacacctgggagccctgaaccactccccacagtccttattcgtccccacgcaggtgccaacaaaagacgatgatgagttttgcaatatttggcagtccctgcagggatcaggaaagatgcagtactttcagcctacgatacaggagaagggggctgtactgccacaggagatctcacaggtgaaccagcaccataagtccggcttcaacgacaactcagtcaagtaccagcagcggaaacacgatcctcataggaagttcaaggaggaatgcaagagccctaaagctgagtgttggtctcagaagatgtccaataagcagcccaattcaggcatcgagaatttcctggcaagtctgaatatcagcaaggaaaatgaagttcaatcctctcaccatggagagccccccagcgaagagcacctgtctccccagagcttcgccatgggaacgaggatgttaaaagaaattctgaagatcgacggcagtaatacagtcgaccataaaaatgagatcaaacagatcgccaacgagattccggtgtcttctaatcggcgtgacgaatacgggctgccctctcagccgaaacagaataaaaaattggcttcctacatgaataagccacattcagccaacgaataccacaacgtccaaagcatggataatatgtgctggcctgcaccatcccaaattccacccgtaagcacaccagtgacagagctctcaaggatctgcagcctggtcggaatgccgcagcccgatttctcctttctgagaatgccgcagacgatgacagtgtgccaggtgaagctctccaacggactccttgtgcatggaccccagtgccattctgaaaatgaagcaaaggagaaagccgcccttttcgcgctgcagcaactgggctctttaggtatgaattttccactgccgagtcaggtgttcgctaactacccctcagccgtgcccccaggaacaatcccccccgctttccccccacccaccggttgggaccattacggctccaactacgccctgggtgccgccaacatcatgccctcaagcagccatttattcgggtccatgccctggggcccaagtgtgccagtaccaggcaagccctttcatcatacattgtattccggaacaatgcccatggccggaggtatccccggcggagttcacaaccagttcatccctttacaggtcaccaaaaagagagtagcgaataaaaagaatttcgaaaacaaggaagcgcagtcatcccaggcaacgccggtgcagacttcccagcccgacagctctaacattgtcaaggtgtcaccgcgggagagctccagcgcgtctctgaagtccagtcctatcgcccaaccagcaagcagtttccaggttgaaaccgcctcacagggccattctatctctcaccacaaatcaacccccatctcaagtagccgaagaaaatcacgcaaactcgccgtcaatttcggcgtgtcgaagccttcagagtag

SEQ ID NO: 200879 - DNA, 5121 bp, Artificial Sequence
  derived and/or modified sequence
atgggagttcccaaattctacaggtggatttctgagcgatatccgtgcctgtcagaagttgtgaaagagcaccaaatccccgagtttgataatttgtatcttgacatgaatggaatcatacaccaatgttcgcatcccaatgacgatgacgtgcacttccggatctctgacgataagattttcactgacattttccattacctcgaagtcttgttcagaatcataaaaccacgcaaggtctttttcatggctgtggatggcgtggcgccaagagctaagatgaaccagcagcgcggacgaagatttcggtccgccaaggaagccgaggacaaaattaaaaaggccattgagaaaggggagacactgccaacagaagcaaggtttgattctaactgcataaccccgggaactgaattcatggctcggcttcacgagcatctcaaatacttcgtgaatatgaagatttccacagacaaatcctggcagggcgtgaccatctacttcagcggacatgaaacacctggggagggtgaacataaaataatggagttcatccgtagtgagaaggcgaagccggatcacgatcccaacacacggcattgtctctatggactcgacgcagatctgatcatgctgggcctgacatcccacgaggcgcacttctcactcctcagggaggaggttagatttggagggaaaaagacccagagggtctgcgcaccagaagagactacatttcatcttctgcatcttagtctaatgcgcgaatatatcgattatgaatttagcgtgctcaaggaaaagatcactttcaagtatgacatcgaacgcattatcgacgattggatccttatgggttttttagtcgggaacgattttattcctcacctgccacatctacatatcaaccacgacgcactaccactgctttacggtacctacgtaaccattctacccgagctgggagggtacatcaatgagtctggacacctcaaccttccaaggtttgaaaagtaccttgtaaaactttcagattttgaccgggaacatttctctgaagtgttcgtggatctaaagtggttcgagagcaaggtgggtaataaatatctcaacgaagcagcaggcgtggcagccgaagaggccagaaactataaggagaagaaaaaattgaaaggacaagaaaactccctttgctggaccgcccttgataagaacgagggggaaatgatcacaagtaaggacaatttggaggacgagacggaggatgacgatctgtttgaaaccgagttcagacagtataagcggacctattacatgactaaaatgggtgtagacgttgtttcagacgactttctggctgatcaggctgcttgttacgttcaggcaatccagtggatactgcattactactatcacggggtgcagagctggtcatggtattatccgtaccactacgcccctttcctctcagatatccacaatatcagcaccctgaagatccacttcgagctcggcaaacccttcaagccatttgaacaattgctggcggtgctccccgctgcttcaaaaaatctcttacccgcttgctaccaacatcttatgacaaacgaagacagtcctataatcgagtattaccccccagactttaagacggatctcaacggaaaacaacaagaatgggaagccgtggtgttgattcctttcatcgacgagaaacggttattagaggctatggagacatgtaatcattcactgaagaaagaggaacgcaagaggaatcagcacagcgagtgccttatgtgttggtacgatcgggacaccgaatttatttaccctagcccctggccggagaaattcccggcaatagaacgttgctgcaccaggtacaaaattatcagtctcgatgcttggcgagtcgacattaacaagaacaaaataaccaggattgaccagaaagccctctacttctgcggcttcccaactctgaaacatattcggcataaattcttcctgaaaaagagcggggtccaggtgtttcagcagagctcccggggagaaaacatgatgctggagatcctcgtggatgcagagtctgatgaattgacagttgagaatgtggcaagttcagtgcttggaaagtcagtctttgttaactggccgcacctggaagaagctcgcgtcgtagctgtgtccgacggcgagactaagttttatctggaggaacctcctggtacacaaaaactgtattcagggagaacagctccgccttcgaaagtggtgcatctcggtgacaaggaacagtccaattgggcaaaggaggttcagggcatcagtgaacattatcttcgccgaaaaggaataattattaacgaaaccagcgcggtcgtctatgcccagttactgaccggtcggaagtatcagataaatcagaatggagaagttcgactggagaaacagtggagtaaacaggttgtcccatttgtctaccaaaccatcgtgaaagatatccgagctttcgattcacgcttcagcaacataaaaaccttggacgacttattccccctcagatcaatggtcttcatgctcggaactccgtattacgggtgtactggggaggtacaggactctggcgacgtcataactgaaggacgtatcagggtcatttttagcatcccctgtgaaccgaacttagacgctcttattcagaatcagcacaagtatagcatcaagtataacccagggtatgtgctggcctctagactgggtgtgagcggttaccttgtcagcagatttaccgggtccatatttatcggacggggttcaaggcgcaatccgcacggagaccacaaagccaacgtgggattgaacctcaagtttaacaagaaaaatgaagaagtccccggttacaccaagaaggtcggtagtgagtggatgtactcctcagcagccgaacagctgctggcagaatatctggaaagagccccagagctatttagctacatcgccaagaatagccaggaagatgtcttttacgaagatgatatctggccgggagaaaatgaaaatggcgcagaaaaagtgcaggaaattattacgtggctgaaaggccacccggtgagcacactgtccaggagtagctgcgatctgcagattctagacgctgcaattgtggaaaaaatagaagaggaggttgaaaaatgcaaacagaggaagaataacaagaaagttcgtgtgacagtgaaaccccatttgctgtatagaccgctggaacagcagcacggtgttatcccagatcgcgatgcggagttctgtttatttgaccgagtggtcaatgtaagggagaacttctcagtgcctgttggactgagaggtacgataatcggcatcaaaggcgctaatcgcgaagctgatgtcctctttgaagtgctgtttgacgaggagtttcctggtggtctaaccataagatgttcccctggaaggggctatcgactcccgacgagtgccctggtcaatctgagccacggctcacgatccgagacagggaaccaaaagctgactgcaatcgtgaagccccagcctgccgtccaccagcattcttcctcctctagcgtgtcctctggccatctcggtgccctgaatcacagcccacagagcctcttcgttccaacacaggtcccgaccaaggatgacgacgaattctgcaatatttggcagagcctccagggttccgggaagatgcaatattttcaacccacaattcaggaaaagggggcagtactgccccaagaaatcagccaggttaaccagcaccataagagcggctttaacgataactctgtcaagtaccagcagcgtaagcacgacccccataggaagttcaaagaggagtgcaaatccccgaaggccgagtgctggtcacagaaaatgtctaacaaacagcctaacagcggaattgagaacttcctggcctcactgaatatctctaaagaaaatgaggttcagagctctcatcacggggagcccccatctgaagaacacctctcaccacaatctttcgctatgggaacgcgaatgcttaaggagatactgaaaattgatggtagcaacaccgtcgaccacaaaaacgagatcaaacaaattgccaatgagattccagtgtctagcaatcgcagggacgaatacggcttgccaagtcagcccaaacagaataagaagcttgcttcctatatgaataagccacacagcgccaacgaatatcacaatgtgcagtccatggacaatatgtgctggcctgcacccagtcagataccacctgttagtacaccggtgacagaactgtctcggatctgctccttagttgggatgccccagcccgacttttcttttttaagaatgccacagaccatgactgtgtgtcaggtgaaattgtccaacggactccttgtccatggacctcaatgtcactctgagaatgaagcaaaggaaaaggccgctttgttcgcactgcaacagctgggaagcttgggcatgaatttcccattaccttcccaggtctttgctaattatccatcagccgtaccacccggtacaatccccccagcctttcctccccctacagggtgggaccactatggtagtaactatgccttaggggcagccaacattatgccatcgagctcccacctcttcgggagcatgccgtggggtccttctgtgcctgtgcctggaaaacctttccaccacaccttgtacagtgggaccatgcctatggcaggcggaatccccggaggggtgcacaaccagtttataccactgcaggtgaccaaaaagcgggtggcaaacaaaaagaattttgaaaacaaagaagcacagagctctcaggctacgccagtgcagacaagccaacccgatagttccaatattgtgaaggtcagccctcgggaatcttcttctgcttctctcaaaagttccccaatcgctcagccagctagctcctttcaggtcgagactgcttcccaaggccacagcattagccatcacaagtccactcccatctctagctcaagacgcaaatctcgcaagctcgccgtcaattttggcgttagcaaaccgtctgagtac

SEQ ID NO: 200880 - DNA, 5121 bp, Artificial Sequence
  derived and/or modified sequence
atgggcgtgcccaagttctacagatggatcagcgagagatacccctgcctgagcgaggtggtgaaggagcaccagatccccgagttcgacaacctgtacctggacatgaacggcatcatccaccagtgcagccaccccaacgacgacgacgtgcacttcagaatcagcgacgacaagatcttcaccgacatcttccactacctggaggtgctgttcagaatcatcaagcccagaaaggtgttcttcatggccgtggacggcgtggcccccagagccaagatgaaccagcagagaggcagaagattcagaagcgccaaggaggccgaggacaagatcaagaaggccatcgagaagggcgagaccctgcccaccgaggccagattcgacagcaactgcatcacccccggcaccgagttcatggccagactgcacgagcacctgaagtacttcgtgaacatgaagatcagcaccgacaagagctggcagggcgtgaccatctacttcagcggccacgagacccccggcgagggcgagcacaagatcatggagttcatcagaagcgagaaggccaagcccgaccacgaccccaacaccagacactgcctgtacggcctggacgccgacctgatcatgctgggcctgaccagccacgaggcccacttcagcctgctgagagaggaggtgagattcggcggcaagaagacccagagagtgtgcgcccccgaggagaccaccttccacctgctgcacctgagcctgatgagagagtacatcgactacgagttcagcgtgctgaaggagaagatcaccttcaagtacgacatcgagagaatcatcgacgactggatcctgatgggcttcctggtgggcaacgacttcatcccccacctgccccacctgcacatcaaccacgacgccctgcccctgctgtacggcacctacgtgaccatcctgcccgagctgggcggctacatcaacgagagcggccacctgaacctgcccagattcgagaagtacctggtgaagctgagcgacttcgacagagagcacttcagcgaggtgttcgtggacctgaagtggttcgagagcaaggtgggcaacaagtacctgaacgaggccgccggcgtggccgccgaggaggccagaaactacaaggagaagaagaagctgaagggccaggagaacagcctgtgctggaccgccctggacaagaacgagggcgagatgatcaccagcaaggacaacctggaggacgagaccgaggacgacgacctgttcgagaccgagttcagacagtacaagagaacctactacatgaccaagatgggcgtggacgtggtgagcgacgacttcctggccgaccaggccgcctgctacgtgcaggccatccagtggatcctgcactactactaccacggcgtgcagagctggagctggtactacccctaccactacgcccccttcctgagcgacatccacaacatcagcaccctgaagatccacttcgagctgggcaagcccttcaagcccttcgagcagctgctggccgtgctgcccgccgccagcaagaacctgctgcccgcctgctaccagcacctgatgaccaacgaggacagccccatcatcgagtactacccccccgacttcaagaccgacctgaacggcaagcagcaggagtgggaggccgtggtgctgatccccttcatcgacgagaagagactgctggaggccatggagacctgcaaccacagcctgaagaaggaggagagaaagagaaaccagcacagcgagtgcctgatgtgctggtacgacagagacaccgagttcatctaccccagcccctggcccgagaagttccccgccatcgagagatgctgcaccagatacaagatcatcagcctggacgcctggagagtggacatcaacaagaacaagatcaccagaatcgaccagaaggccctgtacttctgcggcttccccaccctgaagcacatcagacacaagttcttcctgaagaagagcggcgtgcaggtgttccagcagagcagcagaggcgagaacatgatgctggagatcctggtggacgccgagagcgacgagctgaccgtggagaacgtggccagcagcgtgctgggcaagagcgtgttcgtgaactggccccacctggaggaggccagagtggtggccgtgagcgacggcgagaccaagttctacctggaggagccccccggcacccagaagctgtacagcggcagaaccgccccccccagcaaggtggtgcacctgggcgacaaggagcagagcaactgggccaaggaggtgcagggcatcagcgagcactacctgagaagaaagggcatcatcatcaacgagaccagcgccgtggtgtacgcccagctgctgaccggcagaaagtaccagatcaaccagaacggcgaggtgagactggagaagcagtggagcaagcaggtggtgcccttcgtgtaccagaccatcgtgaaggacatcagagccttcgacagcagattcagcaacatcaagaccctggacgacctgttccccctgagaagcatggtgttcatgctgggcaccccctactacggctgcaccggcgaggtgcaggacagcggcgacgtgatcaccgagggcagaatcagagtgatcttcagcatcccctgcgagcccaacctggacgccctgatccagaaccagcacaagtacagcatcaagtacaaccccggctacgtgctggccagcagactgggcgtgagcggctacctggtgagcagattcaccggcagcatcttcatcggcagaggcagcagaagaaacccccacggcgaccacaaggccaacgtgggcctgaacctgaagttcaacaagaagaacgaggaggtgcccggctacaccaagaaggtgggcagcgagtggatgtacagcagcgccgccgagcagctgctggccgagtacctggagagagcccccgagctgttcagctacatcgccaagaacagccaggaggacgtgttctacgaggacgacatctggcccggcgagaacgagaacggcgccgagaaggtgcaggagatcatcacctggctgaagggccaccccgtgagcaccctgagcagaagcagctgcgacctgcagatcctggacgccgccatcgtggagaagatcgaggaggaggtggagaagtgcaagcagagaaagaacaacaagaaggtgagagtgaccgtgaagccccacctgctgtacagacccctggagcagcagcacggcgtgatccccgacagagacgccgagttctgcctgttcgacagagtggtgaacgtgagagagaacttcagcgtgcccgtgggcctgagaggcaccatcatcggcatcaagggcgccaacagagaggccgacgtgctgttcgaggtgctgttcgacgaggagttccccggcggcctgaccatcagatgcagccccggcagaggctacagactgcccaccagcgccctggtgaacctgagccacggcagcagaagcgagaccggcaaccagaagctgaccgccatcgtgaagccccagcccgccgtgcaccagcacagcagcagcagcagcgtgagcagcggccacctgggcgccctgaaccacagcccccagagcctgttcgtgcccacccaggtgcccaccaaggacgacgacgagttctgcaacatctggcagagcctgcagggcagcggcaagatgcagtacttccagcccaccatccaggagaagggcgccgtgctgccccaggagatcagccaggtgaaccagcaccacaagagcggcttcaacgacaacagcgtgaagtaccagcagagaaagcacgacccccacagaaagttcaaggaggagtgcaagagccccaaggccgagtgctggagccagaagatgagcaacaagcagcccaacagcggcatcgagaacttcctggccagcctgaacatcagcaaggagaacgaggtgcagagcagccaccacggcgagccccccagcgaggagcacctgagcccccagagcttcgccatgggcaccagaatgctgaaggagatcctgaagatcgacggcagcaacaccgtggaccacaagaacgagatcaagcagatcgccaacgagatccccgtgagcagcaacagaagagacgagtacggcctgcccagccagcccaagcagaacaagaagctggccagctacatgaacaagccccacagcgccaacgagtaccacaacgtgcagagcatggacaacatgtgctggcccgcccccagccagatcccccccgtgagcacccccgtgaccgagctgagcagaatctgcagcctggtgggcatgccccagcccgacttcagcttcctgagaatgccccagaccatgaccgtgtgccaggtgaagctgagcaacggcctgctggtgcacggcccccagtgccacagcgagaacgaggccaaggagaaggccgccctgttcgccctgcagcagctgggcagcctgggcatgaacttccccctgcccagccaggtgttcgccaactaccccagcgccgtgccccccggcaccatcccccccgccttccccccccccaccggctgggaccactacggcagcaactacgccctgggcgccgccaacatcatgcccagcagcagccacctgttcggcagcatgccctggggccccagcgtgcccgtgcccggcaagcccttccaccacaccctgtacagcggcaccatgcccatggccggcggcatccccggcggcgtgcacaaccagttcatccccctgcaggtgaccaagaagagagtggccaacaagaagaacttcgagaacaaggaggcccagagcagccaggccacccccgtgcagaccagccagcccgacagcagcaacatcgtgaaggtgagccccagagagagcagcagcgccagcctgaagagcagccccatcgcccagcccgccagcagcttccaggtggagaccgccagccagggccacagcatcagccaccacaagagcacccccatcagcagcagcagaagaaagagcagaaagctggccgtgaacttcggcgtgagcaagcccagcgagtag

SEQ ID NO: 200881 - protein, 926 aa, Artificial Sequence
  derived and/or modified sequence
MSRRRKHDDSPSPKKTPHKTVAAEECGSVVEPGRRRLRSARGSWPCGAREGPPGPVRQREQPPTAALCSKSNPEERYETPKRALKMDSLSSSFSSPNDPDGQNDIFWDQNSPLTKQLGKGRKKQIYTTDSDEISHIVNRIAPQDEKPTTNSMLDMWIGETAIPCTPSVAKGKSRAKISCTKLKTQSQEEELMKLAKQFDKNMEELDVIQEQNKRNYDFTQMISETEILSNYKDNIQMWSLHNIVPEIDNATKKPIKGNTKISVANNQNSSQKPFDQIAEAAFNAIFDGSTQKCSGQLSQELPEAFWSTSNTTFVKTNALKEEKIITNETLVIEKLSNKTPRSLSSQVDTPIMTKSCVTSCTKEPETSNKYIDAFTTSDFEDDWENLLGSEPFAMQNIDMPELFPSKTAHVTDQKEICTFNSKTVKNTSRANTSPDARLGDSKVLQDLSSKTYDRELIDAEYRFSPNSNKSNKLSTGNKMKFENSSNKIVIQDEIQNCIVTSNLTKIKEDILTNSTEASERKSALNTRYSNEQKNKCILNQSIKAPVNTDLFGSANLGSKTSVSNPNQTSASKVGSFFDDWNDPSFANEIIKACHQLDNTWEADDVDDDLLYQACDDIERLTQQQDIRKDSKTSESICEINNNSEHGAKLTQQQDIRKDSKTSESICEINNNSEHGAKNMFAISKQGSNLVQSKHLNPGSISVQTSLTNSSQIDKPMKMEKGEMYGNSPRFLGATNLTMYSKISNCQINNLHVSYTNTDVPIQVNSSKLVLPGSSSLNVTSDHMNTEITTYKKKLSTNQPCHKTVTDEAQSNLNTTVGFSKFTFTRMKNSQILSQFNQNCITGSMSDTKITQGVEKKKGVNPLLEEAVGQQSLVKLSESLKQSSKEEEEKNRKCSPEEIQRKRQEALVRRMAKARASSVNAAPTSFL

SEQ ID NO: 200882 - DNA, 3418 bp, Artificial Sequence
  derived and/or modified sequence
cttgcgcgcgccccaccgaccaaaatggcggctgccgttggtgcggggtgcggtttgtagtgctgttgccctactcatccctttgcaaaatgtgaaagaagaagcggctggtggaggcgggccataggcaatgagtcggcgaaggaaacatgatgacagccctagcccgaagaaaacgccgcacaaaacagtggcggcggaggaatgcggctcggtggtcgagccagggaggaggcggctgagatcggcccgcggttcgtggccctgcggggctagagaggggcctcccgggccagtgcggcagcgagagcagcctccgaccgccgccctgtgcagtaaaagtaaccccgaggaaaggtatgaaacaccaaagagagcgctgaaaatggactcactgtcatcttccttcagttctcctaatgatccagatggacagaatgatatcttttgggatcagaattctccattgacaaagcagttaggtaaaggaagaaaaaaacagatttacaccacagatagtgatgagatttcacatattgttaatcgtattgctcctcaggatgaaaaaccaacaacaaattctatgctggacatgtggattggtgaaactgctattccttgtactcccagtgtagcaaaaggaaaatcaagagcaaaaatcagctgcacaaagttaaaaacacaaagtcaagaagaagaacttatgaaactggctaaacaatttgataaaaatatggaagagctagatgtgattcaagagcaaaacaagaggaattatgattttacccagatgatttcagaaacagagattttaagtaattataaagataatatacagatgtggtcattacataatatagttcccgaaatagataatgctacaaaaaagccaatcaaaggaaacaccaagatatctgtggcaaataatcaaaatagcagtcagaagccatttgaccaaattgctgaagcagcctttaatgctatttttgatggttctactcagaaatgtagcggacagttaagccaagaactgccagaggctttttggagcaccagtaatactacctttgtaaagacaaatgctttgaaagaggagaaaatcattactaatgaaactctggtcattgaaaaactgtcaaataaaaccccacgatcactttcttctcaagtagatacacccataatgacaaaatcatgtgtgacttcctgtactaaggagccagaaacttctaataagtacattgatgcatttactacaagtgattttgaggatgattgggaaaacttactaggtagtgaaccttttgctatgcaaaatatcgacatgcctgaactctttccttctaaaacagcccatgttactgatcaaaaggaaatttgtacctttaatagtaaaactgttaaaaatacgtcaagagcaaatacaagtccagatgccaggttaggagattcaaaagtattacaagatctttcttcaaagacatatgacagagaattaatagatgcagaatatagattttcaccaaattcaaataaatcaaacaaattatccactggaaataaaatgaaatttgagaactcttccaataaaattgttattcaagacgaaattcaaaattgtatagttacatctaatctgacaaaaataaaggaagatattcttactaactctactgaagcttctgaaaggaagtcagctttgaacacaaggtattctaatgaacagaaaaataagtgcattttaaatcagtctattaaagcccctgttaatactgatctttttggctctgcaaatctaggcagtaaaaccagtgttagtaacccaaatcagactagtgcatcaaaagtaggttctttctttgatgattggaatgatccctcatttgccaatgaaattattaaagcatgtcatcaattagataatacctgggaagcagatgatgtagatgatgatttgttgtaccaagcatgtgatgatattgaaagactaactcagcaacaagacattagaaaggacagtaagacatcagaaagtatatgtgagatcaataataattccgaacatggagccaaactaactcagcaacaagacattagaaaggacagtaagacatcagaaagtatatgtgagatcaataataattccgaacatggagccaaaaacatgtttgctatatctaaacaaggaagtaatttggtacaatcaaagcatttgaatccaggcagcatttcagtgcagacatctttgacaaatagctcacaaatagataagccaatgaagatggagaaaggggaaatgtatggaaattctccaagatttttaggtgccacaaatttgactatgtattctaagatctcaaactgtcagataaataatctgcatgtgtcttatactaacactgatgttccaatacaagtgaatagttccaaattggttcttccaggaagttcaagtttgaatgtaacttcagatcatatgaatacagaaattactacttataagaagaaattgagtactaatcagccatgccataagactgtaacagatgaagctcagagcaaccttaacacaacagttggattttcaaagtttacatttacaaggatgaaaaattctcagattctttctcagtttaatcaaaattgtataactggaagtatgtctgataccaaaattacacagggtgtggagaaaaagaaaggtgtcaacccattactggaggaagctgttggacagcaatctttggtgaaactttctgaatctttgaaacaatcttcaaaagaggaagaagagaaaaatagaaagtgttctcctgaagaaattcagagaaaaagacaagaagcactggttcggagaatggctaaagcacgagcctcatctgtaaatgcagctcccacttcatttctttaatgaaatattagttggaagacttcacgaagactgctgataactatctgtgattgataggaaattttttttcttgatttctctgtgagaaatgtaatgctgacttttataaagcctggacttctactttatttaataaatcaatgtttgcaatggtaaatgaaacatttccttggacatgtatttgaaagtcattaaatacaaaagttttggaaattcaggaaagttagcaattatgtacggatattatacagaggaaagtagttatatttttaaatgctattattgcagaggatcatcaaaaaagaggtaatctacgttatttcctattctaatgtcttttcctaataaaaaacttcaactttctaagttagtagagactgtttttgtagttttactttcattaactgttgcttaaggtttttatacacttccagattttaattaatactttcatatttctaggaacatggttgatatgaaataaaggactttttatttgtaaggaaa

SEQ ID NO: 200883 - DNA, 2781 bp, Artificial Sequence
  derived and/or modified sequence
atgtcacggaggaggaagcacgatgattcgcctagccccaaaaaaaccccacacaagactgtagcggctgaagaatgcgggtcagttgttgaacccggcaggagacgactgagatcagctaggggatcctggccatgtggcgcccgcgaaggcccacccggccccgtacggcagcgcgaacagccaccgacagcagcactctgctccaagagtaaccctgaagagagatacgagacccctaaaagggccctgaagatggactccctcagttctagcttcagcagcccgaatgaccccgatggccagaacgatattttttgggaccagaacagccccctaacaaaacagctcgggaaggggaggaagaagcagatctatactaccgacagtgatgagatcagtcacatagtgaaccgtatagccccacaggatgaaaagcccactaccaattccatgctggacatgtggattggagaaacggcgatcccctgtaccccctctgtcgccaagggtaaaagcagagctaagatttcttgcacaaaactgaaaacacaatcccaggaggaggaactcatgaaattggctaaacagttcgataagaacatggaagaactggatgtgatccaggagcagaacaagagaaactacgattttacccagatgatctccgagaccgaaatcttgagcaattataaggacaacatccagatgtggtctttgcacaacattgtgccagaaatcgataatgctacaaaaaagcccatcaagggaaacacaaagatatccgtggctaacaaccagaactcctcccagaaacccttcgatcagattgcggaggctgccttcaatgccatcttcgacggcagcacacagaagtgttcaggacagctgagccaggagctgcccgaagccttttggtctacgtctaatacgaccttcgtgaagacaaatgcattaaaagaggaaaagataattaccaatgaaactctggttatcgagaagctttctaataagactccgcgaagtctcagcagccaggtcgacactcccattatgaccaagtcatgcgttacttcttgtaccaaagaaccagagaccagcaacaagtatatagacgctttcaccacttctgatttcgaggacgattgggaaaatcttttaggctccgaaccattcgccatgcagaatatcgacatgccagagctattccctagcaagaccgcacacgtgaccgatcaaaaggagatctgtacttttaactctaagactgtgaagaatacctcaagggccaacacctctcctgacgctagactaggtgactctaaggttctgcaggatttatccagtaagacatacgacagggagctcatcgatgccgagtataggttttcaccgaactccaacaagtctaataagctgagcaccggcaacaagatgaagttcgaaaattcctctaataaaatcgtgatccaggatgagatacagaactgcatcgttacctctaatcttactaagatcaaagaggatatacttacgaacagtactgaggccagcgagcggaaaagcgccctcaatacacggtactccaacgagcagaagaacaagtgcatcctgaaccagagtatcaaggctccagtaaacactgacttgtttggcagcgctaacctgggttcgaaaacgtcggtgagcaatcccaaccagacctccgcatcaaaagtcgggtcattctttgacgattggaacgatccttcttttgccaatgagatcattaaagcctgccatcaactcgacaacacctgggaagccgacgatgtggacgacgatctgctgtatcaggcgtgtgacgacatcgagcgactcactcaacagcaggatatcaggaaagactcaaagacgtccgagtctatttgcgaaattaataacaactccgaacacggcgcgaagcttactcagcagcaggacatcaggaaagacagcaagacctctgagtctatttgtgaaatcaacaataatagcgagcacggagccaagaacatgttcgccatctccaagcagggcagtaacctggtgcagagcaaacacctcaatccaggaagcatttctgttcagacatccctgacaaatagctcccagatcgataaacccatgaagatggaaaagggcgagatgtacggcaacagtccacgcttcctaggtgctaccaatttgaccatgtactccaaaatctccaattgtcaaattaacaacctccacgtttcctacaccaacactgacgtaccaatccaagtgaactcctctaagttggtgctgcccggctcttctagtctaaatgtcaccagcgatcacatgaacactgagattacaacctacaaaaagaagctgagcaccaaccaaccctgtcataaaaccgtcacagatgaggctcagagcaatctgaacacgaccgtaggcttctcaaagttcacattcacccggatgaaaaactcacagattctgtcacagtttaatcagaattgtataacaggttccatgagcgacaccaaaatcacccagggtgtggaaaaaaagaagggtgtaaaccctctcctggaggaagctgttggtcagcaatcacttgtgaagctgtccgagagcctgaaacagtcctcaaaggaggaagaagagaagaacagaaagtgtagtccagaagaaatacaaaggaaaaggcaagaggctctggtccgaaggatggccaaggctagagcctctagtgtgaatgccgcaccgacttcctttctgtag

SEQ ID NO: 200884 - DNA, 2781 bp, Artificial Sequence
  derived and/or modified sequence
atgagcagaagaaggaagcatgatgacagccccagccccaagaagaccccccacaagacagtggccgcagaagaatgtggctctgtggtggagcccggcagaagaaggctgcggagcgcccggggctcctggccctgtggggcccgggagggccccccaggccctgtgcggcagcgggagcagcccccaacagctgccctgtgcagcaagagcaaccctgaggagagatatgagacccccaagagggccctgaagatggacagcctgagcagcagcttcagcagccccaatgaccctgatggccagaatgacatcttctgggaccagaacagccccctgaccaagcagctgggcaaaggaaggaagaagcagatctacaccacagacagtgatgagatcagccacatcgtgaaccgcatcgccccccaggatgagaagcccaccaccaacagcatgctggacatgtggattggagaaacagccatcccctgcaccccatctgtggccaagggcaagagccgggccaagatcagctgcaccaagctgaagacccagagccaggaggaggagctgatgaagctggccaagcagtttgacaagaacatggaggagctggatgtgatccaggagcagaacaagaggaactatgacttcacccagatgatcagcgagacagagatcctgagcaactacaaggacaacatccagatgtggagcctgcacaacatcgtgcctgagattgacaatgccaccaagaagcccatcaagggcaacaccaagatctctgtggccaacaaccagaacagcagccagaagccctttgaccagattgctgaggccgccttcaatgccatctttgatggcagcacccagaagtgcagcggccagctgagccaggagctgcctgaggccttctggagcaccagcaacaccacctttgtgaagaccaatgccctgaaggaggagaagatcatcaccaatgagaccctggtgattgagaagctgagcaacaagacccccaggagcctgagcagccaggtggacacccccatcatgaccaagagctgtgtgaccagctgcaccaaggagcctgagaccagcaacaagtacattgatgccttcaccaccagtgactttgaagatgactgggagaacctgctgggcagcgagccctttgccatgcagaacatcgacatgcctgagctgttccccagcaagacagcccacgtgacagaccagaaggagatctgcaccttcaacagcaagacagtgaagaacaccagccgggccaacaccagcccagatgcccggctgggggacagcaaggtgctgcaggacctgagcagcaagacctatgaccgggagctgattgatgctgagtaccgcttcagccccaacagcaacaagagcaacaagctgagcactggaaacaagatgaagtttgagaacagcagcaacaagatcgtcatccaggatgagatccagaactgcatcgtgaccagcaacctgaccaagatcaaggaggacatcctgaccaacagcacagaggccagcgagaggaagagcgccctgaacacccgctacagcaatgagcagaagaacaagtgcatcctgaaccagagcatcaaggcccctgtgaacacagacctgtttggaagtgccaacctgggcagcaagacctctgtgagcaaccccaaccagaccagcgccagcaaggtgggcagcttctttgatgactggaatgaccccagctttgccaatgagatcatcaaggcctgccaccagctggacaacacctgggaggctgatgatgtggatgatgacctgctgtaccaggcctgtgatgacatcgagcggctgacccagcagcaggacatcaggaaggacagcaagaccagcgagagcatctgtgagatcaacaacaacagcgagcacggggccaagctgacccagcagcaggacatcaggaaggacagcaagaccagcgagagcatctgtgagatcaacaacaacagcgagcacggggccaagaacatgtttgccatcagcaagcagggcagcaacctggtgcagagcaagcacctgaaccctggcagcatctctgtgcagaccagcctgaccaacagcagccagattgacaagcccatgaagatggagaagggggagatgtatggcaacagcccccgcttcctgggcgccaccaacctgaccatgtacagcaagatcagcaactgccagatcaacaacctgcacgtgtcctacaccaacacagatgtgcccatccaggtgaacagcagcaagctggtgctgcccggcagcagcagcctgaatgtgaccagtgaccacatgaacacagagatcaccacctacaagaagaagctgagcaccaaccagccctgccacaagacagtgacagatgaggcccagagcaacctgaacaccaccgtgggcttcagcaagttcaccttcaccaggatgaagaacagccagatcctgagccagttcaaccagaactgcatcaccggctccatgtctgacaccaagatcacccagggcgtggagaagaagaagggcgtgaaccccctgctggaggaggccgtgggccagcagagcctggtgaagctgtctgagagcctgaagcagagcagcaaggaggaggaggagaagaacaggaagtgcagccctgaggagatccagaggaagaggcaggaggccctggtgcggaggatggccaaggcccgggccagctctgtgaatgctgcccccaccagcttcctgtag

SEQ ID NO: 200885 - DNA, 2781 bp, Artificial Sequence
  derived and/or modified sequence
atgagccggcggcggaagcacgacgacagccccagccccaagaagaccccccacaaaactgtcgcagcggaagaatgtggtagcgtcgtagagccgggcaggaggcggttacggagtgcaagaggcagctggccgtgtggagcacgcgagggcccacctggacccgtgagacagagagagcagcctcccaccgccgccctgtgttcaaagtctaacccggaagaacgctatgagacccccaagagagctcttaaaatggactccttatccagcagcttcagctctcctaatgatcccgatggacagaatgacatcttctgggatcagaattcacccttaaccaagcagctaggtaaaggacggaagaaacagatttatacgacagatagcgatgagatttctcatatcgtcaaccgtatagccccccaggatgagaagcccacgaccaatagcatgctggacatgtggatcggcgagacggccatcccgtgcaccccttcggtggccaagggtaagagtcgagccaagatttcctgcaccaagctgaagacccagtcacaagaagaagagctgatgaaacttgccaagcaatttgataaaaatatggaggagttggacgtcatccaagagcagaacaaaaggaattacgacttcacgcagatgattagtgaaacagagatcctctctaactacaaagataacatccagatgtggagccttcataatatcgtcccagagatcgacaacgccacaaaaaagcctatcaaagggaacaccaagatctcagtggctaacaatcagaacagttctcagaagcccttcgaccagatcgcagaggcagcctttaacgctatttttgatggctctacacagaagtgcagcgggcagctaagtcaagaactgcccgaagcattttggtctacatctaacactacgttcgttaagactaacgctctgaaggaggaaaaaattattacaaacgagactttggttatcgaaaaactgagtaataagacgccaagaagtctgagctcacaagttgatacccctattatgaccaaatcctgcgtgacaagctgtactaaagagcccgaaacctcgaataagtacattgatgccttcacgacctcagacttcgaagacgactgggagaatctactaggcagcgagcccttcgcgatgcagaatatagatatgccagaactgttcccgtccaagactgcccacgtgacagatcagaaggaaatctgcacctttaactccaaaactgttaagaatactagccgggccaacacttctccagatgctcgattgggagacagcaaagtgcttcaggatctctccagtaagacctatgatagggagctgatcgatgcggaatatagattctctcctaactcaaataaatcaaataaacttagtactgggaataagatgaagtttgagaacagtagtaataagatcgtgatccaggacgaaatccagaactgcatcgtgacctcgaacctgaccaaaattaaagaggacatattgacaaactccactgaggcaagcgagcgaaaatccgcccttaacacaaggtacagtaacgaacagaagaacaaatgtatccttaaccagagcatcaaagcccctgtgaatactgacctgtttggatctgcaaatctggggtcaaaaacctcagttagcaatcccaatcagaccagcgcgagcaaggtcggctctttttttgacgactggaatgacccaagcttcgcaaacgagataatcaaagcctgccaccagttagataatacgtgggaagccgatgatgttgacgatgacctgctataccaagcctgcgatgacatagaaaggttgactcagcagcaggatattcggaaagattctaaaacatccgaatccatctgcgagataaacaacaactctgaacatggagccaagctgacacagcagcaggatattcgcaaggactcgaaaacaagcgaatctatctgtgagattaacaacaattccgagcacggcgcaaagaatatgttcgcgatttcaaaacagggtagcaatctggtgcagagcaaacatctcaatcctgggagcatttctgttcaaacatcactgaccaatagctcgcagatcgataagccaatgaaaatggagaagggggaaatgtatggcaattccccccggttccttggggccactaatctgaccatgtacagcaagatttccaattgtcaaatcaataatttgcacgtttcttacacaaacaccgacgtacccatacaggttaactcttccaaattagtgctccctggctctagtagcctcaatgtcactagtgaccacatgaatacagagattacaacttataaaaagaagctgagtaccaaccagccttgccataaaaccgtcactgatgaggctcaatcaaatcttaacactacggttggattttctaagtttacattcacccggatgaaaaattcccaaatactgtctcagtttaaccaaaattgtatcacggggtcgatgtctgatactaagataacacagggcgtcgagaaaaaaaagggagttaacccattgctcgaagaggcagttggccagcagtcccttgtgaaactgtccgagtcactgaagcagtccagtaaggaggaagaggaaaaaaaccgaaaatgctcgccagaagaaatccagcggaagaggcaggaagccttagtccggcggatggcgaaggcccgtgccagttctgtgaatgcggctccaaccagttttctgtag

SEQ ID NO: 200886 - DNA, 2781 bp, Artificial Sequence
  derived and/or modified sequence
atgtcccgcagacggaaacacgacgactccccctctccaaaaaaaaccccccacaagaccgtagctgcggaggagtgtggatcggtggtggagccaggccgaagacgactgcggtctgccagaggctcatggccatgcggagcacgagagggtccgccaggacctgttcggcagcgcgaacaaccacccacggctgccctgtgcagcaaatctaacccagaggaacggtatgagacccccaaacgggctctgaaaatggattccctatccagcagtttttccagcccaaacgacccagacggccagaatgacattttctgggatcaaaattcccccttaacaaagcagctgggaaaaggacgaaaaaagcagatatacactaccgacagtgacgagattagccatatcgtgaaccgaatagcccctcaggacgagaaaccgacaacgaactccatgttggacatgtggattggcgagacggctatcccctgcacccccagcgttgctaaaggtaaaagtagagccaagatctcttgcaccaaactgaagacccaatcacaggaggaggagctgatgaaacttgccaagcagttcgacaagaatatggaggaactcgatgtgatacaggagcagaacaaacgtaattatgacttcacacagatgatttccgagacggaaattttgtcaaactataaggataacatccagatgtggtctctacataacattgtacccgaaatcgacaacgccacaaaaaagccaatcaagggtaataccaaaatttcagtagcgaacaaccaaaacagttcccaaaaaccattcgatcaaatcgctgaagcagccttcaacgcaattttcgacggctccactcagaagtgtagtggccaactgtcacaggagctgccagaggcattctggtcaactagtaacaccacatttgttaagacaaacgctctcaaagaagaaaagatcataaccaatgagaccctagttatcgagaagctaagcaacaagaccccaaggtccctatcttctcaggtggacacgcctattatgacaaagtcatgtgttacaagctgcacgaaagaacccgagacctcaaacaaatatatcgatgcttttacaacttctgactttgaagacgattgggagaacctgctgggaagcgagcctttcgccatgcagaatattgatatgcccgagctcttcccttccaaaacagcccacgtcaccgaccagaaggaaatttgcacttttaatagcaaaactgtcaagaacacctcaagggcaaacacaagccctgacgcaaggctaggtgacagcaaggttctgcaggacttgagctcaaaaacatacgaccgagaactcatcgacgccgagtaccgcttttcccctaacagcaacaagtcaaacaaactgagcactggaaacaagatgaagttcgaaaattcttccaataagatcgtcattcaggacgagattcaaaactgcatagtcacttccaaccttacaaaaattaaggaagacattctgactaactcgaccgaagcttccgagaggaagagcgcactcaacaccagatacagtaatgaacagaagaacaaatgcattctgaaccagtctatcaaggctcccgtgaataccgacttgttcggctccgcaaatctgggttcgaaaacatctgtgagcaaccccaatcaaacttccgcctccaaggtcggaagcttttttgacgattggaatgatccctcatttgccaatgaaatcatcaaggcctgtcaccagctggacaacacgtgggaagcagatgacgtggatgatgacctgttatatcaggcgtgcgatgatatagagcggctcacccagcaacaagatatcaggaaggatagcaaaacttccgagagtatctgcgaaattaataacaacagtgagcacggtgccaagctgacccagcagcaagatataagaaaagactctaagacttctgagagcatttgtgaaattaacaataacagcgaacatggggcaaaaaacatgttcgctattagtaaacagggaagtaatctggttcagagcaagcatctgaatccaggctcgatctcggtgcaaacaagtctgacaaattccagtcagattgacaagcccatgaagatggagaaaggagagatgtacggcaatagccctaggtttctgggagccaccaatctcacgatgtactccaaaatttccaactgccagatcaataacctccacgtatcatacaccaacacagatgtgccaatccaagtgaattcatcaaagctggtgctgccagggtcttcatccctcaatgtgacatccgaccatatgaacaccgagattacaacttataaaaaaaagttgagcaccaaccaaccatgtcataaaaccgtgactgacgaagctcagagcaacctgaacactactgttggcttttcaaagtttacgttcacaaggatgaaaaattcccagatcctcagtcagtttaatcagaactgtattacagggtcaatgtccgacaccaagatcactcagggcgtggagaaaaaaaagggcgtgaatcctttactcgaagaggcagtgggacagcagtccctggtgaagctgtccgaaagcctgaagcaaagctctaaggaggaggaggaaaagaaccgtaagtgttctcctgaagagattcagcgtaagaggcaggaagctcttgtccggagaatggccaaagcacgggcatcgtccgtgaacgcggctccaacttcattcttgtag
